United States Patent Application Publication US 2026/0337666 A1 - sequence listing, part 14

SEQ ID NO: 19627 - DNA, 1747 bp, Homo sapiens
  source 1..1747: mol_type = unassigned DNA
aagaacggggccaccgcgtttggggcttctcctcccgcagaagggaactcaaaccctgtctctttccccaggtctcggaggaggctttggatacgtggtcggcggaatccactgggataaaacgggcttcgggagggccctggggggacagctccgagtcatttacctcttcactgcggtcaccctgagcgtcaccaccgtcctgaccctggtcagcatccctgagaggccgctgcggccgccgagtgagaagcgggcagccatgaagagccccagcctcccgctgcccccgtccccacccgtcctgccagaggaaggccctggcgacagcctcccgtcgcacacggccaccaacttctccagccccatctcgccgcccagccccctcacgcccaagtacggcagcttcatcagcagggacagctccctgacgggcatcagcgagttcgcctcatcctttggcacggccaacatagacagcgtcctcattgactgcttcacgggcggccacgacagctacctggccatccctggcagcgtccccaggccgcccatcagcgtcagcttcccccgggcccccgacggcttctaccgccaggaccgtggacttctggagggcagagagggtgccctgacctccggctgtgacggggacattctgagggtgggctccttggacacctctaagccgaggtcatcagggattctgaagagacctcagaccttggccatcccggacgcagccggaggagggggtcccgaaaccagcaggagaaggaatgtgaccttcagtcagcaggtggccaatatcctgctcaacggcgtgaagtatgagagcgagctgacgggctccagcgagcgcgcggagcagcctctgtccgtggggcgcctctgctccaccatctgcaacatgcccaaggcgctacgcaccctctgcgtcaaccacttcctggggtggctctcattcgaggggatgttgctcttctacacagacttcatgggcgaggtggtgtttcagggggaccccaaggccccgcacacatcagaggcgtatcagaagtacaacagcggcgtgaccatgggctgctggggcatgtgtatctacgccttcagtgctgccttctactcagctatcctggagaagctggaggagttcctcagcgtccgcaccctctacttcatcgcctatctcgccttcggcctggggaccgggcttgccaccctctccaggaacctctacgtggtcctgtcgctctgcataacctacgggattttattttccaccctgtgcaccttgccttactcgctgctctgcgattactatcagagtaagaagtttgcagggtccagtgcggacggcacccggcggggcatgggcgtggacatctctctgctgagctgccagtacttcctggctcagattctggtctccctggtcctggggcccctgacctcggccgtgggcagtgccaacggggtgatgtacttctccagcctcgtgtccttcctgggctgcctgtactcctccctgtttgtcatttatgaaattcctcccagcgacgctgcagacgaggagcaccggcccctcctgctgaacgtctgacatcgcggagcctcgactccggacacgcgcctgcacctgggggtctggagcaggccgaccagtgaggaccaaagggccttgttggacagggggactggctgcctactggaatgtaaatatgtgataaaataataaatgacagcg

SEQ ID NO: 19628 - DNA, 694 bp, Homo sapiens
  source 1..694: mol_type = unassigned DNA
cgtccccacccgtcctgccagaggaaggccctggcgacagcctcccgtcgcacacggccaccaacttctccagccccatctcgccgcccagccccctcacgcccaagtacggcagcttcatcagcagggacagctccctgacgggcatcagcgagttcgcctcatcctttggcacggccaacatagacagcgtcctcattgactgcttcacgggcggccacgacagctacctggccatccctggcagcgtccccaggccgcccatcagcgtcagcttcccccgggcccccgacggcttctaccgccaggaccgtggacttctggagggcagagagggtgccctgacctccggctgtgacggggacattctgagggtgggctccttggacacctctaagccgaggtcatcagggattctgaagagacctcagaccttggccatcccggacgcagccggaggagggggtcccgaaaccagcaggagaaggaatgtgaccttcagtcagcaggtggccaatatcctgctcaacggcgtgaagtatgagagcgagctgacgggctccagcgagcgcgcggagcagcctctgtccgtggggcgcctctgctccaccatctgcaacatgcccaaggcgctacgcaccctctgcgtcaaccacttcctggtctctttctgctgtcgagtggttgaacattt

SEQ ID NO: 19629 - DNA, 2401 bp, Homo sapiens
  source 1..2401: mol_type = unassigned DNA
atgatccccgcagccagcagcaccccgccgggagatgccctcttccccagcgtggccccacaggacttctggaggtcccaggtcacgggctactcggggtccgtgacacgacacctcagtcaccgggccaacaacttcaaacgacaccccaagaggaggaagtgcattcgtccctccccacccccgccccccaacaccccgtgcccgcttgagctggtggacttcggggacctgcacccccagaggtccttccgggagctgcttttcaacggctgcattctctttggcatcgagttcagctacgccatggagacggcgtacgtgaccccggtgctcctgcagatgggcctgcccgaccagctctacagcctggtgtggttcatcagccccatcctcggattcctactgcagcctctgttgggtgcttggagtgaccggtgtacctcaaggtttggaaggagacgccctttcattcttgtcctggctataggggcactgctgggcctctcgctcttgctgaatggccgggacattggcatcgccctggctgacgtgaccgggaaccacaagtggggcctgctgctgaccgtgtgcggtgtggtgctgatggactttagcgccgactcggcggacaaccccagccacgcctacatgatggacgtgtgcagccccgcagaccaggaccgaggcctgaacatccacgccctcctggcaggtctcggaggaggctttggatacgtggtcggcggaatccactgggataaaacgggcttcgggagggccctggggggacagctccgagtcatttacctcttcactgcggtcaccctgagcgtcaccaccgtcctgaccctggtcagcatccctgagaggccgctgcggccgccgagtgagaagcgggcagccatgaagagccccagcctcccgctgcccccgtccccacccgtcctgccagaggaaggccctggcgacagcctcccgtcgcacacggccaccaacttctccagccccatctcgccgcccagccccctcacgcccaagtacggcagcttcatcagcagggacagctccctgacgggcatcagcgagttcgcctcatcctttggcacggccaacatagacagcgtcctcattgactgcttcacgggcggccacgacagctacctggccatccctggcagcgtccccaggccgcccatcagcgtcagcttcccccgggcccccgacggcttctaccgccaggaccgtggacttctggagggcagagagggtgccctgacctccggctgtgacggggacattctgagggtgggctccttggacacctctaagccgaggtcatcagggattctgaagagacctcagaccttggccatcccggacgcagccggaggagggggtcccgaaaccagcaggagaaggaatgtgaccttcagtcagcaggtggccaatatcctgctcaacggcgtgaagtatgagagcgagctgacgggctccagcgagcgcgcggagcagcctctgtccgtggggcgcctctgctccaccatctgcaacatgcccaaggcgctacgcaccctctgcgtcaaccacttcctggggtggctctcattcgaggggatgttgctcttctacacagacttcatgggcgaggtggtgtttcagggggaccccaaggccccgcacacatcagaggcgtatcagaagtacaacagcggcgtgaccatgggctgctggggcatgtgtatctacgccttcagtgctgccttctactcagctatcctggagaagctggaggagttcctcagcgtccgcaccctctacttcatcgcctatctcgccttcggcctggggaccgggcttgccaccctctccaggaacctctacgtggtcctgtcgctctgcataacctacgggattttattttccaccctgtgcaccttgccttactcgctgctctgcgattactatcagagtaagaagtttgcagggtccagtgcggacggcacccggcggggcatgggcgtggacatctctctgctgagctgccagtacttcctggctcagattctggtctccctggtcctggggcccctgacctcggccgtgggcagtgccaacggggtgatgtacttctccagcctcgtgtccttcctgggctgcctgtactcctccctgtttgtcatttatgaaattcctcccagcgacgctgcagacgaggagcaccggcccctcctgctgaacgtctgacatcgcggagcctcgactccggacacgcgcctgcacctgggggtctggagcaggccgaccagtgaggaccaaagggccttgttggacagggggactggctgcctactggaatgtaaatatgtgataaaataataaatgacagcggcaaagccta

SEQ ID NO: 19630 - DNA, 2448 bp, Homo sapiens
  source 1..2448: mol_type = unassigned DNA
atctctgcttgcggtttcaggaaggcctctggctgctctaggagtctgatcagagtcgttgccccagtttgacagaaggaaaggcggagcttattcaaagtctagagggagtggaggagttaaggctggatttcagatctgcctggttccagccgcagtgtgccctctgctcccccaacgactttccaaataatctcaccagcgccttccagctcaggcgtcctagaagcgtcttgaagcctatggccagctgtctttgtgttccctctcacccgcctgtcctcacagctgagactcccaggaaaccttcagactaccttcctctgccttcagcaaggggcgttgcccacattctctgagggcgttcggatgggcagcctggggctgttcctgcagtgcgccatctccctggtcttctctctggtcatggaccggctggtgcagcgattcggcactcgagcagtctatttggccagtgtggcagctttccctgtggctgccggtgccacatgcctgtcccacagtgtggccgtggtgacagcttcagccgccctcaccgggttcaccttctcagccctgcagatcctgccctacacactggcctccctctaccaccgggagaagcaggtgttcctgcccaaataccgaggggacactggaggtgctagcagtgaggacagcctgatgaccagcttcctgccaggccctaagcctggagctcccttccctaatggacacgtgggtgctggaggcagtggcctgctcccacctccacccgcgctctgcggggcctctgcctgtgatgtctccgtacgtgtggtggtgggtgagcccaccgaggccagggtggttccgggccggggcatctgcctggacctcgccatcctggatagtgccttcctgctgtcccaggtggccccatccctgtttatgggctccattgtccagctcagccagtctgtcactgcctatatggtgtctgccgcaggcctgggtctggtcgccatttactttgctacacaggtagtatttgacaagagcgacttggccaaatactcagcgtagaaaacttccagcacattggggtggagggcctgcctcactgggtcccagctccccgctcctgttagccccatggggctgccgggctggccgccagtttctgttgctgccaaagtaatgtggctctctgctgccaccctgtgctgctgaggtgcgtagctgcacagctgggggctggggcgtccctctcctctctccccagtctctagggctgcctgactggaggccttccaagggggtttcagtctggacttatacagggaggccagaagggctccatgcactggaatgcggggactctgcaggtggattacccaggctcagggttaacagctagcctcctagttgagacacacctagagaagggtttttgggagctgaataaactcagtcacctggtttcccatctctaagccccttaacctgcagcttcgtttaatgtagctcttgcatgggagtttctaggatgaaacactcctccatgggatttgaacatatgaaagttatttgtaggggaagagtcctgaggggcaacacacaagaaccaggtcccctcagcccacagcactgtctttttgctgatccacccccctcttaccttttatcaggatgtggcctgttggtccttctgttgccatcacagagacacaggcatttaaatatttaacttatttatttaacaaagtagaagggaatccattgctagcttttctgtgttggtgtctaatatttgggtagggtgggggatccccaacaatcaggtcccctgagatagctggtcattgggctgatcattgccagaatcttcttctcctggggtctggccccccaaaatgcctaacccaggaccttggaaattctactcatcccaaatgataattccaaatgctgttacccaaggttagggtgttgaaggaaggtagagggtggggcttcaggtctcaacggcttccctaaccacccctcttctcttggcccagcctggttccccccacttccactcccctctactctctctaggactgggctgatgaaggcactgcccaaaatttcccctacccccaactttcccctacccccaactttccccaccagctccacaaccctgtttggagctactgcaggaccagaagcacaaagtgcggtttcccaagcctttgtccatctcagcccccagagtatatctgtgcttggggaatctcacacagaaactcaggagcaccccctgcctgagctaagggaggtcttatctctcagggggggtttaagtgccgtttgcaataatgtcgtcttatttatttagcggggtgaatattttatactgtaagtgagcaatcagagtataatgtttatggtgacaaaattaaaggctttcttatatgttta

SEQ ID NO: 19631 - DNA, 3341 bp, Homo sapiens
  source 1..3341: mol_type = unassigned DNA
aaggaagggggggcggaaccagcctgcacgcgctggctccgggtgacagccgcgcgcctcggccaggatctgagtgatgagacgtgtccccactgaggtgccccacagcagcaggtgttgagcatgggctgagaagctggaccggcaccaaagggctggcagaaatgggcgcctggctgattcctaggcagttggcggcagcaaggaggagaggccgcagcttctggagcagagccgagacgaagcagttctggagtgcctgaacggccccctgagccctacccgcctggcccactatggtccagaggctgtgggtgagccgcctgctgcggcaccggaaagcccagctcttgctggtcaacctgctaacctttggcctggaggtgtgtttggccgcaggcatcacctatgtgccgcctctgctgctggaagtgggggtagaggagaagttcatgaccatggtgctgggcattggtccagtgctgggcctggtctgtgtcccgctcctaggctcagccagtgaccactggcgtggacgctatggccgccgccggcccttcatctgggcactgtccttgggcatcctgctgagcctctttctcatcccaagggccggctggctagcagggctgctgtgcccggatcccaggcccctggagctggcactgctcatcctgggcgtggggctgctggacttctgtggccaggtgtgcttcactccactggaggccctgctctctgacctcttccgggacccggaccactgtcgccaggcctactctgtctatgccttcatgatcagtcttgggggctgcctgggctacctcctgcctgccattgactgggacaccagtgccctggccccctacctgggcacccaggaggagtgcctctttggcctgctcaccctcatcttcctcacctgcgtagcagccacactgctggtggctgaggaggcagcgctgggccccaccgagccagcagaagggctgtcggccccctccttgtcgccccactgctgtccatgccgggcccgcttggctttccggaacctgggcgccctgcttccccggctgcaccagctgtgctgccgcatgccccgcaccctgcgccggctcttcgtggctgagctgtgcagctggatggcactcatgaccttcacgctgttttacacggatttcgtgggcgaggggctgtaccagggcgtgcccagagctgagccgggcaccgaggcccggagacactatgatgaaggcgttcggatgggcagcctggggctgttcctgcagtgcgccatctccctggtcttctctctggtcatggaccggctggtgcagcgattcggcactcgagcagtctatttggccagtgtggcagctttccctgtggctgccggtgccacatgcctgtcccacagtgtggccgtggtgacagcttcagccgccctcaccgggttcaccttctcagccctgcagatcctgccctacacactggcctccctctaccaccgggagaagcaggtgttcctgcccaaataccgaggggacactggaggtgctagcagtgaggacagcctgatgaccagcttcctgccaggccctaagcctggagctcccttccctaatggacacgtgggtgctggaggcagtggcctgctcccacctccacccgcgctctgcggggcctctgcctgtgatgtctccgtacgtgtggtggtgggtgagcccaccgaggccagggtggttccgggccggggcatctgcctggacctcgccatcctggatagtgccttcctgctgtcccaggtggccccatccctgtttatgggctccattgtccagctcagccagtctgtcactgcctatatggtgtctgccgcaggcctgggtctggtcgccatttactttgctacacaggtagtatttgacaagagcgacttggccaaatactcagcgtagaaaacttccagcacattggggtggagggcctgcctcactgggtcccagctccccgctcctgttagccccatggggctgccgggctggccgccagtttctgttgctgccaaagtaatgtggctctctgctgccaccctgtgctgctgaggtgcgtagctgcacagctgggggctggggcgtccctctcctctctccccagtctctagggctgcctgactggaggccttccaagggggtttcagtctggacttatacagggaggccagaagggctccatgcactggaatgcggggactctgcaggtggattacccaggctcagggttaacagctagcctcctagttgagacacacctagagaagggtttttgggagctgaataaactcagtcacctggtttcccatctctaagccccttaacctgcagcttcgtttaatgtagctcttgcatgggagtttctaggatgaaacactcctccatgggatttgaacatatgaaagttatttgtaggggaagagtcctgaggggcaacacacaagaaccaggtcccctcagcccacagcactgtctttttgctgatccacccccctcttaccttttatcaggatgtggcctgttggtccttctgttgccatcacagagacacaggcatttaaatatttaacttatttatttaacaaagtagaagggaatccattgctagcttttctgtgttggtgtctaatatttgggtagggtgggggatccccaacaatcaggtcccctgagatagctggtcattgggctgatcattgccagaatcttcttctcctggggtctggccccccaaaatgcctaacccaggaccttggaaattctactcatcccaaatgataattccaaatgctgttacccaaggttagggtgttgaaggaaggtagagggtggggcttcaggtctcaacggcttccctaaccacccctcttctcttggcccagcctggttccccccacttccactcccctctactctctctaggactgggctgatgaaggcactgcccaaaatttcccctacccccaactttcccctacccccaactttccccaccagctccacaaccctgtttggagctactgcaggaccagaagcacaaagtgcggtttcccaagcctttgtccatctcagcccccagagtatatctgtgcttggggaatctcacacagaaactcaggagcaccccctgcctgagctaagggaggtcttatctctcagggggggtttaagtgccgtttgcaataatgtcgtcttatttatttagcggggtgaatattttatactgtaagtgagcaatcagagtataatgtttatggtgacaaaattaaaggctttcttatatgttta

SEQ ID NO: 19632 - DNA, 5852 bp, Homo sapiens
  source 1..5852: mol_type = unassigned DNA
gcgctcgcggcacagcctccgccgcggccgccttccgtgagcccccgcaccccggcttgctcccgaggggcgcctgggctgggctccactgctgcagtgttagttactagcaggaacatcagagatccccataaatatgcaggagctgcaggaggcaaagtagagtagacgcccgcgctcttacacactcgctcgccgcgcaccacacaggctgtgtagacatccccccgcgccacctttcccctttcctcgcgggccgttcaggttgcagtcctgcctgctccgaagaccctcccgccccagcgcctttgccccgctctcccgcgctcgcctctctccggagcgcgcacccacccaggcggcaaagttgtgactacttgggcgcgggtgactggcgccccgctcgctccgcgcccggcgcagacaacttcccgcggctcggccccgccgcgtcccgggctcgcgcctccagggattccgcggccccccagcctccaaccccggcggcgcgccgggcagcgcttcggtggcggcggcggccgcggtggcagcgaaggcggcggcggcggcggcagtggcagtggccgctgcagccccacactccgccgccaaactggaggagcgacggaagccagaccccaggaggatggaggatgaagctgtcctggacagaggggcttccttcctcaagcatgtgtgtgatgaagaagaagtagaaggccaccataccatttacatcggagtccatgtgccgaagagttacaggagaaggagacgtcacaagagaaagacagggcacaaagaaaagaaggaaaaggagagaatctctgagaactactctgacaaatcagatattgaaaatgctgatgaatccagcagcagcatcctaaaacctctcatctctcctgctgcagaacgcatccgattcatcttgggagaggaggatgacagcccagctccccctcagctcttcacggaactggatgagctgctggccgtggatgggcaggagatggagtggaaggaaacagccaggtggatcaagtttgaagaaaaagtggaacagggtggggaaagatggagcaagccccatgtggccacattgtcccttcatagtttatttgagctgaggacatgtatggagaaaggatccatcatgcttgatcgggaggcttcttctctcccacagttggtggagatgattgttgaccatcagattgagacaggcctattgaaacctgaacttaaggataaggtgacctatactttgctccggaagcaccggcatcaaaccaagaaatccaaccttcggtccctggctgacattgggaagacagtctccagtgcaagtaggatgtttaccaaccctgataatggtagcccagccatgacccataggaatctgacttcctccagtctgaatgacatttctgataaaccggagaaggaccagctgaagaataagttcatgaaaaaattgccacgtgatgcagaagcttccaacgtgcttgttggggaggttgactttttggatactcctttcattgcctttgttaggctacagcaggctgtcatgctgggtgccctgactgaagttcctgtgcccacaaggttcttgttcattctcttaggtcctaaggggaaagccaagtcctaccacgagattggcagagccattgccaccctgatgtctgatgaggtgttccatgacattgcttataaagcaaaagacaggcacgacctgattgctggtattgatgagttcctagatgaagtcatcgtccttccacctggggaatgggatccagcaattaggatagagcctcctaagagtcttccatcctctgacaaaagaaagaatatgtactcaggtggagagaatgttcagatgaatggggatacgccccatgatggaggtcacggaggaggaggacatggggattgtgaagaattgcagcgaactggacggttctgtggtggactaattaaagacataaagaggaaagcgccattttttgccagtgatttttatgatgctttaaatattcaagctctttcggcaattctcttcatttatctggcaactgtaactaatgctatcacttttggaggactgcttggggatgccactgacaacatgcagggcgtgttggagagtttcctgggcactgctgtctctggagccatcttttgcctttttgctggtcaaccactcactattctgagcagcaccggacctgtcctagtttttgagaggcttctatttaatttcagcaaggacaataattttgactatttggagtttcgcctttggattggcctgtggtccgccttcctatgtctcattttggtagccactgatgccagcttcttggttcaatacttcacacgtttcacggaggagggcttttcctctctgattagcttcatctttatctatgatgctttcaagaagatgatcaagcttgcagattactaccccatcaactccaacttcaaagtgggctacaacactctcttttcctgtacctgtgtgccacctgacccagctaatatctcaatatctaatgacaccacactggccccagagtatttgccaactatgtcttctactgacatgtaccataatactacctttgactgggcatttttgtcgaagaaggagtgttcaaaatacggaggaaacctcgtcgggaacaactgtaattttgttcctgatatcacactcatgtcttttatcctcttcttgggaacctacacctcttccatggctctgaaaaaattcaaaactagtccttattttccaaccacagcaagaaaactgatcagtgattttgccattatcttgtccattctcatcttttgtgtaatagatgccctagtaggcgtggacaccccaaaactaattgtgccaagtgagttcaagccaacaagtccaaaccgaggttggttcgttccaccgtttggagaaaacccctggtgggtgtgccttgctgctgctatcccggctttgttggtcactatactgattttcatggaccaacaaattacagctgtgattgtaaacaggaaagaacataaactcaagaaaggagcagggtatcacttggatctcttttgggtggccatcctcatggttatatgctccctcatggctcttccgtggtatgtagctgctacggtcatctccattgctcacatcgacagtttgaagatggagacagagacttctgcacctggagaacaaccaaagtttctaggagtgagggaacaaagagtcactggaacccttgtgtttattctgactggtctgtcagtctttatggctcccatcttgaagtttatacccatgcctgtactctatggtgtgttcctgtatatgggagtagcatcccttaatggtgtgcagttcatggatcgtctgaagctgcttctgatgcctctgaagcatcagcctgacttcatctacctgcgtcatgttcctctgcgcagagtccacctgttcactttcctgcaggtgttgtgtctggccctgctttggatcctcaagtcaacggtggctgctatcatttttccagtaatgatcttggcacttgtagctgtcagaaaaggcatggactacctcttctcccagcacgacctcagcttcctggatgatgtcattccagaaaaggacaagaaaaagaaggaggatgagaagaaaaagaaaaagaagaagggaagtctggacagtgacaatgatgattctgactgcccatactcagaaaaagttccaagtattaaaattccaatggacatcatggaacagcaacctttcctaagcgatagcaaaccttctgacagagaaagatcaccaacattccttgaacgccacacatcatgctgataaaattcctttccttcagtcactcggtatgccaagtcctcctagaactccagtaaaagttgtgcctcaaattagaatagaacttgaacctgaagacaatgattatttctggaggagcaagggaacagaaactacattgtaacctgtttgtctttcttaaaactgacatttgttgttaatgtcatttgtttttgtttggctgtttgtttattttttaacttttatttcgtctcagtttttggtcacaggccaaataatacagcgctctctctgcttctctcttgcatagacacaatcaagacaatagtgcaccgttccttaaaaacagcatctgaggaatcccccttttgttcttaaactttcagatgtgtcctttgataaccaaattctgtcactcaagacacagacacgcacagaccctgtcctttgcctctattaagcagaggatggaagtattaaggattttgtaacaccttttatgaaaatgttgaaggaacttaaaactttagctttggagctgtgcttactggcttgtctttgtctggtagaacaaaccttgacctccagacagagtcccttctcacttatagagctctccaggactggaaaaagtgctgctattttaacttgctcttgcttgtaaatcctaatcttagagttatcaaaagaagaaaaaactgaaggtactttactccctatagagaaaccattgccatcattgtagcaagtgctggaatgtcccttttttcctatgcaactttttttaaccctttaatgaacttatctgttgagtacattgaagaatatttttcttcctagattttgttgtttaaattatggggcctaacctgccacttattttttgtcaatttttaaaacttttttttaattactgtaaagaaaatgaattttttcctgcagcaggaaacatagttttgagtagttctacctcttatttgtagctgccaggctttctgtaaaaattgtattgtatataatgtgatttttacacatacatacacacacaaatacacaatctctagggtaagccagaaggcaagatcagattaaaaacaccatgtttctaagcatccatttttccctttctttaaaagaaacttaactgttctatgaaggagattgagggagaagagacaaactcctatgtcatgagaataaccgatgttctgataatagtagcatctaggtacagatgctggttgtattaccacgtcaatgtcctatgcagtattgttagacattttctcattttgaaatatttgtgtgtttgtgtatgtgctctgtgccatggctggtgtatatatgtgcaatgttagaaggcaaaagagtgatggtaggcagagggcaaagtcattgaatctcttatgccagttttcataaaacccaaaccacatatgaaaaaatccattaagggtccaagaagtctgtccatatgaaaatgagggtaaatatagtttatttcccaggtatcagtcattataattgatataatagctctaacatgcaatataaaattcataggagtattaatagcccatttacacatctataaaatgtaatgggattgcagagctgcagagtacagtgtaacagtactctcatgcaatttttttcaggatgcaaaggcaattattctttgtaagcgggacatttagaatatatttgtgtacatattatatgtatgtatatttcaaagtaccacactgaaaattagacatttattaaccaaatttaacgtggtatttaaaggtaatatttttaatatgatacattacatattgtgaatgtatactaaaaaaacattttaaatgttaaaattataatttcagattcatataaccacaactgtgatatatcctaactataaccagttgttgaggggtatactagaagcagaatgaaaccacattttttggtttgataatatgcacttattgactcccac

SEQ ID NO: 19633 - DNA, 3771 bp, Homo sapiens
  source 1..3771: mol_type = unassigned DNA
ggcagtggcagtggccgctgcagccccacactccgccgccaaactggaggagcgacggaagccagaccccaggaggatggaggatgaagctgtcctggacagaggggcttccttcctcaagcatgtgtgtgatgaagaagaagtagaaggccaccataccatttacatcggagtccatgtgccgaagagttacaggagaaggagacgtcacaagagaaagacagggcacaaagaaaagaaggaaaaggagagaatctctgagaactactctgacaaatcagatattgaaaatgctgatgaatccagcagcagcatcctaaaacctctcatctctcctgctgcagaacgcatccgattcatcttgggagaggaggatgacagcccagctccccctcagctcttcacggaactggatgagctgctggccgtggatgggcaggagatggagtggaaggaaacagccaggtggatcaagtttgaagaaaaagtggaacagggtggggaaagatggagcaagccccatgtggccacattgtcccttcatagtttatttgagctgaggacatgtatggagaaaggatccatcatgcttgatcgggaggcttcttctctcccacagttggtggagatgattgttgaccatcagattgagacaggcctattgaaacctgaacttaaggataaggtgacctatactttgctccggaagcaccggcatcaaaccaagaaatccaaccttcggtccctggctgacattgggaagacagtctccagtgcaagtaggatgtttaccaaccctgataatggtagcccagccatgacccataggaatctgacttcctccagtctgaatgacatttctgataaaccggagaaggaccagctgaagaataagttcatgaaaaaattgccacgtgatgcagaagcttccaacgtgcttgttggggaggttgactttttggatactcctttcattgcctttgttaggctacagcaggctgtcatgctgggtgccctgactgaagttcctgtgcccacaaggttcttgttcattctcttaggtcctaaggggaaagccaagtcctaccacgagattggcagagccattgccaccctgatgtctgatgaggtgttccatgacattgcttataaagcaaaagacaggcacgacctgattgctggtattgatgagttcctagatgaagtcatcgtccttccacctggggaatgggatccagcaattaggatagagcctcctaagagtcttccatcctctgacaaaagaaagaatatgtactcaggtggagagaatgttcagatgaatggggatacgccccatgatggaggtcacggaggaggaggacatggggattgtgaagaattgcagcgaactggacggttctgtggtggactaattaaagacataaagaggaaagcgccattttttgccagtgatttttatgatgctttaaatattcaagctctttcggcaattctcttcatttatctggcaactgtaactaatgctatcacttttggaggactgcttggggatgccactgacaacatgcagggcgtgttggagagtttcctgggcactgctgtctctggagccatcttttgcctttttgctggtcaaccactcactattctgagcagcaccggacctgtcctagtttttgagaggcttctatttaatttcagcaaggacaataattttgactatttggagtttcgcctttggattggcctgtggtccgccttcctatgtctcattttggtagccactgatgccagcttcttggttcaatacttcacacgtttcacggaggagggcttttcctctctgattagcttcatctttatctatgatgctttcaagaagatgatcaagcttgcagattactaccccatcaactccaacttcaaagtgggctacaacactctcttttcctgtacctgtgtgccacctgacccagctaatatctcaatatctaatgacaccacactggccccagagtatttgccaactatgtcttctactgacatgtaccataatactacctttgactgggcatttttgtcgaagaaggagtgttcaaaatacggaggaaacctcgtcgggaacaactgtaattttgttcctgatatcacactcatgtcttttatcctcttcttgggaacctacacctcttccatggctctgaaaaaattcaaaactagtccttattttccaaccacagcaagaaaactgatcagtgattttgccattatcttgtccattctcatcttttgtgtaatagatgccctagtaggcgtggacaccccaaaactaattgtgccaagtgagttcaagccaacaagtccaaaccgaggttggttcgttccaccgtttggagaaaacccctggtgggtgtgccttgctgctgctatcccggctttgttggtcactatactgattttcatggaccaacaaattacagctgtgattgtaaacaggaaagaacataaactcaagtttatacccatgcctgtactctatggtgtgttcctgtatatgggagtagcatcccttaatggtgtgcagttcatggatcgtctgaagctgcttctgatgcctctgaagcatcagcctgacttcatctacctgcgtcatgttcctctgcgcagagtccacctgttcactttcctgcaggtgttgtgtctggccctgctttggatcctcaagtcaacggtggctgctatcatttttccagtaatgatcttggcacttgtagctgtcagaaaaggcatggactacctcttctcccagcacgacctcagcttcctggatgatgtcattccagaaaaggacaagaaaaagaaggaggatgagaagaaaaagaaaaagaagaagggaagtctggacagtgacaatgatgattctgactgcccatactcagaaaaagttccaagtattaaaattccaatggacatcatggaacagcaacctttcctaagcgatagcaaaccttctgacagagaaagatcaccaacattccttgaacgccacacatcatgctgataaaattcctttccttcagtcactcggtatgccaagtcctcctagaactccagtaaaagttgtgcctcaaattagaatagaacttgaacctgaagacaatgattatttctggaggagcaagggaacagaaactacattgtaacctgtttgtctttcttaaaactgacatttgttgttaatgtcatttgtttttgtttggctgtttgtttattttttaacttttatttcgtctcagtttttggtcacaggccaaataatacagcgctctctctgcttctctcttgcatagacacaatcaagacaatagtgcaccgttccttaaaaacagcatctgaggaatcccccttttgttcttaaactttcagatgtgtcctttgataaccaaattctgtcactcaagacacagacacgcacagaccctgtcctttgcctctattaagcagaggatggaagtattaaggattttgtaacaccttttatgaaaatgttgaaggaacttaaaactttagctttggagctgtgcttactggcttgtctttgtctggtagaacaaaccttgacctccagacagagtcccttctcacttatagagctctccaggactggaaaaagtgctgctattttaacttgctcttgcttgtaaatcctaatcttagagttatcaaaagaagaaaaaactgaaggtactttactccctatagagaaac

SEQ ID NO: 19634 - DNA, 956 bp, Homo sapiens
  source 1..956: mol_type = unassigned DNA
tattaagaggctggctggaagctaggctcccactgtgcactagcctacctccctgtcgctctctgcgtgtgggtgggtgtgcatgtgtgtgtgtgtgagggtatacattttatgcagtgggtgtttaaagagctaagcactgaagctggatttccacaaacgatcatcacgagcactccagacacaccaaacttcctctcttggtattttttttttttttttgctttcatcctttttaaaaagaattttaaaaccctaaaggggagagcccccaacatcctgcctacaggattgggattattttctcttacctgtctatgtgggtgccctctcaaggttagaactgaagctatgtgggaccggcatattctcgagcaccagatgagaggagctgcgtgaagcagtagcagacaccagaagaagagtgactctgccctgctaacatgaacaacagcttgcaggttaacctgcccagaagctgggctgctccaagtggctcgctccaggagaagtctgagcattctttttttcttttttattactataggatggaggatgaagctgtcctggacagaggggcttccttcctcaagcatgtgtgtgatgaagaagaagtagaaggccaccataccatttacatcggagtccatgtgccgaagagttacaggagaaggagacgtcacaagagaaagacagggcacaaagaaaagaaggaaaaggagagaatctctgagaactactctgacaaatcagatattgaaaatgctgatgaatccagcagcagcatcctaaaacctctcatctctcctgctgcagaacgcatccgattcatcttgggagaggaggatgacagcccagctccccctcagctcttcacggaactggatgagctgctggccgtggatgggcaggagatggagtggaaggaaacagccaggtggatcaagtttgaagaa

SEQ ID NO: 19635 - DNA, 468 bp, Homo sapiens
  source 1..468: mol_type = unassigned DNA
tgtgcactagcctacctccctgtcgctctctgcgtgtgggtgggtgtgcatgtgtgtgtgtgtgagggtatacattttatgcagtgggtgtttaaagagctaagcactgaagctggatttccacaaacgatcatcacgagcactccagacacaccaaacttcctctcttggatggaggatgaagctgtcctggacagaggggcttccttcctcaagcatgtgtgtgatgaagaagaagtagaaggccaccataccatttacatcggagtccatgtgccgaagagttacaggagaaggagacgtcacaagagaaagacagggcacaaagaaaagaaggaaaaggagagaatctctgagaactactctgacaaatcagatattgaaaatgctgatgaatccagcagcagcatcctaaaacctctcatctctcctgctgcagaacgcatccgattcatcttgggagaggag

SEQ ID NO: 19636 - DNA, 2169 bp, Homo sapiens
  source 1..2169: mol_type = unassigned DNA
aggccaccataccatttacatcggagtccatgtgccgaagagttacaggagaaggagacgtcacaagagaaagacagggcacaaagaaaagaaggaaaaggagagaatctctgagaactactctgacaaatcagatattgaaaatgctgatgaatccagcagcagcatcctaaaacctctcatctctcctgctgcagaacgcatccgattcatcttgggagaggaggatgacagcccagctccccctcagctcttcacggaactggatgagctgctggccgtggatgggcaggagatggagtggaaggaaacagccaggtggatcaagtttgaagaaaaagtggaacagggtggggaaagatggagcaagccccatgtggccacattgtcccttcatagtttatttgagctgaggacatgtatggagaaaggatccatcatgcttgatcgggaggcttcttctctcccacagttggtggagatgattgttgaccatcagattgagacaggcctattgaaacctgaacttaaggataaggtgacctatactttgctccggaagcaccggcatcaaaccaagaaatccaaccttcggtccctggctgacattgggaagacagtctccagtgcaagtaggatgtttaccaaccctgataatggtagcccagccatgacccataggaatctgacttcctccagtctgaatgacatttctgataaaccggagaaggaccagctgaagaataagttcatgaaaaaattgccacgtgatgcagaagcttccaacgtgcttgttggggaggttgactttttggatactcctttcattgcctttgttaggctacagcaggctgtcatgctgggtgccctgactgaagttcctgtgcccacaaggttcttgttcattctcttaggtcctaaggggaaagccaagtcctaccacgagattggcagagccattgccaccctgatgtctgatgaggtgttccatgacattgcttataaagcaaaagacaggcacgacctgattgctggtattgatgagttcctagatgaagtcatcgtccttccacctggggaatgggatccagcaattaggatagagcctcctaagagtcttccatcctctgacaaaagaaagaatatgtactcaggtggagagaatgttcagatgaatggggatacgccccatgatggaggtcacggaggaggaggacatggggattgtgaagaattgcagcgaactggacggttctgtggtggactaattaaagacataaagaggaaagcgccattttttgccagtgatttttatgatgctttaaatattcaagctctttcggcaattctcttcatttatctggcaactgtaactaatgctatcacttttggaggactgcttggggatgccactgacaacatgcagggcgtgttggagagtttcctgggcactgctgtctctggagccatcttttgcctttttgctggtcaaccactcactattctgagcagcaccggacctgtcctagtttttgagaggcttctatttaatttcagcaaggacaataattttgactatttggagtttcgcctttggattggcctgtggtccgccttcctatgtctcattttggtagccactgatgccagcttcttggttcaatacttcacacgtttcacggaggagggcttttcctctctgattagcttcatctttatctatgatgctttcaagaagatgatcaagcttgcagattactaccccatcaactccaacttcaaagtgggctacaacactctcttttcctgtacctgtgtgccacctgacccaggtgagggcattacgctttgtgtttatgctcgctttgtatttggaggaaggtgtaggctccatgcttgcaaattttcaacatgctgtcatggtcctcaggaattagtcttgtttttttctctgaaaaactctgctactgaatttgatgtctcattgcctgaggtattttagctgtatgattcaaccaggaaggagaccaggagctctggaatgtgaacataaccaactcaatattttgaaattaactcaaactgtgggatttgcaaggaattcatgtgtacattattcttgattttataagtggggaaacctggatacatgtattaacagatataaat

SEQ ID NO: 19637 - DNA, 2316 bp, Homo sapiens
  source 1..2316: mol_type = unassigned DNA
aggaggggaagtgagtggttagacctcagctcatctgagggctaaaggttctttgtgacacatcacacagaattggagtgctgtccttctggagagtggtggagaaccaagatacagttcagaaccaaaggaatagagaagggctttgatttctttttggctttagattggggatttgggaggcttagcaggaaagatgtccactgaaaatgtggaagggaagcccagtaaccttggggagagaggaagagcccggagctccactttcctcagggttgtccagccaatgtttaaccacagtattttcacttctgcagtctctcctgctgcagaacgcatccgattcatcttgggagaggaggatgacagcccagctccccctcagctcttcacggaactggatgagctgctggccgtggatgggcaggagatggagtggaaggaaacagccaggtggatcaagtttgaagaaaaagtggaacagggtggggaaagatggagcaagccccatgtggccacattgtcccttcatagtttatttgagctgaggacatgtatggagaaaggatccatcatgcttgatcgggaggcttcttctctcccacagttggtggagatgattgttgaccatcagattgagacaggcctattgaaacctgaacttaaggataaggtgacctatactttgctccggaagcaccggcatcaaaccaagaaatccaaccttcggtccctggctgacattgggaagacagtctccagtgcaagtaggatgtttaccaaccctgataatggtagcccagccatgacccataggaatctgacttcctccagtctgaatgacatttctgataaaccggagaaggaccagctgaagaataagttcatgaaaaaattgccacgtgatgcagaagcttccaacgtgcttgttggggaggttgactttttggatactcctttcattgcctttgttaggctacagcaggctgtcatgctgggtgccctgactgaagttcctgtgcccacaaggttcttgttcattctcttaggtcctaaggggaaagccaagtcctaccacgagattggcagagccattgccaccctgatgtctgatgaggtgttccatgacattgcttataaagcaaaagacaggcacgacctgattgctggtattgatgagttcctagatgaagtcatcgtccttccacctggggaatgggatccagcaattaggatagagcctcctaagagtcttccatcctctgacaaaagaaagaatatgtactcaggtggagagaatgttcagatgaatggggatacgccccatgatggaggtcacggaggaggaggacatggggattgtgaagaattgcagcgaactggacggttctgtggtggactaattaaagacataaagaggaaagcgccattttttgccagtgatttttatgatgctttaaatattcaagctctttcggcaattctcttcatttatctggcaactgtaactaatgctatcacttttggaggactgcttggggatgccactgacaacatgcagggcgtgttggagagtttcctgggcactgctgtctctggagccatcttttgcctttttgctggtcaaccactcactattctgagcagcaccggacctgtcctagtttttgagaggcttctatttaatttcagcaaggacaataattttgactatttggagtttcgcctttggattggcctgtggtccgccttcctatgtctcattttggtagccactgatgccagcttcttggttcaatacttcacacgtttcacggaggagggcttttcctctctgattagcttcatctttatctatgatgctttcaagaagatgatcaagcttgcagattactaccccatcaactccaacttcaaagtgggctacaacactctcttttcctgtacctgtgtgccacctgacccaggtgagggcattacgctttgtgtttatgctcgctttgtatttggaggaaggtgtaggctccatgcttgcaaattttcaacatgctgtcatggtcctcaggaattagtcttgtttttttctctgaaaaactctgctactgaatttgatgtctcattgcctgaggtattttagctgtatgattcaaccaggaaggagaccaggagctctggaatgtgaacataaccaactcaatattttgaaattaactcaaactgtgggatttgcaaggaattcatgtgtacattattcttgattttataagtggggaaacctggatacatgtattaacagatataaatatgtgacaaacc

SEQ ID NO: 19638 - DNA, 7640 bp, Homo sapiens
  source 1..7640: mol_type = unassigned DNA
aggaggggaagtgagtggttagacctcagctcatctgagggctaaaggttctttgtgacacatcacacagaattggagtgctgtccttctggagagtggtggagaaccaagatacagttcagaaccaaaggaatagagaagggctttgatttctttttggctttagattggggatttgggaggcttagcaggaaagatgtccactgaaaatgtggaagggaagcccagtaaccttggggagagaggaagagcccggagctccactttcctcagggttgtccagccaatgtttaaccacagtattttcacttctgcagtctctcctgctgcagaacgcatccgattcatcttgggagaggaggatgacagcccagctccccctcagctcttcacggaactggatgagctgctggccgtggatgggcaggagatggagtggaaggaaacagccaggtggatcaagtttgaagaaaaagtggaacagggtggggaaagatggagcaagccccatgtggccacattgtcccttcatagtttatttgagctgaggacatgtatggagaaaggatccatcatgcttgatcgggaggcttcttctctcccacagttggtggagatgattgttgaccatcagattgagacaggcctattgaaacctgaacttaaggataaggtgacctatactttgctccggaagcaccggcatcaaaccaagaaatccaaccttcggtccctggctgacattgggaagacagtctccagtgcaagtaggatgtttaccaaccctgataatggtagcccagccatgacccataggaatctgacttcctccagtctgaatgacatttctgataaaccggagaaggaccagctgaagaataagttcatgaaaaaattgccacgtgatgcagaagcttccaacgtgcttgttggggaggttgactttttggatactcctttcattgcctttgttaggctacagcaggctgtcatgctgggtgccctgactgaagttcctgtgcccacaaggttcttgttcattctcttaggtcctaaggggaaagccaagtcctaccacgagattggcagagccattgccaccctgatgtctgatgaggtgttccatgacattgcttataaagcaaaagacaggcacgacctgattgctggtattgatgagttcctagatgaagtcatcgtccttccacctggggaatgggatccagcaattaggatagagcctcctaagagtcttccatcctctgacaaaagaaagaatatgtactcaggtggagagaatgttcagatgaatggggatacgccccatgatggaggtcacggaggaggaggacatggggattgtgaagaattgcagcgaactggacggttctgtggtggactaattaaagacataaagaggaaagcgccattttttgccagtgatttttatgatgctttaaatattcaagctctttcggcaattctcttcatttatctggcaactgtaactaatgctatcacttttggaggactgcttggggatgccactgacaacatgcagggcgtgttggagagtttcctgggcactgctgtctctggagccatcttttgcctttttgctggtcaaccactcactattctgagcagcaccggacctgtcctagtttttgagaggcttctatttaatttcagcaaggacaataattttgactatttggagtttcgcctttggattggcctgtggtccgccttcctatgtctcattttggtagccactgatgccagcttcttggttcaatacttcacacgtttcacggaggagggcttttcctctctgattagcttcatctttatctatgatgctttcaagaagatgatcaagcttgcagattactaccccatcaactccaacttcaaagtgggctacaacactctcttttcctgtacctgtgtgccacctgacccagctaatatctcaatatctaatgacaccacactggccccagagtatttgccaactatgtcttctactgacatgtaccataatactacctttgactgggcatttttgtcgaagaaggagtgttcaaaatacggaggaaacctcgtcgggaacaactgtaattttgttcctgatatcacactcatgtcttttatcctcttcttgggaacctacacctcttccatggctctgaaaaaattcaaaactagtccttattttccaaccacagcaagaaaactgatcagtgattttgccattatcttgtccattctcatcttttgtgtaatagatgccctagtaggcgtggacaccccaaaactaattgtgccaagtgagttcaagccaacaagtccaaaccgaggttggttcgttccaccgtttggagaaaacccctggtgggtgtgccttgctgctgctatcccggctttgttggtcactatactgattttcatggaccaacaaattacagctgtgattgtaaacaggaaagaacataaactcaagaaaggagcagggtatcacttggatctcttttgggtggccatcctcatggttatatgctccctcatggctcttccgtggtatgtagctgctacggtcatctccattgctcacatcgacagtttgaagatggagacagagacttctgcacctggagaacaaccaaagtttctaggagtgagggaacaaagagtcactggaacccttgtgtttattctgactggtctgtcagtctttatggctcccatcttgaagtttatacccatgcctgtactctatggtgtgttcctgtatatgggagtagcatcccttaatggtgtgcagttcatggatcgtctgaagctgcttctgatgcctctgaagcatcagcctgacttcatctacctgcgtcatgttcctctgcgcagagtccacctgttcactttcctgcaggtgttgtgtctggccctgctttggatcctcaagtcaacggtggctgctatcatttttccagtaatgatcttggcacttgtagctgtcagaaaaggcatggactacctcttctcccagcacgacctcagcttcctggatgatgtcattccagaaaaggacaagaaaaagaaggaggatgagaagaaaaagaaaaagaagaagggaagtctggacagtgacaatgatgattctgactgcccatactcagaaaaagttccaagtattaaaattccaatggacatcatggaacagcaacctttcctaagcgatagcaaaccttctgacagagaaagatcaccaacattccttgaacgccacacatcatgctgataaaattcctttccttcagtcactcggtatgccaagtcctcctagaactccagtaaaagttgtgcctcaaattagaatagaacttgaacctgaagacaatgattatttctggaggagcaagggaacagaaactacattgtaacctgtttgtctttcttaaaactgacatttgttgttaatgtcatttgtttttgtttggctgtttgtttattttttaacttttatttcgtctcagtttttggtcacaggccaaataatacagcgctctctctgcttctctcttgcatagacacaatcaagacaatagtgcaccgttccttaaaaacagcatctgaggaatcccccttttgttcttaaactttcagatgtgtcctttgataaccaaattctgtcactcaagacacagacacgcacagaccctgtcctttgcctctattaagcagaggatggaagtattaaggattttgtaacaccttttatgaaaatgttgaaggaacttaaaactttagctttggagctgtgcttactggcttgtctttgtctggtagaacaaaccttgacctccagacagagtcccttctcacttatagagctctccaggactggaaaaagtgctgctattttaacttgctcttgcttgtaaatcctaatcttagagttatcaaaagaagaaaaaactgaaggtactttactccctatagagaaaccattgccatcattgtagcaagtgctggaatgtcccttttttcctatgcaactttttttaaccctttaatgaacttatctgttgagtacattgaagaatatttttcttcctagattttgttgtttaaattatggggcctaacctgccacttattttttgtcaatttttaaaacttttttttaattactgtaaagaaaatgaattttttcctgcagcaggaaacatagttttgagtagttctacctcttatttgtagctgccaggctttctgtaaaaattgtattgtatataatgtgatttttacacatacatacacacacaaatacacaatctctagggtaagccagaaggcaagatcagattaaaaacaccatgtttctaagcatccatttttccctttctttaaaagaaacttaactgttctatgaaggagattgagggagaagagacaaactcctatgtcatgagaataaccgatgttctgataatagtagcatctaggtacagatgctggttgtattaccacgtcaatgtcctatgcagtattgttagacattttctcattttgaaatatttgtgtgtttgtgtatgtgctctgtgccatggctggtgtatatatgtgcaatgttagaaggcaaaagagtgatggtaggcagagggcaaagtcattgaatctcttatgccagttttcataaaacccaaaccacatatgaaaaaatccattaagggtccaagaagtctgtccatatgaaaatgagggtaaatatagtttatttcccaggtatcagtcattataattgatataatagctctaacatgcaatataaaattcataggagtattaatagcccatttacacatctataaaatgtaatgggattgcagagctgcagagtacagtgtaacagtactctcatgcaatttttttcaggatgcaaaggcaattattctttgtaagcgggacatttagaatatatttgtgtacatattatatgtatgtatatttcaaagtaccacactgaaaattagacatttattaaccaaatttaacgtggtatttaaaggtaatatttttaatatgatacattacatattgtgaatgtatactaaaaaaacattttaaatgttaaaattataatttcagattcatataaccacaactgtgatatatcctaactataaccagttgttgaggggtatactagaagcagaatgaaaccacattttttggtttgataatatgcacttattgactcccactcattgttatgttaattaagttattattctgtctccttgtaattttgattacaaaaattttattatcctgagttagctgttacttttacagtacctgatactcctaaaacttttaacttatacaaattagtcaataatgaccccaattttttcattaaaataatagtggtgaattatatgttattgtgttaaaacctcacttgccaaattctggcttcacatttgtatttagggctatccttaaaatgatgagtctatattatctagctttctattaccctaatataaactggtataagaagactttccttttttctttatgcatggaagcatcaataaattgtttaaaaaccatgtatagtaaattcagcttaacccgtgatcttcttaagttaaaggtacttttgttttataaaagctctagataaaactttcttttctgatcatgaatcaagtatctgtggtttcatgcccctctctatacctttcaaagaactcctgaagcaacttaactcatcatttcagcctctgagtagaggtaaaacctatgtgtacttctgtttatgatccatattgatatttatgacatgaacacagaatagtaccttacatttgctaaacagacagttaatatcaaatcctttcaatattctgggaacccagggaagtttttaaaaatgtcattactttcaaaggaacagaagtagttaaccaaactaacaagcaaaacctgaggtttacctagtgacaccaaattatcggtattttaactgaatttacccattgactaagaatgaaccagatttggtggtggttttgtttctatgcaaactggacacaaattacaacagtaaatttttttataagtgcttctcccttctccatgatgtgacttccggagataaaggattcaaaagataaagacaaagtacgctcagagttgttaaccagaaagtcctggctgtggttgcagaaacactgttggaagaaaagagatgactaagtcaagtgtctgccttatcaaaagagcaaaaatgcctctggttttgtgtttgggagaaaagtatcttggacgcactgttttccttgataaaagtcatcttctctactgtgtgaaatgaatacttggaattctaattgttttgtgtgccaggggcagtaatgtccctgcctcttctcccaatcaaggttgaggagtggggctggggagaggacttaactgacttaagaagtaggaaaacaaaaacctctctcctcagccttccacctccaagagaggaggaaaaacagttgtctgctgtctgtaattcagtttgcgtgtattttatgctcatgcaccaacccatacagagtaaatcttttatcaactgtatactggtgtttaatagagaatgattgtcttccgagttttttggttccttttttaactgtgttaaagtacttgaaatgtattgactgctgactatattttaaaaacaaaatgaaataatttgagttgtattacagaggttgacattgttcagggatgggacaaagccttcttcaatccttttcatactacttaatgattttggtgcaggaacctgagattttctgatttatatttcatgatatttcacatttgctcttcacagcatgagcatgaagcccagtggcaccaaatggctgggtacaatcaagtgatattttgtagcacctcactatctgaaaggccatgagttttcagatgatttcattgagcttcattgcagcctgaaattttaaaaaagttgtgtaatacgccaaccagtcaagttgtgttttggccagagatttagatatgtccaatttcctggctcatttcattgtgctctatgggtacgtataaaaagcaagaattctgtttcctaggcaaacattgcaactcagggctaaagtcatccagtgaaacttttagagccagaagtaactttgtcccagtcctacaatgtgaaaagagtgaatagttgcctctttttagccattttcatggctggtacatattcgtacgcattacttttcagaatcaatacgcactttcagatattcttatttttattctcttaagtctttattaactttggagagagaaatgatgcatctttttattttaaatgaagtagatcaacatggtggaacaaaatgataaagaacagaaaacatttcaatatattactaataactttttccaatataaatcctaaaattcctataacatagtattttacagttttatgaagctttctattgtgacttttatggaattaagagatgaagaagatgagatattttagcatttatatttttcaaaattatatgtatacttaaaaataaagtaactttatgcattta

SEQ ID NO: 19639 - DNA, 7596 bp, Homo sapiens
  source 1..7596: mol_type = unassigned DNA
gcggcggcggccgcggtggcagcgaaggcggcggcggcggcggcagtggcagtggccgctgcagccccacactccgccgccaaactggaggagcgacggaagccagaccccaggaggatggaggatgaagctgtcctggacagaggggcttccttcctcaagcatgtgtgtgatgaagaagaagtagaaggccaccataccatttacatcggagtccatgtgccgaagagttacaggagaaggagacgtcacaagagaaagacagggcacaaagaaaagaaggaaaaggagagaatctctgagaactactctgacaaatcagatattgaaaatgctgatgaatccagcagcagcatcctaaaacctctcatctctcctgctgcagaacgcatccgattcatcttgggagaggaggatgacagcccagctccccctcagctcttcacggaactggatgagctgctggccgtggatgggcaggagatggagtggaaggaaacagccaggtggatcaagtttgaagaaaaagtggaacagggtggggaaagatggagcaagccccatgtggccacattgtcccttcatagtttatttgagctgaggacatgtatggagaaaggatccatcatgcttgatcgggaggcttcttctctcccacagttggtggagatgattgttgaccatcagattgagacaggcctattgaaacctgaacttaaggataaggtgacctatactttgctccggaagcaccggcatcaaaccaagaaatccaaccttcggtccctggctgacattgggaagacagtctccagtgcaagtaggatgtttaccaaccctgataatggtagcccagccatgacccataggaatctgacttcctccagtctgaatgacatttctgataaaccggagaaggaccagctgaagaataagttcatgaaaaaattgccacgtgatgcagaagcttccaacgtgcttgttggggaggttgactttttggatactcctttcattgcctttgttaggctacagcaggctgtcatgctgggtgccctgactgaagttcctgtgcccacaaggttcttgttcattctcttaggtcctaaggggaaagccaagtcctaccacgagattggcagagccattgccaccctgatgtctgatgaggtgttccatgacattgcttataaagcaaaagacaggcacgacctgattgctggtattgatgagttcctagatgaagtcatcgtccttccacctggggaatgggatccagcaattaggatagagcctcctaagagtcttccatcctctgacaaaagaaagaatatgtactcaggtggagagaatgttcagatgaatggggatacgccccatgatggaggtcacggaggaggaggacatggggattgtgaagaattgcagcgaactggacggttctgtggtggactaattaaagacataaagaggaaagcgccattttttgccagtgatttttatgatgctttaaatattcaagctctttcggcaattctcttcatttatctggcaactgtaactaatgctatcacttttggaggactgcttggggatgccactgacaacatgcagggcgtgttggagagtttcctgggcactgctgtctctggagccatcttttgcctttttgctggtcaaccactcactattctgagcagcaccggacctgtcctagtttttgagaggcttctatttaatttcagcaaggacaataattttgactatttggagtttcgcctttggattggcctgtggtccgccttcctatgtctcattttggtagccactgatgccagcttcttggttcaatacttcacacgtttcacggaggagggcttttcctctctgattagcttcatctttatctatgatgctttcaagaagatgatcaagcttgcagattactaccccatcaactccaacttcaaagtgggctacaacactctcttttcctgtacctgtgtgccacctgacccagctaatatctcaatatctaatgacaccacactggccccagagtatttgccaactatgtcttctactgacatgtaccataatactacctttgactgggcatttttgtcgaagaaggagtgttcaaaatacggaggaaacctcgtcgggaacaactgtaattttgttcctgatatcacactcatgtcttttatcctcttcttgggaacctacacctcttccatggctctgaaaaaattcaaaactagtccttattttccaaccacagcaagaaaactgatcagtgattttgccattatcttgtccattctcatcttttgtgtaatagatgccctagtaggcgtggacaccccaaaactaattgtgccaagtgagttcaagccaacaagtccaaaccgaggttggttcgttccaccgtttggagaaaacccctggtgggtgtgccttgctgctgctatcccggctttgttggtcactatactgattttcatggaccaacaaattacagctgtgattgtaaacaggaaagaacataaactcaagaaaggagcagggtatcacttggatctcttttgggtggccatcctcatggttatatgctccctcatggctcttccgtggtatgtagctgctacggtcatctccattgctcacatcgacagtttgaagatggagacagagacttctgcacctggagaacaaccaaagtttctaggagtgagggaacaaagagtcactggaacccttgtgtttattctgactggtctgtcagtctttatggctcccatcttgaagtttatacccatgcctgtactctatggtgtgttcctgtatatgggagtagcatcccttaatggtgtgcagttcatggatcgtctgaagctgcttctgatgcctctgaagcatcagcctgacttcatctacctgcgtcatgttcctctgcgcagagtccacctgttcactttcctgcaggtgttgtgtctggccctgctttggatcctcaagtcaacggtggctgctatcatttttccagtaatgatcttggcacttgtagctgtcagaaaaggcatggactacctcttctcccagcacgacctcagcttcctggatgatgtcattccagaaaaggacaagaaaaagaaggaggatgagaagaaaaagaaaaagaagaagggaagtctggacagtgacaatgatgatgagaaagatcaccaacattccttgaacgccacacatcatgctgataaaattcctttccttcagtcactcggtatgccaagtcctcctagaactccagtaaaagttgtgcctcaaattagaatagaacttgaacctgaagacaatgattatttctggaggagcaagggaacagaaactacattgtaacctgtttgtctttcttaaaactgacatttgttgttaatgtcatttgtttttgtttggctgtttgtttattttttaacttttatttcgtctcagtttttggtcacaggccaaataatacagcgctctctctgcttctctcttgcatagacacaatcaagacaatagtgcaccgttccttaaaaacagcatctgaggaatcccccttttgttcttaaactttcagatgtgtcctttgataaccaaattctgtcactcaagacacagacacgcacagaccctgtcctttgcctctattaagcagaggatggaagtattaaggattttgtaacaccttttatgaaaatgttgaaggaacttaaaactttagctttggagctgtgcttactggcttgtctttgtctggtagaacaaaccttgacctccagacagagtcccttctcacttatagagctctccaggactggaaaaagtgctgctattttaacttgctcttgcttgtaaatcctaatcttagagttatcaaaagaagaaaaaactgaaggtactttactccctatagagaaaccattgccatcattgtagcaagtgctggaatgtcccttttttcctatgcaactttttttaaccctttaatgaacttatctgttgagtacattgaagaatatttttcttcctagattttgttgtttaaattatggggcctaacctgccacttattttttgtcaatttttaaaacttttttttaattactgtaaagaaaatgaattttttcctgcagcaggaaacatagttttgagtagttctacctcttatttgtagctgccaggctttctgtaaaaattgtattgtatataatgtgatttttacacatacatacacacacaaatacacaatctctagggtaagccagaaggcaagatcagattaaaaacaccatgtttctaagcatccatttttccctttctttaaaagaaacttaactgttctatgaaggagattgagggagaagagacaaactcctatgtcatgagaataaccgatgttctgataatagtagcatctaggtacagatgctggttgtattaccacgtcaatgtcctatgcagtattgttagacattttctcattttgaaatatttgtgtgtttgtgtatgtgctctgtgccatggctggtgtatatatgtgcaatgttagaaggcaaaagagtgatggtaggcagagggcaaagtcattgaatctcttatgccagttttcataaaacccaaaccacatatgaaaaaatccattaagggtccaagaagtctgtccatatgaaaatgagggtaaatatagtttatttcccaggtatcagtcattataattgatataatagctctaacatgcaatataaaattcataggagtattaatagcccatttacacatctataaaatgtaatgggattgcagagctgcagagtacagtgtaacagtactctcatgcaatttttttcaggatgcaaaggcaattattctttgtaagcgggacatttagaatatatttgtgtacatattatatgtatgtatatttcaaagtaccacactgaaaattagacatttattaaccaaatttaacgtggtatttaaaggtaatatttttaatatgatacattacatattgtgaatgtatactaaaaaaacattttaaatgttaaaattataatttcagattcatataaccacaactgtgatatatcctaactataaccagttgttgaggggtatactagaagcagaatgaaaccacattttttggtttgataatatgcacttattgactcccactcattgttatgttaattaagttattattctgtctccttgtaattttgattacaaaaattttattatcctgagttagctgttacttttacagtacctgatactcctaaaacttttaacttatacaaattagtcaataatgaccccaattttttcattaaaataatagtggtgaattatatgttattgtgttaaaacctcacttgccaaattctggcttcacatttgtatttagggctatccttaaaatgatgagtctatattatctagctttctattaccctaatataaactggtataagaagactttccttttttctttatgcatggaagcatcaataaattgtttaaaaaccatgtatagtaaattcagcttaacccgtgatcttcttaagttaaaggtacttttgttttataaaagctctagataaaactttcttttctgatcatgaatcaagtatctgtggtttcatgcccctctctatacctttcaaagaactcctgaagcaacttaactcatcatttcagcctctgagtagaggtaaaacctatgtgtacttctgtttatgatccatattgatatttatgacatgaacacagaatagtaccttacatttgctaaacagacagttaatatcaaatcctttcaatattctgggaacccagggaagtttttaaaaatgtcattactttcaaaggaacagaagtagttaaccaaactaacaagcaaaacctgaggtttacctagtgacaccaaattatcggtattttaactgaatttacccattgactaagaatgaaccagatttggtggtggttttgtttctatgcaaactggacacaaattacaacagtaaatttttttataagtgcttctcccttctccatgatgtgacttccggagataaaggattcaaaagataaagacaaagtacgctcagagttgttaaccagaaagtcctggctgtggttgcagaaacactgttggaagaaaagagatgactaagtcaagtgtctgccttatcaaaagagcaaaaatgcctctggttttgtgtttgggagaaaagtatcttggacgcactgttttccttgataaaagtcatcttctctactgtgtgaaatgaatacttggaattctaattgttttgtgtgccaggggcagtaatgtccctgcctcttctcccaatcaaggttgaggagtggggctggggagaggacttaactgacttaagaagtaggaaaacaaaaacctctctcctcagccttccacctccaagagaggaggaaaaacagttgtctgctgtctgtaattcagtttgcgtgtattttatgctcatgcaccaacccatacagagtaaatcttttatcaactgtatactggtgtttaatagagaatgattgtcttccgagttttttggttccttttttaactgtgttaaagtacttgaaatgtattgactgctgactatattttaaaaacaaaatgaaataatttgagttgtattacagaggttgacattgttcagggatgggacaaagccttcttcaatccttttcatactacttaatgattttggtgcaggaacctgagattttctgatttatatttcatgatatttcacatttgctcttcacagcatgagcatgaagcccagtggcaccaaatggctgggtacaatcaagtgatattttgtagcacctcactatctgaaaggccatgagttttcagatgatttcattgagcttcattgcagcctgaaattttaaaaaagttgtgtaatacgccaaccagtcaagttgtgttttggccagagatttagatatgtccaatttcctggctcatttcattgtgctctatgggtacgtataaaaagcaagaattctgtttcctaggcaaacattgcaactcagggctaaagtcatccagtgaaacttttagagccagaagtaactttgtcccagtcctacaatgtgaaaagagtgaatagttgcctctttttagccattttcatggctggtacatattcgtacgcattacttttcagaatcaatacgcactttcagatattcttatttttattctcttaagtctttattaactttggagagagaaatgatgcatctttttattttaaatgaagtagatcaacatggtggaacaaaatgataaagaacagaaaacatttcaatatattactaataactttttccaatataaatcctaaaattcctataacatagtattttacagttttatgaagctttctattgtgacttttatggaattaagagatgaagaagatgagatattttagcatttatatttttcaaaattatatgtatacttaaaaataaagtaactttatgcattta

SEQ ID NO: 19640 - DNA, 6447 bp, Homo sapiens
  source 1..6447: mol_type = unassigned DNA
gtaatggaagtggtggaagcagagaaaatagtactgttgacttcagcaaggtttttgtttttgttattgggtccagcgggcaaggcaccacagtaccatgaaattggacgatcaatagccactctcatgacagatgagattttccatgatgtagcttataaagcaaaagacagaaatgacctcttatctggaattgatgaatttttagatcaagtaactgtcctacctccaggagagtgggatccttctatacgcatagaaccaccaaaaagtgtcccttctcaggaaaagagaaagattcctgtgtttcacaatggatctacccccacactgggtgagactcctaaagaggccgctcatcatgctgggcctgagctacagaggactggacggctttttggtggtttgatacttgacatcaaaaggaaagcaccttttttcttgagtgacttcaaggatgcattaagcctgcagtgcctggcctcgattcttttcctatactgtgcctgtatgtctcctgtaatcacttttggagggctgcttggagaagctacagaaggcagaataagtgcaatagagtctctttttggagcatcattaactgggattgcctattcattgtttgctgggcaacctctaacaatattggggagcacaggtccagttctagtgtttgaaaaaattttatataaattctgcagagattatcaactttcttatctgtctttaagaaccagtattggtctgtggacttcttttttgtgcattgttttggttgcaacagatgcaagcagccttgtgtgttatattactcgatttacagaagaggcttttgcagcccttatttgcatcatattcatctacgaggctttggagaagctctttgatttaggagaaacatatgcatttaatatgcacaacaacttagataaactgaccagctactcatgtgtatgtactgaacctccaaaccccagcaatgaaactctagcacaatggaagaaagataatataacagcacacaatatttcctggagaaatcttactgtttctgaatgtaaaaaacttcgtggtgtattcttggggtcagcttgtggtcatcatggaccttatattccagatgtgctcttttggtgtgtcatcttgtttttcacaacattttttctgtcttcattcctcaagcaatttaagaccaagcgttactttcctaccaaggtgcgatcgacaatcagtgattttgctgtatttctcacaatagtaataatggttacaattgactaccttgtaggagttccatctcctaaacttcatgttcctgaaaaatttgagcctactcatccagagagagggtggatcataagcccactgggagataatccttggtggaccttattaatagctgctattcctgctttgctttgtaccattctcatctttatggatcaacaaatcacagctgtaattataaacagaaaggaacacaaattgaagaaaggagctggctatcaccttgatttgctcatggttggcgttatgttgggagtttgctctgtcatgggacttccatggtttgtggctgcaacagtgttgtcaataagtcatgtcaacagcttaaaagttgaatctgaatgttctgctccaggggaacaacccaagtttttgggaattcgtgaacagcgggttacagggctaatgatttttattctaatgggcctctctgtgttcatgacttcagtcctaaagtttattccaatgcctgttctgtatggtgttttcctttatatgggagtttcctcattaaaaggaatccagttatttgaccgtataaaattatttggaatgcctgctaagcatcagcctgatttgatatacctccgttatgtgccgctctggaaggtccatattttcacagtcattcagcttacttgtttggtccttttatgggtgataaaagtttcagctgctgcagtggtttttcccatgatggttcttgcattagtgtttgtgcgcaaactcatggacctgtgtttcacgaagagagaacttagttggcttgatgatcttatgccagaaagtaagaaaaagaaagaagatgacaaaaagaaaaaagagaaagaggaagctgaacggatgcttcaagatgatgatgatactgtgcaccttccatttgaagggggaagtctcttgcaaattccagtcaaggccctaaaatatagtgttgatccctcaattgttaacatatcagatgaaatggccaaaactgcacagtggaaggcactttccatgaatactgagaatgccaaagtaaccagatctaacatgagtcctgataaacctgtgagtgtgaaaataagttttgaagatgaaccaagaaagaaatacgtggatgctgaaacttcattatagaattgaaccaagaggcattatacatatagatatatacatatgtaatgtgtgcgtatcatgtcactatatataagaatattgtatgtcatgctgtttatgtgtgactaccgggtttttaaaagtagtgtctggagtttgtaatgagcaccgtggagactatgtatttaatgaaatgctctctttgaagtgaggtacatggttcttaactattcaaatatttattctgttagaaaaaaaaattttctgttttgcaatagaaggatgtggagaaatgctttcagtctacttttcttaaatctctgttcatcagtggcaattcgtaaaaaccttaagtgatactttgtttatatgtttataatttttaggtgtttcctgaaattttcacatattatttcacttttgttagtgctttatgggaagaatagggagtctataccagtgctgtgggaaaaatggtaacatttcagggcttctctatttgtgtttcatttctgtagatgtccatcgtgtttcactaactggcgttttcttagccatagagatgactgtagaacaatagaaactttaataatgatagtttttaacttttatgtttaaattttttttaaatcttaaaaccttcatatctaggtatccattgtgacagacaagtaaaattgcaggtgatttgataattaagcacccataccatttataacttctgaatttaaaaagttatacaatgccagtttgcaatagttgattttgatgcctttgtagaatattttttctgaatccttatgctcttttaaagccaatgattcccactctgttctctgccttgtctctctttgtcttaaaatgctttagtttccatcaggttcaagttcttgactattattctcttataagtagtaggcgtaaataatcaggagttagaattctctcagaagggtctatgatcagtattactttattaagaattacctttcattttctctttatgttattctttcacttttgtagattacatttaatagcttgttacctgtgattttattttaaaatatttattttgatatgatgcttaaatattatataaacatttggaaaagtaacaaatagagtaaattgttaatgtaaatagttggtgcttactttcatttatgtttattatcttaaagcaattgatagattttacatctttgatataaagcactgccatatttatattttaaaaggaaattagacattttatatgtagctcagattaatgacatttttattttgtgtattagtttttgcttttctgagctttttaaagtctaacaaatctttttagtcatcttttatatacttttagttccacatgaaataaatgttgttaagcctgtaggactggatgaatggggttgtgaaactgatttgacaagagaataatttacaaaaatcaaatgagtattgagaagccacagaaatatcaaaaatggtgacatcactattaggatgaaaattttatgaaattccaatgctccctttaaccatataattaaattacaaaggtatacataattaatctaataaaggatcatgaggaatgccaaaagctgaaattttagcaagtctggtgttttaaattcattataaactatttattaactaatgtaatgtcctcctctaagaccatattgtaagagtcttgttaaaatgatggattcaacttctgcctcggatgagaggttggaaatgtagctgcttttctttagaaaatatgtagctgtcatcatttggtactgcctaaaaagagttagactctattggcaattgatagagtattacccacggtgcttattattgtttatgagcttccattgtaatgattcctttttatttgtagcagcataattatttccaaagaccccagtatttgctgctatttttaaaactcccctgatgtacctgaacaagaggatttcctcacatcatttccttgtgtctggacatcaggggtaacaactgtacttactttacaggaagaaattttaaaactgaaaactacctgggatcatagtgtttctgtgattttatttaattgtgtatagtaattatccagtgccagaaaaaccgtcacttgcaaaatactttgcactcaaaatgtttttacaatgcttctaaatgttactggtttctgctttcttttgactacttgactgacaaaatgatctgactactccatttaagagcaaaggtaactcatgtttaggtaattaactgcttgttttaagtgattatatttcttccactgtttttgaaaaataatcaaagatagcattcattgagagacagtgacagatataatttactacatatattgatttttaaataaagttgccttaaataagtgtatgtaagcagtagtagttgctatgtactgatttacctcaaggtgcaaaataattaaacctgtacatattccatttacaaaataaattcagccctgcactttctttagatgccttgatttccagaatggagcttagtgctactgaataccctggccacagagccacctcaggatattcttttctccaccctagtttatttatttatagatatctgtttacaaagtctgtagtaaatcctgatgctgaccatctgaaatgtactttttttctgaatgctgtttcaatctaaaatagcagcttttgagaaaacaatgatgtaaattccttatgataaaaggatgattctatatattctttaatgatattaaatatgccgaagccaagcacacagtctttctaaagtgtgtgtatgtttgtgtgaatgtgaatgatactgatcttatatctgttaaaagttgttttaaaaagctgtggcatcccattgttcatatttgccaagtcttctgtaaagatgtctaggacgaaatattttatgtgctaatgcatgtatttgtaaaccagatttgtttaccactcaaaattaacttgttttcttcatccaaaaaagtttatttcttccacgtacttaaattttctgtgtgggtataatatagctttctaatttttttctttcacaaaggcaggttcaaaattctgttgaaagaaaaatgctttctgaaactgaggtataacaccagagcttgctgtttaaaggattatatgatgtacatcagttctataaatgtgctcagcagtttaacatgtgaatcctgttttaaagtgctcagatttcaactgtgtaagccattgatataacgctgtaattaaaaatgtttatatgaaataacttaatgttttaaatttatttatgtagatcacatcatttttatcgtatgcagtgcaaatatgtgaaatgtcttttggtttattccaacaattatttattttagaaagtaagtttaaagactttaaggacattcaaagtttaaaatagtgttcaaattgcaaaatttggcaatcttcatataaattggtttcttttctaacttttcaaaaactaacattaaatgtcaattataggaaaacatagttggaaatgtaatcatccaaagatcatttttaaaatgaaatttaattagcacatattgaacatttgacttaattgttaaaccccagttttgttttgtttttttaatcagatttttgcacactgattagtttttgtgttgtggcttttgttgctttattattcaaggttttttttttttttcttccccatgggggagattgtcttccaatgtttaactacgtttaaataaataaaaattgaattttattgttcatttatataaaatctgataccttgatgtaatttcacaatacagttccaatttttatggcttttataattacaatgatattttcttctataataaaatccaaagtaaacatttaaattgtagaactgatatttttcatttatatgaagtataagcctctactgggtctatattgtgaatcatcctgcctttcaaatttgtttcataattgttagatgaaaactatttttttggagatgttactgaagttgattgagcaataaaagtctacttaatta

SEQ ID NO: 19641 - DNA, 7757 bp, Homo sapiens
  source 1..7757: mol_type = unassigned DNA
ctcactgtccctggaatcttcaagggagttactgcattacatcatcagaaacaaggcatttctatattactatggaaagatttcgtctggagaagaagttacctggtcctgatgaagaagctgttgtggatcttggcaaaactagctcaactgtgaacaccaagtttgaaaaagaagaactagaaagtcatagagctgtatatattggtgttcacgtcccgtttagtaaagagagtcgtcggcgtcataggcatcgcggacacaaacatcaccaccggagaagaaaagataaagaatcagataaagaagatggacgggaatctccttcttatgatacaccatcccagagagttcagtttatccttggtactgaagatgatgatgaagaacatattccccatgatctcttcacggaaatggatgaactgtgttacagagatggagaagaatatgaatggaaagaaactgctagatggctgaaatttgaagaggatgttgaagatggcggtgaccgatggagtaaaccttatgtggcaactctctctttgcacagtctttttgaactaaggagttgcatcctcaatggaacagtcatgctggatatgagagcaagcactctagatgaaatagcagatatggtattagacaacatgatagcttctggccaattagacgagtccatacgagagaatgtcagagaagctcttctgaagagacatcatcatcagaatgagaaaagattcaccagtcggattcctcttgttcgatcttttgcagatataggcaagaaacattctgaccctcacttgcttgaaaggaatggggaaggcctttcagcctcccgccactctttgcgaacaggtctgtctgcctcaaacctttccttgagaggagaatcacctttatctcttcttcttggtcatcttcttccttcttcaagagctggaacccctgcaggctcaaggtgtacaaccccagtacccacccctcaaaacagtcctccttctagccctagcatcagccgcctgacctccagaagttcccaagagagtcagcgtcaggccccagaactactggtttcacctgccagtgatgatattcccacagtagtaattcatccgcctgaggaagacttagaagcagcgctgaaaggcgaggagcagaagaatgaggaaaatgttgacttaactccaggtattttggcctctccccagtctgctcctggaaacttggacaatagtaaaagtggagaaattaaaggtaatggaagtggtggaagcagagaaaatagtactgttgacttcagcaaggttgatatgaatttcatgagaaaaattcctacgggtgctgaggcatccaacgtcctggtgggcgaagtagactttttggaaaggccaataattgcatttgtgagactggctcctgctgtcctccttacagggttgactgaggtccctgttccaaccaggtttttgtttttgttattgggtccagcgggcaaggcaccacagtaccatgaaattggacgatcaatagccactctcatgacagatgagattttccatgatgtagcttataaagcaaaagacagaaatgacctcttatctggaattgatgaatttttagatcaagtaactgtcctacctccaggagagtgggatccttctatacgcatagaaccaccaaaaagtgtcccttctcaggaaaagagaaagattcctgtgtttcacaatggatctacccccacactgggtgagactcctaaagaggccgctcatcatgctgggcctgagctacagaggactggacggctttttggtggtttgatacttgacatcaaaaggaaagcaccttttttcttgagtgacttcaaggatgcattaagcctgcagtgcctggcctcgattcttttcctatactgtgcctgtatgtctcctgtaatcacttttggagggctgcttggagaagctacagaaggcagaataagtgcaatagagtctctttttggagcatcattaactgggattgcctattcattgtttgctgggcaacctctaacaatattggggagcacaggtccagttctagtgtttgaaaaaattttatataaattctgcagagattatcaactttcttatctgtctttaagaaccagtattggtctgtggacttcttttttgtgcattgttttggttgcaacagatgcaagcagccttgtgtgttatattactcgatttacagaagaggcttttgcagcccttatttgcatcatattcatctacgaggctttggagaagctctttgatttaggagaaacatatgcatttaatatgcacaacaacttagataaactgaccagctactcatgtgtatgtactgaacctccaaaccccagcaatgaaactctagcacaatggaagaaagataatataacagcacacaatatttcctggagaaatcttactgtttctgaatgtaaaaaacttcgtggtgtattcttggggtcagcttgtggtcatcatggaccttatattccagatgtgctcttttggtgtgtcatcttgtttttcacaacattttttctgtcttcattcctcaagcaatttaagaccaagcgttactttcctaccaaggtgcgatcgacaatcagtgattttgctgtatttctcacaatagtaataatggttacaattgactaccttgtaggagttccatctcctaaacttcatgttcctgaaaaatttgagcctactcatccagagagagggtggatcataagcccactgggagataatccttggtggaccttattaatagctgctattcctgctttgctttgtaccattctcatctttatggatcaacaaatcacagctgtaattataaacagaaaggaacacaaattgaagaaaggagctggctatcaccttgatttgctcatggttggcgttatgttgggagtttgctctgtcatgggacttccatggtttgtggctgcaacagtgttgtcaataagtcatgtcaacagcttaaaagttgaatctgaatgttctgctccaggggaacaacccaagtttttgggaattcgtgaacagcgggttacagggctaatgatttttattctaatgggcctctctgtgttcatgacttcagtcctaaagtttattccaatgcctgttctgtatggtgttttcctttatatgggagtttcctcattaaaaggaatccagttatttgaccgtataaaattatttggaatgcctgctaagcatcagcctgatttgatatacctccgttatgtgccgctctggaaggtccatattttcacagtcattcagcttacttgtttggtccttttatgggtgataaaagtttcagctgctgcagtggtttttcccatgatggttcttgcattagtgtttgtgcgcaaactcatggacctgtgtttcacgaagagagaacttagttggcttgatgatcttatgccagaaagtaagaaaaagaaagaagatgacaaaaagaaaaaagagaaagaggaagctgaacggatgcttcaagatgatgatgatactgtgcaccttccatttgaagggggaagtctcttgcaaattccagtcaaggccctaaaatatagtcctgataaacctgtgagtgtgaaaataagttttgaagatgaaccaagaaagaaatacgtggatgctgaaacttcattatagaattgaaccaagaggcattatacatatagatatatacatatgtaatgtgtgcgtatcatgtcactatatataagaatattgtatgtcatgctgtttatgtgtgactaccgggtttttaaaagtagtgtctggagtttgtaatgagcaccgtggagactatgtatttaatgaaatgctctctttgaagtgaggtacatggttcttaactattcaaatatttattctgttagaaaaaaaaattttctgttttgcaatagaaggatgtggagaaatgctttcagtctacttttcttaaatctctgttcatcagtggcaattcgtaaaaaccttaagtgatactttgtttatatgtttataatttttaggtgtttcctgaaattttcacatattatttcacttttgttagtgctttatgggaagaatagggagtctataccagtgctgtgggaaaaatggtaacatttcagggcttctctatttgtgtttcatttctgtagatgtccatcgtgtttcactaactggcgttttcttagccatagagatgactgtagaacaatagaaactttaataatgatagtttttaacttttatgtttaaattttttttaaatcttaaaaccttcatatctaggtatccattgtgacagacaagtaaaattgcaggtgatttgataattaagcacccataccatttataacttctgaatttaaaaagttatacaatgccagtttgcaatagttgattttgatgcctttgtagaatattttttctgaatccttatgctcttttaaagccaatgattcccactctgttctctgccttgtctctctttgtcttaaaatgctttagtttccatcaggttcaagttcttgactattattctcttataagtagtaggcgtaaataatcaggagttagaattctctcagaagggtctatgatcagtattactttattaagaattacctttcattttctctttatgttattctttcacttttgtagattacatttaatagcttgttacctgtgattttattttaaaatatttattttgatatgatgcttaaatattatataaacatttggaaaagtaacaaatagagtaaattgttaatgtaaatagttggtgcttactttcatttatgtttattatcttaaagcaattgatagattttacatctttgatataaagcactgccatatttatattttaaaaggaaattagacattttatatgtagctcagattaatgacatttttattttgtgtattagtttttgcttttctgagctttttaaagtctaacaaatctttttagtcatcttttatatacttttagttccacatgaaataaatgttgttaagcctgtaggactggatgaatggggttgtgaaactgatttgacaagagaataatttacaaaaatcaaatgagtattgagaagccacagaaatatcaaaaatggtgacatcactattaggatgaaaattttatgaaattccaatgctccctttaaccatataattaaattacaaaggtatacataattaatctaataaaggatcatgaggaatgccaaaagctgaaattttagcaagtctggtgttttaaattcattataaactatttattaactaatgtaatgtcctcctctaagaccatattgtaagagtcttgttaaaatgatggattcaacttctgcctcggatgagaggttggaaatgtagctgcttttctttagaaaatatgtagctgtcatcatttggtactgcctaaaaagagttagactctattggcaattgatagagtattacccacggtgcttattattgtttatgagcttccattgtaatgattcctttttatttgtagcagcataattatttccaaagaccccagtatttgctgctatttttaaaactcccctgatgtacctgaacaagaggatttcctcacatcatttccttgtgtctggacatcaggggtaacaactgtacttactttacaggaagaaattttaaaactgaaaactacctgggatcatagtgtttctgtgattttatttaattgtgtatagtaattatccagtgccagaaaaaccgtcacttgcaaaatactttgcactcaaaatgtttttacaatgcttctaaatgttactggtttctgctttcttttgactacttgactgacaaaatgatctgactactccatttaagagcaaaggtaactcatgtttaggtaattaactgcttgttttaagtgattatatttcttccactgtttttgaaaaataatcaaagatagcattcattgagagacagtgacagatataatttactacatatattgatttttaaataaagttgccttaaataagtgtatgtaagcagtagtagttgctatgtactgatttacctcaaggtgcaaaataattaaacctgtacatattccatttacaaaataaattcagccctgcactttctttagatgccttgatttccagaatggagcttagtgctactgaataccctggccacagagccacctcaggatattcttttctccaccctagtttatttatttatagatatctgtttacaaagtctgtagtaaatcctgatgctgaccatctgaaatgtactttttttctgaatgctgtttcaatctaaaatagcagcttttgagaaaacaatgatgtaaattccttatgataaaaggatgattctatatattctttaatgatattaaatatgccgaagccaagcacacagtctttctaaagtgtgtgtatgtttgtgtgaatgtgaatgatactgatcttatatctgttaaaagttgttttaaaaagctgtggcatcccattgttcatatttgccaagtcttctgtaaagatgtctaggacgaaatattttatgtgctaatgcatgtatttgtaaaccagatttgtttaccactcaaaattaacttgttttcttcatccaaaaaagtttatttcttccacgtacttaaattttctgtgtgggtataatatagctttctaatttttttctttcacaaaggcaggttcaaaattctgttgaaagaaaaatgctttctgaaactgaggtataacaccagagcttgctgtttaaaggattatatgatgtacatcagttctataaatgtgctcagcagtttaacatgtgaatcctgttttaaagtgctcagatttcaactgtgtaagccattgatataacgctgtaattaaaaatgtttatatgaaataacttaatgttttaaatttatttatgtagatcacatcatttttatcgtatgcagtgcaaatatgtgaaatgtcttttggtttattccaacaattatttattttagaaagtaagtttaaagactttaaggacattcaaagtttaaaatagtgttcaaattgcaaaatttggcaatcttcatataaattggtttcttttctaacttttcaaaaactaacattaaatgtcaattataggaaaacatagttggaaatgtaatcatccaaagatcatttttaaaatgaaatttaattagcacatattgaacatttgacttaattgttaaaccccagttttgttttgtttttttaatcagatttttgcacactgattagtttttgtgttgtggcttttgttgctttattattcaaggttttttttttttttcttccccatgggggagattgtcttccaatgtttaactacgtttaaataaataaaaattgaattttattgttcatttatataaaatctgataccttgatgtaatttcacaatacagttccaatttttatggcttttataattacaatgatattttcttctataataaaatccaaagtaaacatttaaattgtagaactgatatttttcatttatatgaagtataagcctctactgggtctatattgtgaatcatcctgcctttcaaatttgtttcataattgttagatgaaaactatttttttggagatgttactgaagttgattgagcaataaaagtctacttaatta

SEQ ID NO: 19642 - DNA, 7385 bp, Homo sapiens
  source 1..7385: mol_type = unassigned DNA
ctcactgtccctggaatcttcaagggagttactgcattacatcatcagaaacaaggcatttctatattactatggaaagatttcgtctggagaagaagttacctggtcctgatgaagaagctgttgtggatcttggcaaaactagctcaactgtgaacaccaagtttgaaaaagaagaactagaaagtcatagagctgtatatattggtgttcacgtcccgtttagtaaagagagtcgtcggcgtcataggcatcgcggacacaaacatcaccaccggagaagaaaagataaagaatcagataaagaagatggacgggaatctccttcttatgatacaccatcccagagagttcagtttatccttggtactgaagatgatgatgaagaacatattccccatgatctcttcacggaaatggatgaactgtgttacagagatggagaagaatatgaatggaaagaaactgctagatggctgaaatttgaagaggatgttgaagatggcggtgaccgatggagtaaaccttatgtggcaactctctctttgcacagtctttttgaactaaggagttgcatcctcaatggaacagtcatgctggatatgagagcaagcactctagatgaaatagcagatatggtattagacaacatgatagcttctggccaattagacgagtccatacgagagaatgtcagagaagctcttctgaagagacatcatcatcagaatgagaaaagattcaccagtcggattcctcttgttcgatcttttgcagatataggcaagaaacattctgaccctcacttgcttgaaaggaatggtattttggcctctccccagtctgctcctggaaacttggacaatagtaaaagtggagaaattaaaggtaatggaagtggtggaagcagagaaaatagtactgttgacttcagcaaggttgatatgaatttcatgagaaaaattcctacgggtgctgaggcatccaacgtcctggtgggcgaagtagactttttggaaaggccaataattgcatttgtgagactggctcctgctgtcctccttacagggttgactgaggtccctgttccaaccaggtttttgtttttgttattgggtccagcgggcaaggcaccacagtaccatgaaattggacgatcaatagccactctcatgacagatgagattttccatgatgtagcttataaagcaaaagacagaaatgacctcttatctggaattgatgaatttttagatcaagtaactgtcctacctccaggagagtgggatccttctatacgcatagaaccaccaaaaagtgtcccttctcaggaaaagagaaagattcctgtgtttcacaatggatctacccccacactgggtgagactcctaaagaggccgctcatcatgctgggcctgagctacagaggactggacggctttttggtggtttgatacttgacatcaaaaggaaagcaccttttttcttgagtgacttcaaggatgcattaagcctgcagtgcctggcctcgattcttttcctatactgtgcctgtatgtctcctgtaatcacttttggagggctgcttggagaagctacagaaggcagaataagtgcaatagagtctctttttggagcatcattaactgggattgcctattcattgtttgctgggcaacctctaacaatattggggagcacaggtccagttctagtgtttgaaaaaattttatataaattctgcagagattatcaactttcttatctgtctttaagaaccagtattggtctgtggacttcttttttgtgcattgttttggttgcaacagatgcaagcagccttgtgtgttatattactcgatttacagaagaggcttttgcagcccttatttgcatcatattcatctacgaggctttggagaagctctttgatttaggagaaacatatgcatttaatatgcacaacaacttagataaactgaccagctactcatgtgtatgtactgaacctccaaaccccagcaatgaaactctagcacaatggaagaaagataatataacagcacacaatatttcctggagaaatcttactgtttctgaatgtaaaaaacttcgtggtgtattcttggggtcagcttgtggtcatcatggaccttatattccagatgtgctcttttggtgtgtcatcttgtttttcacaacattttttctgtcttcattcctcaagcaatttaagaccaagcgttactttcctaccaaggtgcgatcgacaatcagtgattttgctgtatttctcacaatagtaataatggttacaattgactaccttgtaggagttccatctcctaaacttcatgttcctgaaaaatttgagcctactcatccagagagagggtggatcataagcccactgggagataatccttggtggaccttattaatagctgctattcctgctttgctttgtaccattctcatctttatggatcaacaaatcacagctgtaattataaacagaaaggaacacaaattgaagaaaggagctggctatcaccttgatttgctcatggttggcgttatgttgggagtttgctctgtcatgggacttccatggtttgtggctgcaacagtgttgtcaataagtcatgtcaacagcttaaaagttgaatctgaatgttctgctccaggggaacaacccaagtttttgggaattcgtgaacagcgggttacagggctaatgatttttattctaatgggcctctctgtgttcatgacttcagtcctaaagtttattccaatgcctgttctgtatggtgttttcctttatatgggagtttcctcattaaaaggaatccagttatttgaccgtataaaattatttggaatgcctgctaagcatcagcctgatttgatatacctccgttatgtgccgctctggaaggtccatattttcacagtcattcagcttacttgtttggtccttttatgggtgataaaagtttcagctgctgcagtggtttttcccatgatggttcttgcattagtgtttgtgcgcaaactcatggacctgtgtttcacgaagagagaacttagttggcttgatgatcttatgccagaaagtaagaaaaagaaagaagatgacaaaaagaaaaaagagaaagaggaagctgaacggatgcttcaagatgatgatgatactgtgcaccttccatttgaagggggaagtctcttgcaaattccagtcaaggccctaaaatatagtcctgataaacctgtgagtgtgaaaataagttttgaagatgaaccaagaaagaaatacgtggatgctgaaacttcattatagaattgaaccaagaggcattatacatatagatatatacatatgtaatgtgtgcgtatcatgtcactatatataagaatattgtatgtcatgctgtttatgtgtgactaccgggtttttaaaagtagtgtctggagtttgtaatgagcaccgtggagactatgtatttaatgaaatgctctctttgaagtgaggtacatggttcttaactattcaaatatttattctgttagaaaaaaaaattttctgttttgcaatagaaggatgtggagaaatgctttcagtctacttttcttaaatctctgttcatcagtggcaattcgtaaaaaccttaagtgatactttgtttatatgtttataatttttaggtgtttcctgaaattttcacatattatttcacttttgttagtgctttatgggaagaatagggagtctataccagtgctgtgggaaaaatggtaacatttcagggcttctctatttgtgtttcatttctgtagatgtccatcgtgtttcactaactggcgttttcttagccatagagatgactgtagaacaatagaaactttaataatgatagtttttaacttttatgtttaaattttttttaaatcttaaaaccttcatatctaggtatccattgtgacagacaagtaaaattgcaggtgatttgataattaagcacccataccatttataacttctgaatttaaaaagttatacaatgccagtttgcaatagttgattttgatgcctttgtagaatattttttctgaatccttatgctcttttaaagccaatgattcccactctgttctctgccttgtctctctttgtcttaaaatgctttagtttccatcaggttcaagttcttgactattattctcttataagtagtaggcgtaaataatcaggagttagaattctctcagaagggtctatgatcagtattactttattaagaattacctttcattttctctttatgttattctttcacttttgtagattacatttaatagcttgttacctgtgattttattttaaaatatttattttgatatgatgcttaaatattatataaacatttggaaaagtaacaaatagagtaaattgttaatgtaaatagttggtgcttactttcatttatgtttattatcttaaagcaattgatagattttacatctttgatataaagcactgccatatttatattttaaaaggaaattagacattttatatgtagctcagattaatgacatttttattttgtgtattagtttttgcttttctgagctttttaaagtctaacaaatctttttagtcatcttttatatacttttagttccacatgaaataaatgttgttaagcctgtaggactggatgaatggggttgtgaaactgatttgacaagagaataatttacaaaaatcaaatgagtattgagaagccacagaaatatcaaaaatggtgacatcactattaggatgaaaattttatgaaattccaatgctccctttaaccatataattaaattacaaaggtatacataattaatctaataaaggatcatgaggaatgccaaaagctgaaattttagcaagtctggtgttttaaattcattataaactatttattaactaatgtaatgtcctcctctaagaccatattgtaagagtcttgttaaaatgatggattcaacttctgcctcggatgagaggttggaaatgtagctgcttttctttagaaaatatgtagctgtcatcatttggtactgcctaaaaagagttagactctattggcaattgatagagtattacccacggtgcttattattgtttatgagcttccattgtaatgattcctttttatttgtagcagcataattatttccaaagaccccagtatttgctgctatttttaaaactcccctgatgtacctgaacaagaggatttcctcacatcatttccttgtgtctggacatcaggggtaacaactgtacttactttacaggaagaaattttaaaactgaaaactacctgggatcatagtgtttctgtgattttatttaattgtgtatagtaattatccagtgccagaaaaaccgtcacttgcaaaatactttgcactcaaaatgtttttacaatgcttctaaatgttactggtttctgctttcttttgactacttgactgacaaaatgatctgactactccatttaagagcaaaggtaactcatgtttaggtaattaactgcttgttttaagtgattatatttcttccactgtttttgaaaaataatcaaagatagcattcattgagagacagtgacagatataatttactacatatattgatttttaaataaagttgccttaaataagtgtatgtaagcagtagtagttgctatgtactgatttacctcaaggtgcaaaataattaaacctgtacatattccatttacaaaataaattcagccctgcactttctttagatgccttgatttccagaatggagcttagtgctactgaataccctggccacagagccacctcaggatattcttttctccaccctagtttatttatttatagatatctgtttacaaagtctgtagtaaatcctgatgctgaccatctgaaatgtactttttttctgaatgctgtttcaatctaaaatagcagcttttgagaaaacaatgatgtaaattccttatgataaaaggatgattctatatattctttaatgatattaaatatgccgaagccaagcacacagtctttctaaagtgtgtgtatgtttgtgtgaatgtgaatgatactgatcttatatctgttaaaagttgttttaaaaagctgtggcatcccattgttcatatttgccaagtcttctgtaaagatgtctaggacgaaatattttatgtgctaatgcatgtatttgtaaaccagatttgtttaccactcaaaattaacttgttttcttcatccaaaaaagtttatttcttccacgtacttaaattttctgtgtgggtataatatagctttctaatttttttctttcacaaaggcaggttcaaaattctgttgaaagaaaaatgctttctgaaactgaggtataacaccagagcttgctgtttaaaggattatatgatgtacatcagttctataaatgtgctcagcagtttaacatgtgaatcctgttttaaagtgctcagatttcaactgtgtaagccattgatataacgctgtaattaaaaatgtttatatgaaataacttaatgttttaaatttatttatgtagatcacatcatttttatcgtatgcagtgcaaatatgtgaaatgtcttttggtttattccaacaattatttattttagaaagtaagtttaaagactttaaggacattcaaagtttaaaatagtgttcaaattgcaaaatttggcaatcttcatataaattggtttcttttctaacttttcaaaaactaacattaaatgtcaattataggaaaacatagttggaaatgtaatcatccaaagatcatttttaaaatgaaatttaattagcacatattgaacatttgacttaattgttaaaccccagttttgttttgtttttttaatcagatttttgcacactgattagtttttgtgttgtggcttttgttgctttattattcaaggttttttttttttttcttccccatgggggagattgtcttccaatgtttaactacgtttaaataaataaaaattgaattttattgttcatttatataaaatctgataccttgatgtaatttcacaatacagttccaatttttatggcttttataattacaatgatattttcttctataataaaatccaaagtaaacatttaaattgtagaactgatatttttcatttatatgaagtataagcctctactgggtctatattgtgaatcatcctgcctttcaaatttgtttcataattgttagatgaaaactatttttttggagatgttactgaagttgattgagcaataaaagtctacttaatta

SEQ ID NO: 19643 - DNA, 4159 bp, Homo sapiens
  source 1..4159: mol_type = unassigned DNA
cctactaaagccagcccagcagtcgcagcgcgcacacgcacgccccgcgtctcccgcgcccggcgcccggctctccccacgcgcgcacacctcgcgcacggacgcacccacgtttgtcctcgcgcgccgggggctcggcggcggcggcaggggcagcggcagaagcaggcagaccgcgcggggcagtaccgtagcggccgtcacgggctggccggccggccatggaggctgatggggccggcgagcagatgagaccgctactcacccgggtaacgagcaggggtcctgatgaagaagctgttgtggatcttggcaaaactagctcaactgtgaacaccaagtttgaaaaagaagaactagaaagtcatagagctgtatatattggtgttcacgtcccgtttagtaaagagagtcgtcggcgtcataggcatcgcggacacaaacatcaccaccggagaagaaaagataaagaatcagataaagaagatggacgggaatctccttcttatgatacaccatcccagagagttcagtttatccttggtactgaagatgatgatgaagaacatattccccatgatctcttcacggaaatggatgaactgtgttacagagatggagaagaatatgaatggaaagaaactgctagatggctgaaatttgaagaggatgttgaagatggcggtgaccgatggagtaaaccttatgtggcaactctctctttgcacagtctttttgaactaaggagttgcatcctcaatggaacagtcatgctggatatgagagcaagcactctagatgaaatagcagatatggtattagacaacatgatagcttctggccaattagacgagtccatacgagagaatgtcagagaagctcttctgaagagacatcatcatcagaatgagaaaagattcaccagtcggattcctcttgttcgatcttttgcagatataggcaagaaacattctgaccctcacttgcttgaaaggaatggggaaggcctttcagcctcccgccactctttgcgaacaggtctgtctgcctcaaacctttccttgagaggagaatcacctttatctcttcttcttggtcatcttcttccttcttcaagagctggaacccctgcaggctcaaggtgtacaaccccagtacccacccctcaaaacagtcctccttctagccctagcatcagccgcctgacctccagaagttcccaagagagtcagcgtcaggccccagaactactggtttcacctgccagtgatgatattcccacagtagtaattcatccgcctgaggaagacttagaagcagcgctgaaaggcgaggagcagaagaatgaggaaaatgttgacttaactccaggtattttggcctctccccagtctgctcctggaaacttggacaatagtaaaagtggagaaattaaaggtaatggaagtggtggaagcagagaaaatagtactgttgacttcagcaaggttgatatgaatttcatgagaaaaattcctacgggtgctgaggcatccaacgtcctggtgggcgaagtagactttttggaaaggccaataattgcatttgtgagactggctcctgctgtcctccttacagggttgactgaggtccctgttccaaccaggtttttgtttttgttattgggtccagcgggcaaggcaccacagtaccatgaaattggacgatcaatagccactctcatgacagatgagattttccatgatgtagcttataaagcaaaagacagaaatgacctcttatctggaattgatgaatttttagatcaagtaactgtcctacctccaggagagtgggatccttctatacgcatagaaccaccaaaaagtgtcccttctcaggaaaagagaaagattcctgtgtttcacaatggatctacccccacactgggtgagactcctaaagaggccgctcatcatgctgggcctgagctacagaggactggacggctttttggtggtttgatacttgacatcaaaaggaaagcaccttttttcttgagtgacttcaaggatgcattaagcctgcagtgcctggcctcgattcttttcctatactgtgcctgtatgtctcctgtaatcacttttggagggctgcttggagaagctacagaaggcagaataagtgcaatagagtctctttttggagcatcattaactgggattgcctattcattgtttgctgggcaacctctaacaatattggggagcacaggtccagttctagtgtttgaaaaaattttatataaattctgcagagattatcaactttcttatctgtctttaagaaccagtattggtctgtggacttcttttttgtgcattgttttggttgcaacagatgcaagcagccttgtgtgttatattactcgatttacagaagaggcttttgcagcccttatttgcatcatattcatctacgaggctttggagaagctctttgatttaggagaaacatatgcatttaatatgcacaacaacttagataaactgaccagctactcatgtgtatgtactgaacctccaaaccccagcaatgaaactctagcacaatggaagaaagataatataacagcacacaatatttcctggagaaatcttactgtttctgaatgtaaaaaacttcgtggtgtattcttggggtcagcttgtggtcatcatggaccttatattccagatgtgctcttttggtgtgtcatcttgtttttcacaacattttttctgtcttcattcctcaagcaatttaagaccaagcgttactttcctaccaaggtgcgatcgacaatcagtgattttgctgtatttctcacaatagtaataatggttacaattgactaccttgtaggagttccatctcctaaacttcatgttcctgaaaaatttgagcctactcatccagagagagggtggatcataagcccactgggagataatccttggtggaccttattaatagctgctattcctgctttgctttgtaccattctcatctttatggatcaacaaatcacagctgtaattataaacagaaaggaacacaaattgaagaaaggagctggctatcaccttgatttgctcatggttggcgttatgttgggagtttgctctgtcatgggacttccatggtttgtggctgcaacagtgttgtcaataagtcatgtcaacagcttaaaagttgaatctgaatgttctgctccaggggaacaacccaagtttttgggaattcgtgaacagcgggttacagggctaatgatttttattctaatgggcctctctgtgttcatgacttcagtcctaaagtttattccaatgcctgttctgtatggtgttttcctttatatgggagtttcctcattaaaaggaatccagttatttgaccgtataaaattatttggaatgcctgctaagcatcagcctgatttgatatacctccgttatgtgccgctctggaaggtccatattttcacagtcattcagcttacttgtttggtccttttatgggtgataaaagtttcagctgctgcagtggtttttcccatgatggttcttgcattagtgtttgtgcgcaaactcatggacctgtgtttcacgaagagagaacttagttggcttgatgatcttatgccagaaagtaagaaaaagaaagaagatgacaaaaagaaaaaagagaaagaggaagctgaacggatgcttcaagatgatgatgatactgtgcaccttccatttgaagggggaagtctcttgcaaattccagtcaaggccctaaaatatagtgttgatccctcaattgttaacatatcagatgaaatggccaaaactgcacagtggaaggcactttccatgaatactgagaatgccaaagtaaccagatctaacatgagtcctgataaacctgtgagtgtgaaaataagttttgaagatgaaccaagaaagaaatacgtggatgctgaaacttcattatagaattgaaccaagaggcattatacatatagatatatacatatgtaatgtgtgcgtatcatgtcactatatataagaatattgtatgtcatgctgtttatgtgtgactaccgggtttttaaaagtagtgtctggagtttgtaatgagcaccgtggagact

SEQ ID NO: 19644 - DNA, 4120 bp, Homo sapiens
  source 1..4120: mol_type = unassigned DNA
cctactaaagccagcccagcagtcgcagcgcgcacacgcacgccccgcgtctcccgcgcccggcgcccggctctccccacgcgcgcacacctcgcgcacggacgcacccacgtttgtcctcgcgcgccgggggctcggcggcggcggcaggggcagcggcagaagcaggcagaccgcgcggggcagtaccgtagcggccgtcacgggctggccggccggccatggaggctgatggggccggcgagcagatgagaccgctactcacccgggtaacgagcaggggtcctgatgaagaagctgttgtggatcttggcaaaactagctcaactgtgaacaccaagtttgaaaaagaagaactagaaagtcatagagctgtatatattggtgttcacgtcccgtttagtaaagagagtcgtcggcgtcataggcatcgcggacacaaacatcaccaccggagaagaaaagataaagaatcagataaagaagatggacgggaatctccttcttatgatacaccatcccagagagttcagtttatccttggtactgaagatgatgatgaagaacatattccccatgatctcttcacggaaatggatgaactgtgttacagagatggagaagaatatgaatggaaagaaactgctagatggctgaaatttgaagaggatgttgaagatggcggtgaccgatggagtaaaccttatgtggcaactctctctttgcacagtctttttgaactaaggagttgcatcctcaatggaacagtcatgctggatatgagagcaagcactctagatgaaatagcagatatggtattagacaacatgatagcttctggccaattagacgagtccatacgagagaatgtcagagaagctcttctgaagagacatcatcatcagaatgagaaaagattcaccagtcggattcctcttgttcgatcttttgcagatataggggaaggcctttcagcctcccgccactctttgcgaacaggtctgtctgcctcaaacctttccttgagaggagaatcacctttatctcttcttcttggtcatcttcttccttcttcaagagctggaacccctgcaggctcaaggtgtacaaccccagtacccacccctcaaaacagtcctccttctagccctagcatcagccgcctgacctccagaagttcccaagagagtcagcgtcaggccccagaactactggtttcacctgccagtgatgatattcccacagtagtaattcatccgcctgaggaagacttagaagcagcgctgaaaggcgaggagcagaagaatgaggaaaatgttgacttaactccaggtattttggcctctccccagtctgctcctggaaacttggacaatagtaaaagtggagaaattaaaggtaatggaagtggtggaagcagagaaaatagtactgttgacttcagcaaggttgatatgaatttcatgagaaaaattcctacgggtgctgaggcatccaacgtcctggtgggcgaagtagactttttggaaaggccaataattgcatttgtgagactggctcctgctgtcctccttacagggttgactgaggtccctgttccaaccaggtttttgtttttgttattgggtccagcgggcaaggcaccacagtaccatgaaattggacgatcaatagccactctcatgacagatgagattttccatgatgtagcttataaagcaaaagacagaaatgacctcttatctggaattgatgaatttttagatcaagtaactgtcctacctccaggagagtgggatccttctatacgcatagaaccaccaaaaagtgtcccttctcaggaaaagagaaagattcctgtgtttcacaatggatctacccccacactgggtgagactcctaaagaggccgctcatcatgctgggcctgagctacagaggactggacggctttttggtggtttgatacttgacatcaaaaggaaagcaccttttttcttgagtgacttcaaggatgcattaagcctgcagtgcctggcctcgattcttttcctatactgtgcctgtatgtctcctgtaatcacttttggagggctgcttggagaagctacagaaggcagaataagtgcaatagagtctctttttggagcatcattaactgggattgcctattcattgtttgctgggcaacctctaacaatattggggagcacaggtccagttctagtgtttgaaaaaattttatataaattctgcagagattatcaactttcttatctgtctttaagaaccagtattggtctgtggacttcttttttgtgcattgttttggttgcaacagatgcaagcagccttgtgtgttatattactcgatttacagaagaggcttttgcagcccttatttgcatcatattcatctacgaggctttggagaagctctttgatttaggagaaacatatgcatttaatatgcacaacaacttagataaactgaccagctactcatgtgtatgtactgaacctccaaaccccagcaatgaaactctagcacaatggaagaaagataatataacagcacacaatatttcctggagaaatcttactgtttctgaatgtaaaaaacttcgtggtgtattcttggggtcagcttgtggtcatcatggaccttatattccagatgtgctcttttggtgtgtcatcttgtttttcacaacattttttctgtcttcattcctcaagcaatttaagaccaagcgttactttcctaccaaggtgcgatcgacaatcagtgattttgctgtatttctcacaatagtaataatggttacaattgactaccttgtaggagttccatctcctaaacttcatgttcctgaaaaatttgagcctactcatccagagagagggtggatcataagcccactgggagataatccttggtggaccttattaatagctgctattcctgctttgctttgtaccattctcatctttatggatcaacaaatcacagctgtaattataaacagaaaggaacacaaattgaagaaaggagctggctatcaccttgatttgctcatggttggcgttatgttgggagtttgctctgtcatgggacttccatggtttgtggctgcaacagtgttgtcaataagtcatgtcaacagcttaaaagttgaatctgaatgttctgctccaggggaacaacccaagtttttgggaattcgtgaacagcgggttacagggctaatgatttttattctaatgggcctctctgtgttcatgacttcagtcctaaagtttattccaatgcctgttctgtatggtgttttcctttatatgggagtttcctcattaaaaggaatccagttatttgaccgtataaaattatttggaatgcctgctaagcatcagcctgatttgatatacctccgttatgtgccgctctggaaggtccatattttcacagtcattcagcttacttgtttggtccttttatgggtgataaaagtttcagctgctgcagtggtttttcccatgatggttcttgcattagtgtttgtgcgcaaactcatggacctgtgtttcacgaagagagaacttagttggcttgatgatcttatgccagaaagtaagaaaaagaaagaagatgacaaaaagaaaaaagagaaagaggaagctgaacggatgcttcaagatgatgatgatactgtgcaccttccatttgaagggggaagtctcttgcaaattccagtcaaggccctaaaatatagtgttgatccctcaattgttaacatatcagatgaaatggccaaaactgcacagtggaaggcactttccatgaatactgagaatgccaaagtaaccagatctaacatgagtcctgataaacctgtgagtgtgaaaataagttttgaagatgaaccaagaaagaaatacgtggatgctgaaacttcattatagaattgaaccaagaggcattatacatatagatatatacatatgtaatgtgtgcgtatcatgtcactatatataagaatattgtatgtcatgctgtttatgtgtgactaccgggtttttaaaagtagtgtctggagtttgtaatgagcaccgtggagact

SEQ ID NO: 19645 - DNA, 3600 bp, Homo sapiens
  source 1..3600: mol_type = unassigned DNA
cctactaaagccagcccagcagtcgcagcgcgcacacgcacgccccgcgtctcccgcgcccggcgcccggctctccccacgcgcgcacacctcgcgcacggacgcacccacgtttgtcctcgcgcgccgggggctcggcggcggcggcaggggcagcggcagaagcaggcagaccgcgcggggcagtaccgtagcggccgtcacgggctggccggccggccatggaggctgatggggccggcgagcagatgagaccgctactcacccggggtcctgatgaagaagctgttgtggatcttggcaaaactagctcaactgtgaacaccaagtttgaaaaagaagaactagaaagtcatagagctgtatatattggtgttcacgtcccgtttagtaaagagagtcgtcggcgtcataggcatcgcggacacaaacatcaccaccggagaagaaaagataaagaatcagataaagaagatggacgggaatctccttcttatgatacaccatcccagagagttcagtttatccttggtactgaagatgatgatgaagaacatattccccatgatctcttcacggaaatggatgaactgtgttacagagatggagaagaatatgaatggaaagaaactgctagatggctgaaatttgaagaggatgttgaagatggcggtgaccgatggagtaaaccttatgtggcaactctctctttgcacagtctttttgaactaaggagttgcatcctcaatggaacagtcatgctggatatgagagcaagcactctagatgaaatagcagatatggtattagacaacatgatagcttctggccaattagacgagtccatacgagagaatgtcagagaagctcttctgaagagacatcatcatcagaatgagaaaagattcaccagtcggattcctcttgttcgatcttttgcagatataggcaagaaacattctgaccctcacttgcttgaaaggaatggtattttggcctctccccagtctgctcctggaaacttggacaatagtaaaagtggagaaattaaaggtaatggaagtggtggaagcagagaaaatagtactgttgacttcagcaaggttgatatgaatttcatgagaaaaattcctacgggtgctgaggcatccaacgtcctggtgggcgaagtagactttttggaaaggccaataattgcatttgtgagactggctcctgctgtcctccttacagggttgactgaggtccctgttccaaccaggtttttgtttttgttattgggtccagcgggcaaggcaccacagtaccatgaaattggacgatcaatagccactctcatgacagatgagattttccatgatgtagcttataaagcaaaagacagaaatgacctcttatctggaattgatgaatttttagatcaagtaactgtcctacctccaggagagtgggatccttctatacgcatagaaccaccaaaaagtgtcccttctcaggaaaagagaaagattcctgtgtttcacaatggatctacccccacactgggtgagactcctaaagaggccgctcatcatgctgggcctgagctacagaggactggacgagtgcaatagagtctctttttggagcatcattaactgggattgcctattcattgtttgctgggcaacctctaacaatattggggagcacaggtccagttctagtgtttgaaaaaattttatataaattctgcagagattatcaactttcttatctgtctttaagaaccagtattggtctgtggacttcttttttgtgcattgttttggttgcaacagatgcaagcagccttgtgtgttatattactcgatttacagaagaggcttttgcagcccttatttgcatcatattcatctacgaggctttggagaagctctttgatttaggagaaacatatgcatttaatatgcacaacaacttagataaactgaccagctactcatgtgtatgtactgaacctccaaaccccagcaatgaaactctagcacaatggaagaaagataatataacagcacacaatatttcctggagaaatcttactgtttctgaatgtaaaaaacttcgtggtgtattcttggggtcagcttgtggtcatcatggaccttatattccagatgtgctcttttggtgtgtcatcttgtttttcacaacattttttctgtcttcattcctcaagcaatttaagaccaagcgttactttcctaccaaggtgcgatcgacaatcagtgattttgctgtatttctcacaatagtaataatggttacaattgactaccttgtaggagttccatctcctaaacttcatgttcctgaaaaatttgagcctactcatccagagagagggtggatcataagcccactgggagataatccttggtggaccttattaatagctgctattcctgctttgctttgtaccattctcatctttatggatcaacaaatcacagctgtaattataaacagaaaggaacacaaattgaagaaaggagctggctatcaccttgatttgctcatggttggcgttatgttgggagtttgctctgtcatgggacttccatggtttgtggctgcaacagtgttgtcaataagtcatgtcaacagcttaaaagttgaatctgaatgttctgctccaggggaacaacccaagtttttgggaattcgtgaacagcgggttacagggctaatgatttttattctaatgggcctctctgtgttcatgacttcagtcctaaagtttattccaatgcctgttctgtatggtgttttcctttatatgggagtttcctcattaaaaggaatccagttatttgaccgtataaaattatttggaatgcctgctaagcatcagcctgatttgatatacctccgttatgtgccgctctggaaggtccatattttcacagtcattcagcttacttgtttggtccttttatgggtgataaaagtttcagctgctgcagtggtttttcccatgatggttcttgcattagtgtttgtgcgcaaactcatggacctgtgtttcacgaagagagaacttagttggcttgatgatcttatgccagaaagtaagaaaaagaaagaagatgacaaaaagaaaaaagagaaagaggaagctgaacggatgcttcaagatgatgatgatactgtgcaccttccatttgaagggggaagtctcttgcaaattccagtcaaggccctaaaatatagtgttgatccctcaattgttaacatatcagatgaaatggccaaaactgcacagtggaaggcactttccatgaatactgagaatgccaaagtaaccagatctaacatgagtcctgataaacctgtgagtgtgaaaataagttttgaagatgaaccaagaaagaaatacgtggatgctgaaacttcattatagaattgaaccaagaggcattatacatatagatatatacatatgtaatgtgtgcgtatcatgtcactatatataagaatattgtatgtcatgctgtttatgtgtgactaccgggtttttaaaagtagtgtctggagtttgtaatgagcaccgtggagact

SEQ ID NO: 19646 - DNA, 3825 bp, Homo sapiens
  source 1..3825: mol_type = unassigned DNA
cctactaaagccagcccagcagtcgcagcgcgcacacgcacgccccgcgtctcccgcgcccggcgcccggctctccccacgcgcgcacacctcgcgcacggacgcacccacgtttgtcctcgcgcgccgggggctcggcggcggcggcaggggcagcggcagaagcaggcagaccgcgcggggcagtaccgtagcggccgtcacgggctggccggccggccatggaggctgatggggccggcgagcagatgagaccgctactcacccggggtcctgatgaagaagctgttgtggatcttggcaaaactagctcaactgtgaacaccaagtttgaaaaagaagaactagaaagtcatagagctgtatatattggtgttcacgtcccgtttagtaaagagagtcgtcggcgtcataggcatcgcggacacaaacatcaccaccggagaagaaaagataaagaatcagataaagaagatggacgggaatctccttcttatgatacaccatcccagagagttcagtttatccttggtactgaagatgatgatgaagaacatattccccatgatctcttcacggaaatggatgaactgtgttacagagatggagaagaatatgaatggaaagaaactgctagatggctgaaatttgaagaggatgttgaagatggcggtgaccgatggagtaaaccttatgtggcaactctctctttgcacagtctttttgaactaaggagttgcatcctcaatggaacagtcatgctggatatgagagcaagcactctagatgaaatagcagatatggtattagacaacatgatagcttctggccaattagacgagtccatacgagagaatgtcagagaagctcttctgaagagacatcatcatcagaatgagaaaagattcaccagtcggattcctcttgttcgatcttttgcagatataggggaaggcctttcagcctcccgccactctttgcgaacaggtctgtctgcctcaaacctttccttgagaggagaatcacctttatctcttcttcttggtcatcttcttccttcttcaagagctggaacccctgcaggctcaaggtgtacaaccccagtacccacccctcaaaacagtcctccttctagccctagcatcagccgcctgacctccagaagttcccaagagagtcagcgtcaggccccagaactactggtttcacctgccagtgatgatattcccacagtagtaattcatccgcctgaggaagacttagaagcagcgctgaaaggcgaggagcagaagaatgaggaaaatgttgacttaactccaggtattttggcctctccccagtctgctcctggaaacttggacaatagtaaaagtggagaaattaaaggtaatggaagtggtggaagcagagaaaatagtactgttgacttcagcaaggttgatatgaatttcatgagaaaaattcctacgggtgctgaggcatccaacgtcctggtgggcgaagtagactttttggaaaggccaataattgcatttgtgagactggctcctgctgtcctccttacagggttgactgaggtccctgttccaaccaggtttttgtttttgttattgggtccagcgggcaaggcaccacagtaccatgaaattggacgatcaatagccactctcatgacagatgagattttccatgatgtagcttataaagcaaaagacagaaatgacctcttatctggaattgatgaatttttagatcaagtaactgtcctacctccaggagagtgggatccttctatacgcatagaaccaccaaaaagtgtcccttctcaggaaaagagaaagattcctgtgtttcacaatggatctacccccacactgggtgagactcctaaagaggccgctcatcatgctgggcctgagctacagaggactggacgagtgcaatagagtctctttttggagcatcattaactgggattgcctattcattgtttgctgggcaacctctaacaatattggggagcacaggtccagttctagtgtttgaaaaaattttatataaattctgcagagattatcaactttcttatctgtctttaagaaccagtattggtctgtggacttcttttttgtgcattgttttggttgcaacagatgcaagcagccttgtgtgttatattactcgatttacagaagaggcttttgcagcccttatttgcatcatattcatctacgaggctttggagaagctctttgatttaggagaaacatatgcatttaatatgcacaacaacttagataaactgaccagctactcatgtgtatgtactgaacctccaaaccccagcaatgaaactctagcacaatggaagaaagataatataacagcacacaatatttcctggagaaatcttactgtttctgaatgtaaaaaacttcgtggtgtattcttggggtcagcttgtggtcatcatggaccttatattccagatgtgctcttttggtgtgtcatcttgtttttcacaacattttttctgtcttcattcctcaagcaatttaagaccaagcgttactttcctaccaaggtgcgatcgacaatcagtgattttgctgtatttctcacaatagtaataatggttacaattgactaccttgtaggagttccatctcctaaacttcatgttcctgaaaaatttgagcctactcatccagagagagggtggatcataagcccactgggagataatccttggtggaccttattaatagctgctattcctgctttgctttgtaccattctcatctttatggatcaacaaatcacagctgtaattataaacagaaaggaacacaaattgaagaaaggagctggctatcaccttgatttgctcatggttggcgttatgttgggagtttgctctgtcatgggacttccatggtttgtggctgcaacagtgttgtcaataagtcatgtcaacagcttaaaagttgaatctgaatgttctgctccaggggaacaacccaagtttttgggaattcgtgaacagcgggttacagggctaatgatttttattctaatgggcctctctgtgttcatgacttcagtcctaaagtttattccaatgcctgttctgtatggtgttttcctttatatgggagtttcctcattaaaaggaatccagttatttgaccgtataaaattatttggaatgcctgctaagcatcagcctgatttgatatacctccgttatgtgccgctctggaaggtccatattttcacagtcattcagcttacttgtttggtccttttatgggtgataaaagtttcagctgctgcagtggtttttcccatgatggttcttgcattagtgtttgtgcgcaaactcatggacctgtgtttcacgaagagagaacttagttggcttgatgatcttatgccagaaagtaagaaaaagaaagaagatgacaaaaagaaaaaagagaaagaggaagctgaacggatgcttcaagatgatgatgatactgtgcaccttccatttgaagggggaagtctcttgcaaattccagtcaaggccctaaaatatagtcctgataaacctgtgagtgtgaaaataagttttgaagatgaaccaagaaagaaatacgtggatgctgaaacttcattatagaattgaaccaagaggcattatacatatagatatatacatatgtaatgtgtgcgtatcatgtcactatatataagaatattgtatgtcatgctgtttatgtgtgactaccgggtttttaaaagtagtgtctggagtttgtaatgagcaccgtggagact

SEQ ID NO: 19647 - DNA, 3667 bp, Homo sapiens
  source 1..3667: mol_type = unassigned DNA
cctactaaagccagcccagcagtcgcagcgcgcacacgcacgccccgcgtctcccgcgcccggcgcccggctctccccacgcgcgcacacctcgcgcacggacgcacccacgtttgtcctcgcgcgccgggggctcggcggcggcggcaggggcagcggcagaagcaggcagaccgcgcggggcagtaccgtagcggccgtcacgggctggccggccggccatggaggctgatggggccggcgagcagatgagaccgctactcacccggggtcctgatgaagaagctgttgtggatcttggcaaaactagctcaactgtgaacaccaagtttgaaaaagaagaactagaaagtcatagagctgtatatattggtgttcacgtcccgtttagtaaagagagtcgtcggcgtcataggcatcgcggacacaaacatcaccaccggagaagaaaagataaagaatcagataaagaagatggacgggaatctccttcttatgatacaccatcccagagagttcagtttatccttggtactgaagatgatgatgaagaacatattccccatgatctcttcacggaaatggatgaactgtgttacagagatggagaagaatatgaatggaaagaaactgctagatggctgaaatttgaagaggatgttgaagatggcggtgaccgatggagtaaaccttatgtggcaactctctctttgcacagtctttttgaactaaggagttgcatcctcaatggaacagtcatgctggatatgagagcaagcactctagatgaaatagcagatatggtattagacaacatgatagcttctggccaattagacgagtccatacgagagaatgtcagagaagctcttctgaagagacatcatcatcagaatgagaaaagattcaccagtcggattcctcttgttcgatcttttgcagatataggcaagaaacattctgaccctcacttgcttgaaaggaatggtattttggcctctccccagtctgctcctggaaacttggacaatagtaaaagtggagaaattaaaggtaatggaagtggtggaagcagagaaaatagtactgttgacttcagcaaggttgatatgaatttcatgagaaaaattcctacgggtgctgaggcatccaacgtcctggtgggcgaagtagactttttggaaaggccaataattgcatttgtgagactggctcctgctgtcctccttacagggttgactgaggtccctgttccaaccaggtttttgtttttgttattgggtccagcgggcaaggcaccacagtaccatgaaattggacgatcaatagccactctcatgacagatgagattttccatgatgtagcttataaagcaaaagacagaaatgacctcttatctggaattgatgaatttttagatcaagtaactgtcctacctccaggagagtgggatccttctatacgcatagaaccaccaaaaagtgtcccttctcaggaaaagagaaagattcctgtgtttcacaatggatctacccccacactgggtgagactcctaaagaggccgctcatcatgctgggcctgagctacagaggactggacggctttttggtggtttgatacttgacatcaaaaggaaagcaccttttttcttgagtgacttcaaggatgcattaagcctgcagtgcctggcctcgattcttttcctatactgtgcctgtatgtctcctgtaatcacttttggagggctgcttggagaagctacagaaggcagaataagtgcaatagagtctctttttggagcatcattaactgggattgcctattcattgtttgctgggcaacctctaacaatattggggagcacaggtccagttctagtgtttgaaaaaattttatataaattctgcagagattatcaactttcttatctgtctttaagaaccagtattggtctgtggacttcttttttgtgcattgttttggttgcaacagatgcaagcagccttgtgtgttatattactcgatttacagaagaggcttttgcagcccttatttgcatcatattcatctacgaggctttggagaagctctttgatttaggagaaacatatgcatttaatatgcacaacaacttagataaactgaccagctactcatgtgtatgtactgaacctccaaaccccagcaatgaaactctagcacaatggaagaaagataatataacagcacacaatatttcctggagaaatcttactgtttctgaatgtaaaaaacttcgtggtgtattcttggggtcagcttgtggtcatcatggaccttatattccagatgtgctcttttggtgtgtcatcttgtttttcacaacattttttctgtcttcattcctcaagcaatttaagaccaagcgttactttcctaccaaggtgcgatcgacaatcagtgattttgctgtatttctcacaatagtaataatggttacaattgactaccttgtaggagttccatctcctaaacttcatgttcctgaaaaatttgagcctactcatccagagagagggtggatcataagcccactgggagataatccttggtggaccttattaatagctgctattcctgctttgctttgtaccattctcatctttatggatcaacaaatcacagctgtaattataaacagaaaggaacacaaattgaagaaaggagctggctatcaccttgatttgctcatggttggcgttatgttgggagtttgctctgtcatgggacttccatggtttgtggctgcaacagtgttgtcaataagtcatgtcaacagcttaaaagttgaatctgaatgttctgctccaggggaacaacccaagtttttgggaattcgtgaacagcgggttacagggctaatgatttttattctaatgggcctctctgtgttcatgacttcagtcctaaagtttattccaatgcctgttctgtatggtgttttcctttatatgggagtttcctcattaaaaggaatccagttatttgaccgtataaaattatttggaatgcctgctaagcatcagcctgatttgatatacctccgttatgtgccgctctggaaggtccatattttcacagtcattcagcttacttgtttggtccttttatgggtgataaaagtttcagctgctgcagtggtttttcccatgatggttcttgcattagtgtttgtgcgcaaactcatggacctgtgtttcacgaagagagaacttagttggcttgatgatcttatgccagaaagtaagaaaaagaaagaagatgacaaaaagaaaaaagagaaagaggaagctgaacggatgcttcaagatgatgatgatactgtgcaccttccatttgaagggggaagtctcttgcaaattccagtcaaggccctaaaatatagtcctgataaacctgtgagtgtgaaaataagttttgaagatgaaccaagaaagaaatacgtggatgctgaaacttcattatagaattgaaccaagaggcattatacatatagatatatacatatgtaatgtgtgcgtatcatgtcactatatataagaatattgtatgtcatgctgtttatgtgtgactaccgggtttttaaaagtagtgtctggagtttgtaatgagcaccgtggagact

SEQ ID NO: 19648 - DNA, 4000 bp, Homo sapiens
  source 1..4000: mol_type = unassigned DNA
cctactaaagccagcccagcagtcgcagcgcgcacacgcacgccccgcgtctcccgcgcccggcgcccggctctccccacgcgcgcacacctcgcgcacggacgcacccacgtttgtcctcgcgcgccgggggctcggcggcggcggcaggggcagcggcagaagcaggcagaccgcgcggggcagtaccgtagcggccgtcacgggctggccggccggccatggaggctgatggggccggcgagcagatgagaccgctactcacccggggtcctgatgaagaagctgttgtggatcttggcaaaactagctcaactgtgaacaccaagtttgaaaaagaagaactagaaagtcatagagctgtatatattggtgttcacgtcccgtttagtaaagagagtcgtcggcgtcataggcatcgcggacacaaacatcaccaccggagaagaaaagataaagaatcagataaagaagatggacgggaatctccttcttatgatacaccatcccagagagttcagtttatccttggtactgaagatgatgatgaagaacatattccccatgatctcttcacggaaatggatgaactgtgttacagagatggagaagaatatgaatggaaagaaactgctagatggctgaaatttgaagaggatgttgaagatggcggtgaccgatggagtaaaccttatgtggcaactctctctttgcacagtctttttgaactaaggagttgcatcctcaatggaacagtcatgctggatatgagagcaagcactctagatgaaatagcagatatggtattagacaacatgatagcttctggccaattagacgagtccatacgagagaatgtcagagaagctcttctgaagagacatcatcatcagaatgagaaaagattcaccagtcggattcctcttgttcgatcttttgcagatataggggaaggcctttcagcctcccgccactctttgcgaacaggtctgtctgcctcaaacctttccttgagaggagaatcacctttatctcttcttcttggtcatcttcttccttcttcaagagctggaacccctgcaggctcaaggtgtacaaccccagtacccacccctcaaaacagtcctccttctagccctagcatcagccgcctgacctccagaagttcccaagagagtcagcgtcaggccccagaactactggtttcacctgccagtgatgatattcccacagtagtaattcatccgcctgaggaagacttagaagcagcgctgaaaggcgaggagcagaagaatgaggaaaatgttgacttaactccaggtattttggcctctccccagtctgctcctggaaacttggacaatagtaaaagtggagaaattaaaggtaatggaagtggtggaagcagagaaaatagtactgttgacttcagcaaggttgatatgaatttcatgagaaaaattcctacgggtgctgaggcatccaacgtcctggtgggcgaagtagactttttggaaaggccaataattgcatttgtgagactggctcctgctgtcctccttacagggttgactgaggtccctgttccaaccaggtttttgtttttgttattgggtccagcgggcaaggcaccacagtaccatgaaattggacgatcaatagccactctcatgacagatgagattttccatgatgtagcttataaagcaaaagacagaaatgacctcttatctggaattgatgaatttttagatcaagtaactgtcctacctccaggagagtgggatccttctatacgcatagaaccaccaaaaagtgtcccttctcaggaaaagagaaagattcctgtgtttcacaatggatctacccccacactgggtgagactcctaaagaggccgctcatcatgctgggcctgagctacagaggactggacggctttttggtggtttgatacttgacatcaaaaggaaagcaccttttttcttgagtgacttcaaggatgcattaagcctgcagtgcctggcctcgattcttttcctatactgtgcctgtatgtctcctgtaatcacttttggagggctgcttggagaagctacagaaggcagaataagtgcaatagagtctctttttggagcatcattaactgggattgcctattcattgtttgctgggcaacctctaacaatattggggagcacaggtccagttctagtgtttgaaaaaattttatataaattctgcagagattatcaactttcttatctgtctttaagaaccagtattggtctgtggacttcttttttgtgcattgttttggttgcaacagatgcaagcagccttgtgtgttatattactcgatttacagaagaggcttttgcagcccttatttgcatcatattcatctacgaggctttggagaagctctttgatttaggagaaacatatgcatttaatatgcacaacaacttagataaactgaccagctactcatgtgtatgtactgaacctccaaaccccagcaatgaaactctagcacaatggaagaaagataatataacagcacacaatatttcctggagaaatcttactgtttctgaatgtaaaaaacttcgtggtgtattcttggggtcagcttgtggtcatcatggaccttatattccagatgtgctcttttggtgtgtcatcttgtttttcacaacattttttctgtcttcattcctcaagcaatttaagaccaagcgttactttcctaccaaggtgcgatcgacaatcagtgattttgctgtatttctcacaatagtaataatggttacaattgactaccttgtaggagttccatctcctaaacttcatgttcctgaaaaatttgagcctactcatccagagagagggtggatcataagcccactgggagataatccttggtggaccttattaatagctgctattcctgctttgctttgtaccattctcatctttatggatcaacaaatcacagctgtaattataaacagaaaggaacacaaattgaagaaaggagctggctatcaccttgatttgctcatggttggcgttatgttgggagtttgctctgtcatgggacttccatggtttgtggctgcaacagtgttgtcaataagtcatgtcaacagcttaaaagttgaatctgaatgttctgctccaggggaacaacccaagtttttgggaattcgtgaacagcgggttacagggctaatgatttttattctaatgggcctctctgtgttcatgacttcagtcctaaagtttattccaatgcctgttctgtatggtgttttcctttatatgggagtttcctcattaaaaggaatccagttatttgaccgtataaaattatttggaatgcctgctaagcatcagcctgatttgatatacctccgttatgtgccgctctggaaggtccatattttcacagtcattcagcttacttgtttggtccttttatgggtgataaaagtttcagctgctgcagtggtttttcccatgatggttcttgcattagtgtttgtgcgcaaactcatggacctgtgtttcacgaagagagaacttagttggcttgatgatcttatgccagaaagtaagaaaaagaaagaagatgacaaaaagaaaaaagagaaagaggaagctgaacggatgcttcaagatgatgatgatactgtgcaccttccatttgaagggggaagtctcttgcaaattccagtcaaggccctaaaatatagtcctgataaacctgtgagtgtgaaaataagttttgaagatgaaccaagaaagaaatacgtggatgctgaaacttcattatagaattgaaccaagaggcattatacatatagatatatacatatgtaatgtgtgcgtatcatgtcactatatataagaatattgtatgtcatgctgtttatgtgtgactaccgggtttttaaaagtagtgtctggagtttgtaatgagcaccgtggagact

SEQ ID NO: 19649 - DNA, 3775 bp, Homo sapiens
  source 1..3775: mol_type = unassigned DNA
cctactaaagccagcccagcagtcgcagcgcgcacacgcacgccccgcgtctcccgcgcccggcgcccggctctccccacgcgcgcacacctcgcgcacggacgcacccacgtttgtcctcgcgcgccgggggctcggcggcggcggcaggggcagcggcagaagcaggcagaccgcgcggggcagtaccgtagcggccgtcacgggctggccggccggccatggaggctgatggggccggcgagcagatgagaccgctactcacccggggtcctgatgaagaagctgttgtggatcttggcaaaactagctcaactgtgaacaccaagtttgaaaaagaagaactagaaagtcatagagctgtatatattggtgttcacgtcccgtttagtaaagagagtcgtcggcgtcataggcatcgcggacacaaacatcaccaccggagaagaaaagataaagaatcagataaagaagatggacgggaatctccttcttatgatacaccatcccagagagttcagtttatccttggtactgaagatgatgatgaagaacatattccccatgatctcttcacggaaatggatgaactgtgttacagagatggagaagaatatgaatggaaagaaactgctagatggctgaaatttgaagaggatgttgaagatggcggtgaccgatggagtaaaccttatgtggcaactctctctttgcacagtctttttgaactaaggagttgcatcctcaatggaacagtcatgctggatatgagagcaagcactctagatgaaatagcagatatggtattagacaacatgatagcttctggccaattagacgagtccatacgagagaatgtcagagaagctcttctgaagagacatcatcatcagaatgagaaaagattcaccagtcggattcctcttgttcgatcttttgcagatataggcaagaaacattctgaccctcacttgcttgaaaggaatggtattttggcctctccccagtctgctcctggaaacttggacaatagtaaaagtggagaaattaaaggtaatggaagtggtggaagcagagaaaatagtactgttgacttcagcaaggttgatatgaatttcatgagaaaaattcctacgggtgctgaggcatccaacgtcctggtgggcgaagtagactttttggaaaggccaataattgcatttgtgagactggctcctgctgtcctccttacagggttgactgaggtccctgttccaaccaggtttttgtttttgttattgggtccagcgggcaaggcaccacagtaccatgaaattggacgatcaatagccactctcatgacagatgagattttccatgatgtagcttataaagcaaaagacagaaatgacctcttatctggaattgatgaatttttagatcaagtaactgtcctacctccaggagagtgggatccttctatacgcatagaaccaccaaaaagtgtcccttctcaggaaaagagaaagattcctgtgtttcacaatggatctacccccacactgggtgagactcctaaagaggccgctcatcatgctgggcctgagctacagaggactggacggctttttggtggtttgatacttgacatcaaaaggaaagcaccttttttcttgagtgacttcaaggatgcattaagcctgcagtgcctggcctcgattcttttcctatactgtgcctgtatgtctcctgtaatcacttttggagggctgcttggagaagctacagaaggcagaataagtgcaatagagtctctttttggagcatcattaactgggattgcctattcattgtttgctgggcaacctctaacaatattggggagcacaggtccagttctagtgtttgaaaaaattttatataaattctgcagagattatcaactttcttatctgtctttaagaaccagtattggtctgtggacttcttttttgtgcattgttttggttgcaacagatgcaagcagccttgtgtgttatattactcgatttacagaagaggcttttgcagcccttatttgcatcatattcatctacgaggctttggagaagctctttgatttaggagaaacatatgcatttaatatgcacaacaacttagataaactgaccagctactcatgtgtatgtactgaacctccaaaccccagcaatgaaactctagcacaatggaagaaagataatataacagcacacaatatttcctggagaaatcttactgtttctgaatgtaaaaaacttcgtggtgtattcttggggtcagcttgtggtcatcatggaccttatattccagatgtgctcttttggtgtgtcatcttgtttttcacaacattttttctgtcttcattcctcaagcaatttaagaccaagcgttactttcctaccaaggtgcgatcgacaatcagtgattttgctgtatttctcacaatagtaataatggttacaattgactaccttgtaggagttccatctcctaaacttcatgttcctgaaaaatttgagcctactcatccagagagagggtggatcataagcccactgggagataatccttggtggaccttattaatagctgctattcctgctttgctttgtaccattctcatctttatggatcaacaaatcacagctgtaattataaacagaaaggaacacaaattgaagaaaggagctggctatcaccttgatttgctcatggttggcgttatgttgggagtttgctctgtcatgggacttccatggtttgtggctgcaacagtgttgtcaataagtcatgtcaacagcttaaaagttgaatctgaatgttctgctccaggggaacaacccaagtttttgggaattcgtgaacagcgggttacagggctaatgatttttattctaatgggcctctctgtgttcatgacttcagtcctaaagtttattccaatgcctgttctgtatggtgttttcctttatatgggagtttcctcattaaaaggaatccagttatttgaccgtataaaattatttggaatgcctgctaagcatcagcctgatttgatatacctccgttatgtgccgctctggaaggtccatattttcacagtcattcagcttacttgtttggtccttttatgggtgataaaagtttcagctgctgcagtggtttttcccatgatggttcttgcattagtgtttgtgcgcaaactcatggacctgtgtttcacgaagagagaacttagttggcttgatgatcttatgccagaaagtaagaaaaagaaagaagatgacaaaaagaaaaaagagaaagaggaagctgaacggatgcttcaagatgatgatgatactgtgcaccttccatttgaagggggaagtctcttgcaaattccagtcaaggccctaaaatatagtgttgatccctcaattgttaacatatcagatgaaatggccaaaactgcacagtggaaggcactttccatgaatactgagaatgccaaagtaaccagatctaacatgagtcctgataaacctgtgagtgtgaaaataagttttgaagatgaaccaagaaagaaatacgtggatgctgaaacttcattatagaattgaaccaagaggcattatacatatagatatatacatatgtaatgtgtgcgtatcatgtcactatatataagaatattgtatgtcatgctgtttatgtgtgactaccgggtttttaaaagtagtgtctggagtttgtaatgagcaccgtggagact

SEQ ID NO: 19650 - DNA, 4061 bp, Homo sapiens
  source 1..4061: mol_type = unassigned DNA
gccggttcgctcagttctagcttcaggttccacgccgcggcctcgctctcctactaaagccagcccagcagtcgcagcgcgcacacgcacgccccgcgtctcccgcgcccggcgcccggctctccccacgcgcgcacacctcgcgcacggacgcacccacgtttgtcctcgcgcgccgggggctcggcggcggcggcaggggcagcggcagaagcaggcagaccgcgcggggcagtaccgtagcggccgtcacgggctggccggccggccatggaggctgatggggccggcgagcagatgagaccgctactcacccgggtaacgagcaggggtcctgatgaagaagctgttgtggatcttggcaaaactagctcaactgtgaacaccaagtttgaaaaagaagaactagaaagtcatagagctgtatatattggtgttcacgtcccgtttagtaaagagagtcgtcggcgtcataggcatcgcggacacaaacatcaccaccggagaagaaaagataaagaatcagataaagaagatggacgggaatctccttcttatgatacaccatcccagagagttcagtttatccttggtactgaagatgatgatgaagaacatattccccatgatctcttcacggaaatggatgaactgtgttacagagatggagaagaatatgaatggaaagaaactgctagatggctgaaatttgaagaggatgttgaagatggcggtgaccgatggagtaaaccttatgtggcaactctctctttgcacagtctttttgaactaaggagttgcatcctcaatggaacagtcatgctggatatgagagcaagcactctagatgaaatagcagatatggtattagacaacatgatagcttctggccaattagacgagtccatacgagagaatgtcagagaagctcttctgaagagacatcatcatcagaatgagaaaagattcaccagtcggattcctcttgttcgatcttttgcagatataggggaaggcctttcagcctcccgccactctttgcgaacaggtctgtctgcctcaaacctttccttgagaggagaatcacctttatctcttcttcttggtcatcttcttccttcttcaagagctggaacccctgcaggctcaaggtgtacaaccccagtacccacccctcaaaacagtcctccttctagccctagcatcagccgcctgacctccagaagttcccaagagagtcagcgtcaggccccagaactactggtttcacctgccagtgatgatattcccacagtagtaattcatccgcctgaggaagacttagaagcagcgctgaaaggcgaggagcagaagaatgaggaaaatgttgacttaactccaggtattttggcctctccccagtctgctcctggaaacttggacaatagtaaaagtggagaaattaaaggtaatggaagtggtggaagcagagaaaatagtactgttgacttcagcaaggttgatatgaatttcatgagaaaaattcctacgggtgctgaggcatccaacgtcctggtgggcgaagtagactttttggaaaggccaataattgcatttgtgagactggctcctgctgtcctccttacagggttgactgaggtccctgttccaaccaggtttttgtttttgttattgggtccagcgggcaaggcaccacagtaccatgaaattggacgatcaatagccactctcatgacagatgagattttccatgatgtagcttataaagcaaaagacagaaatgacctcttatctggaattgatgaatttttagatcaagtaactgtcctacctccaggagagtgggatccttctatacgcatagaaccaccaaaaagtgtcccttctcaggaaaagagaaagattcctgtgtttcacaatggatctacccccacactgggtgagactcctaaagaggccgctcatcatgctgggcctgagctacagaggactggacggctttttggtggtttgatacttgacatcaaaaggaaagcaccttttttcttgagtgacttcaaggatgcattaagcctgcagtgcctggcctcgattcttttcctatactgtgcctgtatgtctcctgtaatcacttttggagggctgcttggagaagctacagaaggcagaataagtgcaatagagtctctttttggagcatcattaactgggattgcctattcattgtttgctgggcaacctctaacaatattggggagcacaggtccagttctagtgtttgaaaaaattttatataaattctgcagagattatcaactttcttatctgtctttaagaaccagtattggtctgtggacttcttttttgtgcattgttttggttgcaacagatgcaagcagccttgtgtgttatattactcgatttacagaagaggcttttgcagcccttatttgcatcatattcatctacgaggctttggagaagctctttgatttaggagaaacatatgcatttaatatgcacaacaacttagataaactgaccagctactcatgtgtatgtactgaacctccaaaccccagcaatgaaactctagcacaatggaagaaagataatataacagcacacaatatttcctggagaaatcttactgtttctgaatgtaaaaaacttcgtggtgtattcttggggtcagcttgtggtcatcatggaccttatattccagatgtgctcttttggtgtgtcatcttgtttttcacaacattttttctgtcttcattcctcaagcaatttaagaccaagcgttactttcctaccaaggtgcgatcgacaatcagtgattttgctgtatttctcacaatagtaataatggttacaattgactaccttgtaggagttccatctcctaaacttcatgttcctgaaaaatttgagcctactcatccagagagagggtggatcataagcccactgggagataatccttggtggaccttattaatagctgctattcctgctttgctttgtaccattctcatctttatggatcaacaaatcacagctgtaattataaacagaaaggaacacaaattgaagaaaggagctggctatcaccttgatttgctcatggttggcgttatgttgggagtttgctctgtcatgggacttccatggtttgtggctgcaacagtgttgtcaataagtcatgtcaacagcttaaaagttgaatctgaatgttctgctccaggggaacaacccaagtttttgggaattcgtgaacagcgggttacagggctaatgatttttattctaatgggcctctctgtgttcatgacttcagtcctaaagtttattccaatgcctgttctgtatggtgttttcctttatatgggagtttcctcattaaaaggaatccagttatttgaccgtataaaattatttggaatgcctgctaagcatcagcctgatttgatatacctccgttatgtgccgctctggaaggtccatattttcacagtcattcagcttacttgtttggtccttttatgggtgataaaagtttcagctgctgcagtggtttttcccatgatggttcttgcattagtgtttgtgcgcaaactcatggacctgtgtttcacgaagagagaacttagttggcttgatgatcttatgccagaaagtaagaaaaagaaagaagatgacaaaaagaaaaaagagaaagaggaagctgaacggatgcttcaagatgatgatgatactgtgcaccttccatttgaagggggaagtctcttgcaaattccagtcaaggccctaaaatatagtcctgataaacctgtgagtgtgaaaataagttttgaagatgaaccaagaaagaaatacgtggatgctgaaacttcattatagaattgaaccaagaggcattatacatatagatatatacatatgtaatgtgtgcgtatcatgtcactatatataagaatattgtatgtcatgctgtttatgtgtgactaccgggtttttaaaagtagtgtctggagtttgtaatgagcaccgtggagact

SEQ ID NO: 19651 - DNA, 735 bp, Homo sapiens
  source 1..735: mol_type = unassigned DNA
tactcatgagttctaattgtgttcattttatttacagtttattccaatgcctgttctgtatggtgttttcctttatatgggagtttcctcattaaaaggaatccagttatttgaccgtataaaattatttggaatgcctgctaagcatcagcctgatttgatatacctccgttatgtgccgctctggaaggtccatattttcacagtcattcagcttacttgtttggtccttttatgggtgataaaagtttcagctgctgcagtggtttttcccatgatggttcttgcattagtgtttgtgcgcaaactcatggacctgtgtttcacgaagagagaacttagttggcttgatgatcttatgccagaaagtaagaaaaagaaagaagatgacaaaaagaaaaaagagaaagaggaagctgaacggatgcttcaagatgatgatgatactgtgcaccttccatttgaagggggaagtctcttgcaaattccagtcaaggccctaaaatatagtgttgatccctcaattgttaacatatcagatgaaatggccaaaactgcacagtggaaggcactttccatgaatactgagaatgccaaagtaaccagatctaacatgagtcctgataaacctgtgagtgtgaaaataagttttgaagatgaaccaagaaagaaatacgtggatgctgaaacttcattatagaattgaaccaagaggcattatacatatagatatat

SEQ ID NO: 19652 - DNA, 3407 bp, Homo sapiens
  source 1..3407: mol_type = unassigned DNA
gctctcctccttcccgctcggtccgccggttcgctcagttctagcttcaggttccacgccgcggcctcgctctcctactaaagccagcccagcagtcgcagcgcgcacacgcacgccccgcgtctcccgcgcccggcgcccggctctccccacgcgcgcacacctcgcgcacggacgcacccacgtttgtcctcgcgcgccgggggctcggcggcggcggcaggggcagcggcagaagcaggcagaccgcgcggggcagtaccgtagcggccgtcacgggctggccggccggccatggaggctgatggggccggcgagcagatgagaccgctactcacccggggtcctgatgaagaagctgttgtggatcttggcaaaactagctcaactgtgaacaccaagtttgaaaaagaagaactagaaagtcatagagctgtatatattggtgttcacgtcccgtttagtaaagagagtcgtcggcgtcataggcatcgcggacacaaacatcaccaccggagaagaaaagataaagaatcagataaagaagatggacgggaatctccttcttatgatacaccatcccagagagttcagtttatccttggtactgaagatgatgatgaagaacatattccccatgatctcttcacggaaatggatgaactgtgttacagagatggagaagaatatgaatggaaagaaactgctagatggctgaaatttgaagaggatgttgaagatggcggtgaccgatggagtaaaccttatgtggcaactctctctttgcacagtctttttgaactaaggagttgcatcctcaatggaacagtcatgctggatatgagagcaagcactctagatgaaatagcagatatggtattagacaacatgatagcttctggccaattagacgagtccatacgagagaatgtcagagaagctcttctgaagagacatcatcatcagaatgagaaaagattcaccagtcggattcctcttgttcgatcttttgcagatataggcaagaaacattctgaccctcacttgcttgaaaggaatggtattttggcctctccccagtctgctcctggaaacttggacaatagtaaaagtggagaaattaaaggtaatggaagtggtggaagcagagaaaatagtactgttgacttcagcaaggttgatatgaatttcatgagaaaaattcctacgggtgctgaggcatccaacgtcctggtgggcgaagtagactttttggaaaggccaataattgcatttgtgagactggctcctgctgtcctccttacagggttgactgaggtccctgttccaaccaggtttttgtttttgttattgggtccagcgggcaaggcaccacagtaccatgaaattggacgatcaatagccactctcatgacagatgagattttccatgatgtagcttataaagcaaaagacagaaatgacctcttatctggaattgatgaatttttagatcaagtaactgtcctacctccaggagagtgggatccttctatacgcatagaaccaccaaaaagtgtcccttctcaggaaaagagaaagattcctgtgtttcacaatggatctacccccacactgggtgagactcctaaagaggccgctcatcatgctgggcctgagctacagaggactggacgagtgcaatagagtctctttttggagcatcattaactgggattgcctattcattgtttgctgggcaacctctaacaatattggggagcacaggtccagttctagtgtttgaaaaaattttatataaattctgcagagattatcaactttcttatctgtctttaagaaccagtattggtctgtggacttcttttttgtgcattgttttggttgcaacagatgcaagcagccttgtgtgttatattactcgatttacagaagaggcttttgcagcccttatttgcatcatattcatctacgaggctttggagaagctctttgatttaggagaaacatatgcatttaatatgcacaacaacttagataaactgaccagctactcatgtgtatgtactgaacctccaaaccccagcaatgaaactctagcacaatggaagaaagataatataacagcacacaatatttcctggagaaatcttactgtttctgaatgtaaaaaacttcgtggtgtattcttggggtcagcttgtggtcatcatggaccttatattccagatgtgctcttttggtgtgtcatcttgtttttcacaacattttttctgtcttcattcctcaagcaatttaagaccaagcgttactttcctaccaaggtgcgatcgacaatcagtgattttgctgtatttctcacaatagtaataatggttacaattgactaccttgtaggagttccatctcctaaacttcatgttcctgaaaaatttgagcctactcatccagagagagggtggatcataagcccactgggagataatccttggtggaccttattaatagctgctattcctgctttgctttgtaccattctcatctttatggatcaacaaatcacagctgtaattataaacagaaaggaacacaaattgaagaaaggagctggctatcaccttgatttgctcatggttggcgttatgttgggagtttgctctgtcatgggacttccatggtttgtggctgcaacagtgttgtcaataagtcatgtcaacagcttaaaagttgaatctgaatgttctgctccaggggaacaacccaagtttttgggaattcgtgaacagcgggttacagggctaatgatttttattctaatgggcctctctgtgttcatgacttcagtcctaaagtttattccaatgcctgttctgtatggtgttttcctttatatgggagtttcctcattaaaaggaatccagttatttgaccgtataaaattatttggaatgcctgctaagcatcagcctgatttgatatacctccgttatgtgccgctctggaaggtccatattttcacagtcattcagcttacttgtttggtccttttatgggtgataaaagtttcagctgctgcagtggtttttcccatgatggttcttgcattagtgtttgtgcgcaaactcatggacctgtgtttcacgaagagagaacttagttggcttgatgatcttatgccagaaagtaagaaaaagaaagaagatgacaaaaagaaaaaagagaaagaggaagctgaacggatgcttcaagatgatgatgatactgtgcaccttccatttgaagggggaagtctcttgcaaattccagtcaaggccctaaaatatagtcctgataaacctgtgagtgtgaaaataagttttgaagatgaaccaagaaagaaatacgtggatgctgaaacttcattatag

SEQ ID NO: 19653 - DNA, 3224 bp, Homo sapiens
  source 1..3224: mol_type = unassigned DNA
ctcactgtccctggaatcttcaagggagttactgcattacatcatcagaaacaaggcatttctatattactatggaaagatttcgtctggagaagaagttacctggtcctgatgaagaagctgttgtggatcttggcaaaactagctcaactgtgaacaccaagtttgaaaaagaagaactagaaagtcatagagctgtatatattggtgttcacgtcccgtttagtaaagagagtcgtcggcgtcataggcatcgcggacacaaacatcaccaccggagaagaaaagataaagaatcagataaagaagatggacgggaatctccttcttatgatacaccatcccagagagttcagtttatccttggtactgaagatgatgatgaagaacatattccccatgatctcttcacggaaatggatgaactgtgttacagagatggagaagaatatgaatggaaagaaactgctagatggctgaaatttgaagaggatgttgaagatggcggtgaccgatggagtaaaccttatgtggcaactctctctttgcacagtctttttgaactaaggagttgcatcctcaatggaacagtcatgctggatatgagagcaagcactctagatgaaatagcagatatggtattagacaacatgatagcttctggccaattagacgagtccatacgagagaatgtcagagaagctcttctgaagagacatcatcatcagaatgagaaaagattcaccagtcggattcctcttgttcgatcttttgcagatataggcaagaaacattctgaccctcacttgcttgaaaggaatggtattttggcctctccccagtctgctcctggaaacttggacaatagtaaaagtggagaaattaaaggtaatggaagtggtggaagcagagaaaatagtactgttgacttcagcaaggagtctgcctcctggcactgtagttgtggcacactgggtgtgggactcaagaggcccgctgttgatatgaatttcatgagaaaaattcctacgggtgctgaggcatccaacgtcctggtgggcgaagtagactttttggaaaggccaataattgcatttgtgagactggctcctgctgtcctccttacagggttgactgaggtccctgttccaaccaggtttttgtttttgttattgggtccagcgggcaaggcaccacagtaccatgaaattggacgatcaatagccactctcatgacagatgagattttccatgatgtagcttataaagcaaaagacagaaatgacctcttatctggaattgatgaatttttagatcaagtaactgtcctacctccaggagagtgggatccttctatacgcatagaaccaccaaaaagtgtcccttctcaggaaaagagaaagattcctgtgtttcacaatggatctacccccacactgggtgagactcctaaagaggccgctcatcatgctgggcctgagctacagaggactggacggctttttggtggtttgatacttgacatcaaaaggaaagcaccttttttcttgagtgacttcaaggatgcattaagcctgcagtgcctggcctcgattcttttcctatactgtgcctgtatgtctcctgtaatcacttttggagggctgcttggagaagctacagaaggcagaataagtgcaatagagtctctttttggagcatcattaactgggattgcctattcattgtttgctgggcaacctctaacaatattggggagcacaggtccagttctagtgtttgaaaaaattttatataaattctgcagagattatcaactttcttatctgtctttaagaaccagtattggtctgtggacttcttttttgtgcattgttttggttgcaacagatgcaagcagccttgtgtgttatattactcgatttacagaagaggcttttgcagcccttatttgcatcatattcatctacgaggctttggagaagctctttgatttaggagaaacatatgcatttaatatgcacaacaacttagataaactgaccagctactcatgtgtatgtactgaacctccaaaccccagcaatgaaactctagcacaatggaagaaagataatataacagcacacaatatttcctggagaaatcttactgtttctgaatgtaaaaaacttcgtggtgtattcttggggtcagcttgtggtcatcatggaccttatattccagatgtgctcttttggtgtgtcatcttgtttttcacaacattttttctgtcttcattcctcaagcaatttaagaccaagcgttactttcctaccaaggtgcgatcgacaatcagtgattttgctgtatttctcacaatagtaataatggttacaattgactaccttgtaggagttccatctcctaaacttcatgttcctgaaaaatttgagcctactcatccagagagagggtggatcataagcccactgggagataatccttggtggaccttattaatagctgctattcctgctttgctttgtaccattctcatctttatggatcaacaaatcacagctgtaattataaacagaaaggaacacaaattgaagaaaggagctggctatcaccttgatttgctcatggttggcgttatgttgggagtttgctctgtcatgggacttccatggtttgtggctgcaacagtgttgtcaataagtcatgtcaacagcttaaaagttgaatctgaatgttctgctccaggggaacaacccaagtttttgggaattcgtgaacagcgggttacagggctaatgatttttattctaatgggcctctctgtgttcatgacttcagtcctaaagtttattccaatgcctgttctgtatggtgttttcctttatatgggagtttcctcattaaaaggaatccagttatttgaccgtataaaattatttggaatgcctgctaagcatcagcctgatttgatatacctccgttatgtgccgctctggaaggtccatattttcacagtcattcagcttacttgtttggtccttttatgggtgataaaagtttcagctgctgcagtggtttttcccatgatggttcttgcattagtgtttgtgcgcaaactcatggacctgtgtttcacgaagagagaacttagttggcttgatgatcttatgccagaaagtaagaaaaagaaagaagatgacaaaaagaaaaaagagaaagag

SEQ ID NO: 19654 - DNA, 770 bp, Homo sapiens
  source 1..770: mol_type = unassigned DNA
aacccaaactttattccattctgttgtttctgatgtattttccactttctagtctccatgcttctcaatgtgggaaaaaaagaagttaaaatctaccacattgtataattgatttagtaaaatgtaagcatgaaattcaggatccttaaaaatgtatcctactctaatttctcagatgtgtatgtactgaacctccaaaccccagcaatgaaactctagcacaatggaagaaagataatataacagcacacaatatttcctggagaaatcttactgtttctgaatgtaaaaaacttcgtggtgtattcttggggtcagcttgtggtcatcatggaccttatattccagatgtgctcttttggtgtgtcatcttgtttttcacaacattttttctgtcttcattcctcaagcaatttaagaccaagcgttactttcctaccaaggtaactgtgatataattttggaattctggtaatattcatatttttggtttttatttccttggtttatttcaaaacagtaatatattttttgaggttaatactccatgccaactggttaataaagaaattattcgtagtgaaaaatgtatattacgtgcctgagctcacagtaggaagatgatggtaccataagagttgctaggttagttgcgaaatgtgtttcttatatttttggaaagaattaaatataaatgtgtttcactgttaacattgtcactagttaaaagctccatttgtacgttgtagtgacaattttatcaataaaag

SEQ ID NO: 19655 - DNA, 574 bp, Homo sapiens
  source 1..574: mol_type = unassigned DNA
gtttatgataattaaaagtatattccctaagtatttttaatgataatcagactcaggtcttccatcttttgtggttcacaccaactcacgttttatttctttttgcaaaaggccacaatttttgtaaattctaattgtattattttaaatattaaaatgtatagctttggtattgcttaaaatgttgttctagttttgctggtatgttactaacaccgggcacttattttttttaaccttgcacatttgcttttataatattcataaatcatcactttcagaatgtgagcagaatcaggttgcaaagtgaattttctccttactaatttggaatttgtctttaaacataggtattttggcctctccccagtctgctcctggaaacttggacaatagtaaaagtggagaaattaaaggtaatggaagtggtggaagcagagaaaatagtactgttgacttcagcaaggttgatatgaatttcatgagaaaaattcctacgggtgctgaggcatccaacgtcctggtgggcgaagtagactttttggaaaggccaataattgcatttgtgagactg

SEQ ID NO: 19656 - DNA, 1572 bp, Homo sapiens
  source 1..1572: mol_type = unassigned DNA
gctctcctccttcccgctcggtccgccggttcgctcagttctagcttcaggttccacgccgcggcctcgctctcctactaaagccagcccagcagtcgcagcgcgcacacgcacgccccgcgtctcccgcgcccggcgcccggctctccccacgcgcgcacacctcgcgcacggacgcacccacgtttgtcctcgcgcgccgggggctcggcggcggcggcaggggcagcggcagaagcaggcagaccgcgcggggcagtaccgtagcggccgtcacgggctggccggccggccatggaggctgatggggccggcgagcagatgagaccgctactcacccggggtcctgatgaagaagctgttgtggatcttggcaaaactagctcaactgtgaacaccaagtttgaaaaagaagaactagaaagtcatagagctgtatatattggtgttcacgtcccgtttagtaaagagagtcgtcggcgtcataggcatcgcggacacaaacatcaccaccggagaagaaaagataaagaatcagataaagaagatggacgggaatctccttcttatgatacaccatcccagagagttcagtttatccttggtactgaagatgatgatgaagaacatattccccatgatctcttcacggaaatggatgaactgtgttacagagatggagaagaatatgaatggaaagaaactgctagatggctgaaatttgaagaggatgttgaagatggcggtgaccgatggagtaaaccttatgtggcaactctctctttgcacagtctttttgaactaaggagttgcatcctcaatggaacagtcatgctggatatgagagcaagcactctagatgaaatagcagatatggtattagacaacatgatagcttctggccaattagacgagtccatacgagagaatgtcagagaagctcttctgaagagacatcatcatcagaatgagaaaagattcaccagtcggattcctcttgttcgatcttttgcagatataggcaagaaacattctgaccctcacttgcttgaaaggaatggtattttggcctctccccagtctgctcctggaaacttggacaatagtaaaagtggagaaattaaaggtaatggaagtggtggaagcagagaaaatagtactgttgacttcagcaaggtaattctatcattaactgaaaattctcataattattcttactgaggaaataagtagtaatttgtggctaatattattaacattgatgatagtaattttttagtagactggtgcttacaaacctgcatgtgatgtctgtgatatgttaatttaaggtaaaaactgtgagaagggttacagttaacctgtgagtacttgaataactttacaccattactagtgttagaaattctgaaaaagaatatgtgaataatacgatatttccatccatacctacccatagatatcgtgaaacgtcagtactttttgaactacagtcatttgttctggagctaccaccactagaacgttaattctgggagtgatgttacagcactaatgattcagtctttcctg

SEQ ID NO: 19657 - DNA, 7970 bp, Homo sapiens
  source 1..7970: mol_type = unassigned DNA
gctctcctccttcccgctcggtccgccggttcgctcagttctagcttcaggttccacgccgcggcctcgctctcctactaaagccagcccagcagtcgcagcgcgcacacgcacgccccgcgtctcccgcgcccggcgcccggctctccccacgcgcgcacacctcgcgcacggacgcacccacgtttgtcctcgcgcgccgggggctcggcggcggcggcaggggcagcggcagaagcaggcagaccgcgcggggcagtaccgtagcggccgtcacgggctggccggccggccatggaggctgatggggccggcgagcagatgagaccgctactcacccggggtcctgatgaagaagctgttgtggatcttggcaaaactagctcaactgtgaacaccaagtttgaaaaagaagaactagaaagtcatagagctgtatatattggtgttcacgtcccgtttagtaaagagagtcgtcggcgtcataggcatcgcggacacaaacatcaccaccggagaagaaaagataaagaatcagataaagaagatggacgggaatctccttcttatgatacaccatcccagagagttcagtttatccttggtactgaagatgatgatgaagaacatattccccatgatctcttcacggaaatggatgaactgtgttacagagatggagaagaatatgaatggaaagaaactgctagatggctgaaatttgaagaggatgttgaagatggcggtgaccgatggagtaaaccttatgtggcaactctctctttgcacagtctttttgaactaaggagttgcatcctcaatggaacagtcatgctggatatgagagcaagcactctagatgaaatagcagatatggtattagacaacatgatagcttctggccaattagacgagtccatacgagagaatgtcagagaagctcttctgaagagacatcatcatcagaatgagaaaagattcaccagtcggattcctcttctcgtgaggattacagtgaggactagggaaggcctttcagcctcccgccactctttgcgaacaggtctgtctgcctcaaacctttccttgagaggagaatcacctttatctcttcttcttggtcatcttcttccttcttcaagagctggaacccctgcaggctcaaggtgtacaaccccagtacccacccctcaaaacagtcctccttctagccctagcatcagccgcctgacctccagaagttcccaagagagtcagcgtcaggccccagaactactggtttcacctgccagtgatgatattcccacagtagtaattcatccgcctgaggaagacttagaagcagcgctgaaaggcgaggagcagaagaatgaggaaaatagcagggatttgaactcaggtattttggcctctccccagtctgctcctggaaacttggacaatagtaaaagtggagaaattaaaggtaatggaagtggtggaagcagagaaaatagtactgttgacttcagcaaggttgatatgaatttcatgagaaaaattcctacgggtgctgaggcatccaacgtcctggtgggcgaagtagactttttggaaaggccaataattgcatttgtgagactggctcctgctgtcctccttacagggttgactgaggtccctgttccaaccaggtttttgtttttgttattgggtccagcgggcaaggcaccacagtaccatgaaattggacgatcaatagccactctcatgacagatgagattttccatgatgtagcttataaagcaaaagacagaaatgacctcttatctggaattgatgaatttttagatcaagtaactgtcctacctccaggagagtgggatccttctatacgcatagaaccaccaaaaagtgtcccttctcaggaaaagagaaagattcctgtgtttcacaatggatctacccccacactgggtgagactcctaaagaggccgctcatcatgctgggcctgagctacagaggactggacggctttttggtggtttgatacttgacatcaaaaggaaagcaccttttttcttgagtgacttcaaggatgcattaagcctgcagtgcctggcctcgattcttttcctatactgtgcctgtatgtctcctgtaatcacttttggagggctgcttggagaagctacagaaggcagaataagtgcaatagagtctctttttggagcatcattaactgggattgcctattcattgtttgctgggcaacctctaacaatattggggagcacaggtccagttctagtgtttgaaaaaattttatataaattctgcagagattatcaactttcttatctgtctttaagaaccagtattggtctgtggacttcttttttgtgcattgttttggttgcaacagatgcaagcagccttgtgtgttatattactcgatttacagaagaggcttttgcagcccttatttgcatcatattcatctacgaggctttggagaagctctttgatttaggagaaacatatgcatttaatatgcacaacaacttagataaactgaccagctactcatgtgtatgtactgaacctccaaaccccagcaatgaaactctagcacaatggaagaaagataatataacagcacacaatatttcctggagaaatcttactgtttctgaatgtaaaaaacttcgtggtgtattcttggggtcagcttgtggtcatcatggaccttatattccagatgtgctcttttggtgtgtcatcttgtttttcacaacattttttctgtcttcattcctcaagcaatttaagaccaagcgttactttcctaccaaggtgcgatcgacaatcagtgattttgctgtatttctcacaatagtaataatggttacaattgactaccttgtaggagttccatctcctaaacttcatgttcctgaaaaatttgagcctactcatccagagagagggtggatcataagcccactgggagataatccttggtggaccttattaatagctgctattcctgctttgctttgtaccattctcatctttatggatcaacaaatcacagctgtaattataaacagaaaggaacacaaattgaagaaaggagctggctatcaccttgatttgctcatggttggcgttatgttgggagtttgctctgtcatgggacttccatggtttgtggctgcaacagtgttgtcaataagtcatgtcaacagcttaaaagttgaatctgaatgttctgctccaggggaacaacccaagtttttgggaattcgtgaacagcgggttacagggctaatgatttttattctaatgggcctctctgtgttcatgacttcagtcctaaagtttattccaatgcctgttctgtatggtgttttcctttatatgggagtttcctcattaaaaggaatccaggcaatgttatttgaccgtataaaattatttggaatgcctgctaagcatcagcctgatttgatatacctccgttatgtgccgctctggaaggtccatattttcacagtcattcagcttacttgtttggtccttttatgggtgataaaagtttcagctgctgcagtggtttttcccatgatggttcttgcattagtgtttgtgcgcaaactcatggacctgtgtttcacgaagagagaacttagttggcttgatgatcttatgccagaaagtaagaaaaagaaagaagatgacaaaaagaaaaaagagaaagaggaagctgaacggatgcttcaagatgatgatgatactgtgcaccttccatttgaagggggaagtctcttgcaaattccagtcaaggccctaaaatatagtcctgataaacctgtgagtgtgaaaataagttttgaagatgaaccaagaaagaaatacgtggatgctgaaacttcattatagaattgaaccaagaggcattatacatatagatatatacatatgtaatgtgtgcgtatcatgtcactatatataagaatattgtatgtcatgctgtttatgtgtgactaccgggtttttaaaagtagtgtctggagtttgtaatgagcaccgtggagactatgtatttaatgaaatgctctctttgaagtgaggtacatggttcttaactattcaaatatttattctgttagaaaaaaaaattttctgttttgcaatagaaggatgtggagaaatgctttcagtctacttttcttaaatctctgttcatcagtggcaattcgtaaaaaccttaagtgatactttgtttatatgtttataatttttaggtgtttcctgaaattttcacatattatttcacttttgttagtgctttatgggaagaatagggagtctataccagtgctgtgggaaaaatggtaacatttcagggcttctctatttgtgtttcatttctgtagatgtccatcgtgtttcactaactggcgttttcttagccatagagatgactgtagaacaatagaaactttaataatgatagtttttaacttttatgtttaaattttttttaaatcttaaaaccttcatatctaggtatccattgtgacagacaagtaaaattgcaggtgatttgataattaagcacccataccatttataacttctgaatttaaaaagttatacaatgccagtttgcaatagttgattttgatgcctttgtagaatattttttctgaatccttatgctcttttaaagccaatgattcccactctgttctctgccttgtctctctttgtcttaaaatgctttagtttccatcaggttcaagttcttgactattattctcttataagtagtaggcgtaaataatcaggagttagaattctctcagaagggtctatgatcagtattactttattaagaattacctttcattttctctttatgttattctttcacttttgtagattacatttaatagcttgttacctgtgattttattttaaaatatttattttgatatgatgcttaaatattatataaacatttggaaaagtaacaaatagagtaaattgttaatgtaaatagttggtgcttactttcatttatgtttattatcttaaagcaattgatagattttacatctttgatataaagcactgccatatttatattttaaaaggaaattagacattttatatgtagctcagattaatgacatttttattttgtgtattagtttttgcttttctgagctttttaaagtctaacaaatctttttagtcatcttttatatacttttagttccacatgaaataaatgttgttaagcctgtaggactggatgaatggggttgtgaaactgatttgacaagagaataatttacaaaaatcaaatgagtattgagaagccacagaaatatcaaaaatggtgacatcactattaggatgaaaattttatgaaattccaatgctccctttaaccatataattaaattacaaaggtatacataattaatctaataaaggatcatgaggaatgccaaaagctgaaattttagcaagtctggtgttttaaattcattataaactatttattaactaatgtaatgtcctcctctaagaccatattgtaagagtcttgttaaaatgatggattcaacttctgcctcggatgagaggttggaaatgtagctgcttttctttagaaaatatgtagctgtcatcatttggtactgcctaaaaagagttagactctattggcaattgatagagtattacccacggtgcttattattgtttatgagcttccattgtaatgattcctttttatttgtagcagcataattatttccaaagaccccagtatttgctgctatttttaaaactcccctgatgtacctgaacaagaggatttcctcacatcatttccttgtgtctggacatcaggggtaacaactgtacttactttacaggaagaaattttaaaactgaaaactacctgggatcatagtgtttctgtgattttatttaattgtgtatagtaattatccagtgccagaaaaaccgtcacttgcaaaatactttgcactcaaaatgtttttacaatgcttctaaatgttactggtttctgctttcttttgactacttgactgacaaaatgatctgactactccatttaagagcaaaggtaactcatgtttaggtaattaactgcttgttttaagtgattatatttcttccactgtttttgaaaaataatcaaagatagcattcattgagagacagtgacagatataatttactacatatattgatttttaaataaagttgccttaaataagtgtatgtaagcagtagtagttgctatgtactgatttacctcaaggtgcaaaataattaaacctgtacatattccatttacaaaataaattcagccctgcactttctttagatgccttgatttccagaatggagcttagtgctactgaataccctggccacagagccacctcaggatattcttttctccaccctagtttatttatttatagatatctgtttacaaagtctgtagtaaatcctgatgctgaccatctgaaatgtactttttttctgaatgctgtttcaatctaaaatagcagcttttgagaaaacaatgatgtaaattccttatgataaaaggatgattctatatattctttaatgatattaaatatgccgaagccaagcacacagtctttctaaagtgtgtgtatgtttgtgtgaatgtgaatgatactgatcttatatctgttaaaagttgttttaaaaagctgtggcatcccattgttcatatttgccaagtcttctgtaaagatgtctaggacgaaatattttatgtgctaatgcatgtatttgtaaaccagatttgtttaccactcaaaattaacttgttttcttcatccaaaaaagtttatttcttccacgtacttaaattttctgtgtgggtataatatagctttctaatttttttctttcacaaaggcaggttcaaaattctgttgaaagaaaaatgctttctgaaactgaggtataacaccagagcttgctgtttaaaggattatatgatgtacatcagttctataaatgtgctcagcagtttaacatgtgaatcctgttttaaagtgctcagatttcaactgtgtaagccattgatataacgctgtaattaaaaatgtttatatgaaataacttaatgttttaaatttatttatgtagatcacatcatttttatcgtatgcagtgcaaatatgtgaaatgtcttttggtttattccaacaattatttattttagaaagtaagtttaaagactttaaggacattcaaagtttaaaatagtgttcaaattgcaaaatttggcaatcttcatataaattggtttcttttctaacttttcaaaaactaacattaaatgtcaattataggaaaacatagttggaaatgtaatcatccaaagatcatttttaaaatgaaatttaattagcacatattgaacatttgacttaattgttaaaccccagttttgttttgtttttttaatcagatttttgcacactgattagtttttgtgttgtggcttttgttgctttattattcaaggttttttttttttttcttccccatgggggagattgtcttccaatgtttaactacgtttaaataaataaaaattgaattttattgttcatttatataaaatctgataccttgatgtaatttcacaatacagttccaatttttatggcttttataattacaatgatattttcttctataataaaatccaaagtaaacatttaaattgtagaactgatatttttcatttatatgaagtataagcctctactgggtctatattgtgaatcatcctgcctttcaaatttgtttcataattgttagatgaaaactatttttttggagatgttactgaagttgattgagcaataaaagtctacttaattagt

SEQ ID NO: 19658 - DNA, 2745 bp, Homo sapiens
  source 1..2745: mol_type = unassigned DNA
ggttgctgttcctgttgctgccactgcggtgagggctgtggctggacgtccctcctggcactttgcctctgtcccctccatccgccgccagcatttttcctcccctccccttcctccagctcgtcccaagcctgcctgtccccagcgtggaggcgggacagtggaagactgggtgagtgaagcaggatggtgccttgggctccagcgtctccccaacccctccatgccatgggtccccacgcaggtgaggaccctggtggaggacggtgtgggcagagcgtgggacatgtcaccttccccacctgctcagagttcaagggtcctgggctgggccccgttctctcttctgccctggggagatcattcacgcttcctttaatccccgctgcagctgaggctggagtttggagtttgacccgcttggaggctctctcagcagcgggcatataggaggaagggtcactgctgtctccggaagctcttggctgcaaagagagaggatcccgggtatctccctccttacaaccaccgccacctcctagtgccttagaagccactgacagcccccagggcaggtgagccctgcatctggaataaggatccagaggtctcgttcaggaccatggagagcggcaccagcagccctcagcctccacagttagatcccctggatgcgtttccccagaagggcttggagcctggggacatcgcggtgctagttctgtacttcctctttgtcctggctgttggactatggtccacagtgaagaccaaaagagacacagtgaaaggctacttcctggctggaggggacatggtgtggtggccagtgggtgcatccttgtttgccagcaatgttggaagtggacatttcattggcctggcagggtcaggtgctgctacgggcatttctgtatcagcttatgaacttaatggcttgttttctgtgctgatgttggcctggatcttcctacccatctacattgctggtcaggtcaccacgatgccagaatacctacggaagcgcttcggtggcatcagaatccccatcatcctggctgtactctacctatttatctacatcttcaccaagatctcggtagacatgtatgcaggtgccatcttcatccagcagtctttgcacctggatctgtacctggccatagttgggctactggccatcactgctgtatacacggttgctggtggcctggctgctgtgatctacacggatgccctgcagacgctgatcatgcttataggagcgctcaccttgatgggctacagtttcgccgcggttggtgggatggaaggactgaaggagaagtacttcttggccctggctagcaaccggagtgagaacagcagctgcgggctgccccgggaagatgccttccatattttccgagatccgctgacatctgatctcccgtggccgggggtcctatttggaatgtccatcccatccctctggtactggtgcacggatcaggtgattgtccagcggactctggctgccaagaacctgtcccatgccaaaggaggtgctctgatggctgcatacctgaaggtgctgcccctcttcataatggtgttccctgggatggtcagccgcatcctcttcccagatcaagtggcctgtgcagatccagagatctgccagaagatctgcagcaacccctcaggctgttcggacatcgcgtatcccaaactcgtgctggaactcctgcccacagggctccgtgggctgatgatggctgtgatggtggcggctctcatgtcctccctcacctccatctttaacagtgccagcaccatcttcaccatggacctctggaatcacctccggcctcgggcatctgagaaggagctcatgattgtgggcagggtgtttgtgctgctgctggtcctggtctccatcctctggatccctgtggtccaggccagccagggcggccagctcttcatctatatccagtccatcagctcctacctgcagccgcctgtggcggtggtcttcatcatgggatgtttctggaagaggaccaatgaaaagggtgccttctggggcctgatctcgggcctgctcctgggcttggttaggctggtcctggactttatttacgtgcagcctcgatgcgaccagccagatgagcgcccggtcctggtgaagagcattcactacctctacttctccatgatcctgtccacggtcaccctcatcactgtctccaccgtgagctggttcacagagccaccctccaaggagatggtcagccacctgacctggtttactcgtcacgaccccgtggtccagaaggaacaagcaccaccagcagctcccttgtctcttaccctctctcagaacgggatgccagaggccagcagcagcagcagcgtccagttcgagatggttcaagaaaacacgtctaaaacccacagctgtgacatgaccccaaagcagtccaaagtggtgaaggccatcctgtggctctgtggaatacaggagaagggcaaggaagagctcccggccagagcagaagccatcatagtttccctggaagaaaaccccttggtgaagaccctcctggacgtcaacctcattttctgcgtgagctgcgccatctttatctggggctattttgcttagtgtggggtgaacccaggggtccaaactctgtttctcttcagtgctccatttttttaatgaaagaaaaaataataaagcttttgtttaccacaagg

SEQ ID NO: 19659 - DNA, 2703 bp, Homo sapiens
  source 1..2703: mol_type = unassigned DNA
actgcggtgagggctgtggctggacgtccctcctggcactttgcctctgtcccctccatccgccgccagcatttttcctcccctccccttcctccagctcgtcccaagcctgcctgtccccagcgtggaggcgggacagtggaagactggctgaggctggagtttggagtttgacccgcttggaggctctctcagcagcgggcatataggaggaagggtcactgctgtctccggaagctcttggctgcaaagagagaggatcccgggtatctccctccttacaaccaccgccacctcctagtgccttagaagccactgacagcccccagggcaggtgagccctgcatctggaataaggatccagaggtctcgttcaggaccatggagagcggcaccagcagccctcagcctccacagttagatcccctggatgcgtttccccagaagggcttggagcctggggacatcgcggtgctagttctgtacttcctctttgtcctggctgttggactatgggtgggatctccctctgttgctcagggtactagaacgcagtggtggcaatcatagctcactccggcctcgacttcttgggctcaagtgatcctctcacctcggctgccagacacagaggaggtactatctacgaggaacaggctctcaccagacaccaaacctctcggtgccttgatattgaacttccaagtctccagaatttccacagtgaagaccaaaagagacacagtgaaaggctacttcctggctggaggggacatggtgtggtggccagtgggtgcatccttgtttgccagcaatgttggaagtggacatttcattggcctggcagggtcaggtgctgctacgggcatttctgtatcagcttatgaacttaatggcttgttttctgtgctgatgttggcctggatcttcctacccatctacattgctggtcaggtcaccacgatgccagaatacctacggaagcgcttcggtggcatcagaatccccatcatcctggctgtactctacctatttatctacatcttcaccaagatctcggtagacatgtatgcaggtgccatcttcatccagcagtctttgcacctggatctgtacctggccatagttgggctactggccatcactgctgtatacacggttgctggtggcctggctgctgtgatctacacggatgccctgcagacgctgatcatgcttataggagcgctcaccttgatgggctacagtttcgccgcggttggtgggatggaaggactgaaggagaagtacttcttggccctggctagcaaccggagtgagaacagcagctgcgggctgccccgggaagatgccttccatattttccgagatccgctgacatctgatctcccgtggccgggggtcctatttggaatgtccatcccatccctctggtactggtgcacggatcaggtgattgtccagcggactctggctgccaagaacctgtcccatgccaaaggaggtgctctgatggctgcatacctgaaggtgctgcccctcttcataatggtgttccctgggatggtcagccgcatcctcttcccagatcaagtggcctgtgcagatccagagatctgccagaagatctgcagcaacccctcaggctgttcggacatcgcgtatcccaaactcgtgctggaactcctgcccacagggctccgtgggctgatgatggctgtgatggtggcggctctcatgtcctccctcacctccatctttaacagtgccagcaccatcttcaccatggacctctggaatcacctccggcctcgggcatctgagaaggagctcatgattgtgggcagggtgtttgtgctgctgctggtcctggtctccatcctctggatccctgtggtccaggccagccagggcggccagctcttcatctatatccagtccatcagctcctacctgcagccgcctgtggcggtggtcttcatcatgggatgtttctggaagaggaccaatgaaaagggtgccttctggggcctgatctcgggcctgctcctgggcttggttaggctggtcctggactttatttacgtgcagcctcgatgcgaccagccagatgagcgcccggtcctggtgaagagcattcactacctctacttctccatgatcctgtccacggtcaccctcatcactgtctccaccgtgagctggttcacagagccaccctccaaggagatggtcagccacctgacctggtttactcgtcacgaccccgtggtccagaaggaacaagcaccaccagcagctcccttgtctcttaccctctctcagaacgggatgccagaggccagcagcagcagcagcgtccagttcgagatggttcaagaaaacacgtctaaaacccacagctgtgacatgaccccaaagcagtccaaagtggtgaaggccatcctgtggctctgtggaatacaggagaagggcaaggaagagctcccggccagagcagaagccatcatagtttccctggaagaaaaccccttggtgaagaccctcctggacgtcaacctcattttctgcgtgagctgcgccatctttatctggggctattttgcttagtgtggggtgaacccaggggtccaaactctgtttctcttcagtgctccatttttttaatgaaagaaaaaataataaagcttttgtttaccacaa

SEQ ID NO: 19660 - DNA, 577 bp, Homo sapiens
  source 1..577: mol_type = unassigned DNA
agctcgtcccaagcctgcctgtccccagcgtggaggcgggacagtggaagactggctgaggctggagtttggagtttgacccgcttggaggctctctcagcagcgggcatataggaggaagggtcactgctgtctccggaagctcttggctgcaaagagagaggatcccgggtatctccctccttacaaccaccgccacctcctagtgccttagaagccactgacagcccccagggcaggtgagccctgcatctggaataaggtaagacaccccctgcccccaaacaggtagccactctccaaactgggaagttggtctggggacaggtgctggcagaaggactccagctgtcacctgtggggcaggggaagctcagccctctctgcagagaaagcttgtcatacaccaggacaatggagtgtgtttgtggggtgggcatggtggtatgaagccagcagccggcagccagcagcaccgtacgtgggtcccagctcttccacttaaccaaggtcagggacattgagccaaacattttgcctcaccgagtctcaggttccttatctgtcaaatgggaat

SEQ ID NO: 19661 - DNA, 2214 bp, Homo sapiens
  source 1..2214: mol_type = unassigned DNA
ggaggcgggacagtggaagactggctgaggctggagtttggagtttgacccgcttggaggctctctcagcagcgggcatataggaggaagggtcactgctgtctccggaagctcttggctgcaaagagagaggatcccgggtatctccctccttacaaccaccgccacctcctagtgccttagaagccactgacagcccccagggcaggtgagccctgcatctggaataagtccacagtgaagaccaaaagagacacagtgaaaggctacttcctggctggaggggacatggtgtggtggccagtgggtgcatccttgtttgccagcaatgttggaagtggacatttcattggcctggcagggtcaggtgctgctacgggcatttctgtatcagcttatgaacttaatggcttgttttctgtgctgatgttggcctggatcttcctacccatctacattgctggtcaggtcaccacgatgccagaatacctacggaagcgcttcggtggcatcagaatccccatcatcctggctgtactctacctatttatctacatcttcaccaagatctcggtagacatgtatgcaggtgccatcttcatccagcagtctttgcacctggatctgtacctggccatagttgggctactggccatcactgctgtatacacggttgctggtggcctggctgctgtgatctacacggatgccctgcagacgctgatcatgcttataggagcgctcaccttgatgggctacagtttcgccgcggttggtgggatggaaggactgaaggagaagtacttcttggccctggctagcaaccggagtgagaacagcagctgcgggctgccccgggaagatgccttccatattttccgagatccgctgacatctgatctcccgtggccgggggtcctatttggaatgtccatcccatccctctggtactggtgcacggatcaggtgattgtccagcggactctggctgccaagaacctgtcccatgccaaaggaggtgctctgatggctgcatacctgaaggtgctgcccctcttcataatggtgttccctgggatggtcagccgcatcctcttcccagatcaagtggcctgtgcagatccagagatctgccagaagatctgcagcaacccctcaggctgttcggacatcgcgtatcccaaactcgtgctggaactcctgcccacagggctccgtgggctgatgatggctgtgatggtggcggctctcatgtcctccctcacctccatctttaacagtgccagcaccatcttcaccatggacctctggaatcacctccggcctcgggcatctgagaaggagctcatgattgtgggcagggtgtttgtgctgctgctggtcctggtctccatcctctggatccctgtggtccaggccagccagggcggccagctcttcatctatatccagtccatcagctcctacctgcagccgcctgtggcggtggtcttcatcatgggatgtttctggaagaggaccaatgaaaagggtgccttctggggcctgatctcgggcctgctcctgggcttggttaggctggtcctggactttatttacgtgcagcctcgatgcgaccagccagatgagcgcccggtcctggtgaagagcattcactacctctacttctccatgatcctgtccacggtcaccctcatcactgtctccaccgtgagctggttcacagagccaccctccaaggagatggtcagccacctgacctggtttactcgtcacgaccccgtggtccagaaggaacaagcaccaccagcagctcccttgtctcttaccctctctcagaacgggatgccagaggccagcagcagcagcagcgtccagttcgagatggttcaagaaaacacgtctaaaacccacagctgtgacatgaccccaaagcagtccaaagtggtgaaggccatcctgtggctctgtggaatacaggagaagggcaaggaagagctcccggccagagcagaagccatcatagtttccctggaagaaaaccccttggtgaagaccctcctggacgtcaacctcattttctgcgtgagctgcgccatctttatctggggctattttgcttagtgtggggtgaacccaggggtccaaactctgtttctcttcagtgctccatttttttaatgaaagaaaaaataataaagcttttgtttacca

SEQ ID NO: 19662 - DNA, 591 bp, Homo sapiens
  source 1..591: mol_type = unassigned DNA
acagtggaagactgggtgagtgaagcaggatggtgccttgggctccagcgtctccccaacccctccatgccatgggtccccacgcagctgaggctggagtttggagtttgacccgcttggaggctctctcagcagcgggcatataggaggaagggtcactgctgtctccggaagctcttggctgcaaagagagaggatcccgggtatctccctccttacaaccaccgccacctcctagtgccttagaagccactgacagcccccagggcaggtgagccctgcatctggaataaggatccagaggtctcgttcaggaccatggagagcggcaccagcagccctcagcctccacagttagatcccctggatgcgtttccccagaagggcttggagcctggggacatcgcggtgctagttctgtacttcctctttgtcctggctgttggactatggtccacagtgaagaccaaaagagacacagtgaaaggctacttcctggctggaggggacatggtgtggtggccagtgggtgcatccttgtttgccagcaatgttggaagtggacatttcattggcctggcagggtcaggt

SEQ ID NO: 19663 - DNA, 2139 bp, Homo sapiens
  source 1..2139: mol_type = unassigned DNA
gctgaggctggagtttggagtttgacccgcttggaggctctctcagcagcgggcatataggaggaagggtcactgctgtctccggaagctcttggctgcaaagagagaggatcccgggtatctccctccttacaaccaccgccacctcctagtgccttagaagccactgacagcccccagggcaggtgagccctgcatctggaataaggatccagaggtctcgttcaggaccatggagagcggcaccagcagccctcagcctccacagttagatcccctggatgcgtttccccagaagggcttggagcctggggacatcgcggtgctagttctgtacttcctctttgtcctggctgttggactatggtccacagtgaagaccaaaagagacacagtgaaaggctacttcctggctggaggggacatggtgtggtggccaggcttgttttctgtgctgatgttggcctggatcttcctacccatctacattgctggtcaggtagacatgtatgcaggtgccatcttcatccagcagtctttgcacctggatctgtacctggccatagttgggctactggccatcactgctgtatacacggttgctggtggcctggctgctgtgatctacacggatgccctgcagacgctgatcatgcttataggagcgctcaccttgatgggctacagtttcgccgcggttggtgggatggaaggactgaaggagaagtacttcttggccctggctagcaaccggagtgagaacagcagctgcgggctgccccgggaagatgccttccatattttccgagatccgctgacatctgatctcccgtggccgggggtcctatttggaatgtccatcccatccctctggtactggtgcacggatcaggtgattgtccagcggactctggctgccaagaacctgtcccatgccaaaggaggtgctctgatggctgcatacctgaaggtgctgcccctcttcataatggtgttccctgggatggtcagccgcatcctcttcccagatcaagtggcctgtgcagatccagagatctgccagaagatctgcagcaacccctcaggctgttcggacatcgcgtatcccaaactcgtgctggaactcctgcccacagggctccgtgggctgatgatggctgtgatggtggcggctctcatgtcctccctcacctccatctttaacagtgccagcaccatcttcaccatggacctctggaatcacctccggcctcgggcatctgagaaggagctcatgattgtgggcagggtgtttgtgctgctgctggtcctggtctccatcctctggatccctgtggtccaggccagccagggcggccagctcttcatctatatccagtccatcagctcctacctgcagccgcctgtggcggtggtcttcatcatgggatgtttctggaagaggaccaatgaaaagggtgccttctggggcctgatctcgggcctgctcctgggcttggttaggctggtcctggactttatttacgtgcagcctcgatgcgaccagccagatgagcgcccggtcctggtgaagagcattcactacctctacttctccatgatcctgtccacggtcaccctcatcactgtctccaccgtgagctggttcacagagccaccctccaaggagatggtcagccacctgacctggtttactcgtcacgaccccgtggtccagaaggaacaagcaccaccagcagctcccttgtctcttaccctctctcagaacgggatgccagaggccagcagcagcagcagcgtccagttcgagatggttcaagaaaacacgtctaaaacccacagctgtgacatgaccccaaagcagtccaaagtggtgaaggccatcctgtggctctgtggaatacaggagaagggcaaggaagagctcccggccagagcagaagccatcatagtttccctggaagaaaaccccttggtgaagaccctcctggacgtcaacctcattttctgcgtgagctgcgccatctttatctggggctattttgcttagtgtggggtgaacccaggggtccaaactctgtttctcttcagtgctccatttttttaatgaaagaaaaaataataaagcttttgtttacc

SEQ ID NO: 19664 - DNA, 2246 bp, Homo sapiens
  source 1..2246: mol_type = unassigned DNA
gctgaggctggagtttggagtttgacccgcttggaggctctctcagcagcgggcatataggaggaagggtcactgctgtctccggaagctcttggctgcaaagagagaggatcccgggtatctccctccttacaaccaccgccacctcctagtgccttagaagccactgacagcccccagggcaggtgagccctgcatctggaataaggatccagaggtctcgttcaggaccatggagagcggcaccagcagccctcagcctccacagttagatcccctggatgcgtttccccagaagggcttggagcctggggacatcgcggtgctagttctgtacttcctctttgtcctggctgttggactatggtccacagtgaagaccaaaagagacacagtgaaaggctacttcctggctggaggggacatggtgtggtggccagtgggtgcatccttgtttgccagcaatgttggaagtggacatttcattggcctggcagggtcaggtgctgctacgggcatttctgtatcagcttatgaacttaatggcttgttttctgtgctgatgttggcctggatcttcctacccatctacattgctggtcaggtagacatgtatgcaggtgccatcttcatccagcagtctttgcacctggatctgtacctggccatagttgggctactggccatcactgctgtatacacggttgctggtggcctggctgctgtgatctacacggatgccctgcagacgctgatcatgcttataggagcgctcaccttgatgggctacagtttcgccgcggttggtgggatggaaggactgaaggagaagtacttcttggccctggctagcaaccggagtgagaacagcagctgcgggctgccccgggaagatgccttccatattttccgagatccgctgacatctgatctcccgtggccgggggtcctatttggaatgtccatcccatccctctggtactggtgcacggatcaggtgattgtccagcggactctggctgccaagaacctgtcccatgccaaaggaggtgctctgatggctgcatacctgaaggtgctgcccctcttcataatggtgttccctgggatggtcagccgcatcctcttcccagatcaagtggcctgtgcagatccagagatctgccagaagatctgcagcaacccctcaggctgttcggacatcgcgtatcccaaactcgtgctggaactcctgcccacagggctccgtgggctgatgatggctgtgatggtggcggctctcatgtcctccctcacctccatctttaacagtgccagcaccatcttcaccatggacctctggaatcacctccggcctcgggcatctgagaaggagctcatgattgtgggcagggtgtttgtgctgctgctggtcctggtctccatcctctggatccctgtggtccaggccagccagggcggccagctcttcatctatatccagtccatcagctcctacctgcagccgcctgtggcggtggtcttcatcatgggatgtttctggaagaggaccaatgaaaagggtgccttctggggcctgatctcgggcctgctcctgggcttggttaggctggtcctggactttatttacgtgcagcctcgatgcgaccagccagatgagcgcccggtcctggtgaagagcattcactacctctacttctccatgatcctgtccacggtcaccctcatcactgtctccaccgtgagctggttcacagagccaccctccaaggagatggtcagccacctgacctggtttactcgtcacgaccccgtggtccagaaggaacaagcaccaccagcagctcccttgtctcttaccctctctcagaacgggatgccagaggccagcagcagcagcagcgtccagttcgagatggttcaagaaaacacgtctaaaacccacagctgtgacatgaccccaaagcagtccaaagtggtgaaggccatcctgtggctctgtggaatacaggagaagggcaaggaagagctcccggccagagcagaagccatcatagtttccctggaagaaaaccccttggtgaagaccctcctggacgtcaacctcattttctgcgtgagctgcgccatctttatctggggctattttgcttagtgtggggtgaacccaggggtccaaactctgtttctcttcagtgctccatttttttaatgaaagaaaaaataataaagcttttgtttaccac

SEQ ID NO: 19665 - DNA, 1919 bp, Homo sapiens
  source 1..1919: mol_type = unassigned DNA
gctgaggctggagtttggagtttgacccgcttggaggctctctcagcagcgggcatataggaggaagggtcactgctgtctccggaagctcttggctgcaaagagagaggatcccgggtatctccctccttacaaccaccgccacctcctagtgccttagaagccactgacagcccccagggcaggtgagccctgcatctggaataagtccacagtgaagaccaaaagagacacagtgaaaggctacttcctggctggaggggacatggtgtggtggccagtgggtgcatccttgtttgccagcaatgttggaagtggacatttcattggcctggcagggtcaggtgctgctacgggcatttctgtatcagcttatgaacttaatggcttgttttctgtgctgatgttggcctggatcttcctacccatctacattgctggtcaggtcaccacgatgccagaatacctacggaagcgcttcggtggcatcagaatccccatcatcctggctgtactctacctatttatctacatcttcaccaagatctcggtagacatgtatgcaggtgccatcttcatccagcagtctttgcacctggatctgtacctggccatagttgggctactggccatcactgctgtatacacggttgctggtggcctggctgctgtgatctacacggatgccctgcagacgctgatcatgcttataggagcgctcaccttgatgggctacagtgattgtccagcggactctggctgccaagaacctgtcccatgccaaaggaggtgctctgatggctgcatacctgaaggtgctgcccctcttcataatggtgttccctgggatggtcagccgcatcctcttcccagatcaagtggcctgtgcagatccagagatctgccagaagatctgcagcaacccctcaggctgttcggacatcgcgtatcccaaactcgtgctggaactcctgcccacagtgccagcaccatcttcaccatggacctctggaatcacctccggcctcgggcatctgagaaggagctcatgattgtgggcagggtgtttgtgctgctgctggtcctggtctccatcctctggatccctgtggtccaggccagccagggcggccagctcttcatctatatccagtccatcagctcctacctgcagccgcctgtggcggtggtcttcatcatgggatgtttctggaagaggaccaatgaaaagggtgccttctggggcctgatctcgggcctgctcctgggcttggttaggctggtcctggactttatttacgtgcagcctcgatgcgaccagccagatgagcgcccggtcctggtgaagagcattcactacctctacttctccatgatcctgtccacggtcaccctcatcactgtctccaccgtgagctggttcacagagccaccctccaaggagatggtcagccacctgacctggtttactcgtcacgaccccgtggtccagaaggaacaagcaccaccagcagctcccttgtctcttaccctctctcagaacgggatgccagaggccagcagcagcagcagcgtccagttcgagatggttcaagaaaacacgtctaaaacccacagctgtgacatgaccccaaagcagtccaaagtggtgaaggccatcctgtggctctgtggaatacaggagaagggcaaggaagagctcccggccagagcagaagccatcatagtttccctggaagaaaaccccttggtgaagaccctcctggacgtcaacctcattttctgcgtgagctgcgccatctttatctggggctattttgcttagtgtggggtgaacccaggggtccaaactctgtttctcttcagtgctccatttttttaatgaaagaaaaaataataaagcttttgtttaccacaag

SEQ ID NO: 19666 - DNA, 475 bp, Homo sapiens
  source 1..475: mol_type = unassigned DNA
ctgggatgcagtggattaacaagggatgacgtatgactcttctgtgtttgtcagcatctaggctaggccctgatcccagggaacctgtgctgcaaatgtccactcattcattcattcgttcatttgttcatccatcaacctcctttcttcacaggtagacatgtatgcaggtgccatcttcatccagcagtctttgcacctggatctgtacctggccatagttgggctactggccatcactgctgtatacacggttgctggtggcctggctgctgtgatctacacggatgccctgcagacgctgatcatgcttataggagcgctcaccttgatgggctacagtttcgccgcggttggtgggatggaaggactgaaggagaagtacttcttggccctggctagcaaccggagtgagaacagcagctgcgggctgccccgggaagatgccttccatattttccgagatccgctgaca

SEQ ID NO: 19667 - DNA, 2294 bp, Homo sapiens
  source 1..2294: mol_type = unassigned DNA
actgcggtgagggctgtggctggacgtccctcctggcactttgcctctgtcccctccatccgccgccagcatttttcctcccctccccttcctccagctcgtcccaagcctgcctgtccccagcgtggaggcgggacagtggaagactggctgaggctggagtttggagtttgacccgcttggaggctctctcagcagcgggcatataggaggaagggtcactgctgtctccggaagctcttggctgcaaagagagaggatcccgggtatctccctccttacaaccaccgccacctcctagtgccttagaagccactgacagcccccagggcaggtgagccctgcatctggaataaggatccagaggtctcgttcaggaccatggagagcggcaccagcagccctcagcctccacagttagatcccctggatgcgtttccccagaagggcttggagcctggggacatcgcggtgctagttctgtacttcctctttgtcctggctgttggactatggtccacagtgaagaccaaaagagacacagtgaaaggctacttcctggctggaggggacatggtgtggtggccaggcttgttttctgtgctgatgttggcctggatcttcctacccatctacattgctggtcaggtagacatgtatgcaggtgccatcttcatccagcagtctttgcacctggatctgtacctggccatagttgggctactggccatcactgctgtatacacggttgctggtggcctggctgctgtgatctacacggatgccctgcagacgctgatcatgcttataggagcgctcaccttgatgggctacagtttcgccgcggttggtgggatggaaggactgaaggagaagtacttcttggccctggctagcaaccggagtgagaacagcagctgcgggctgccccgggaagatgccttccatattttccgagatccgctgacatctgatctcccgtggccgggggtcctatttggaatgtccatcccatccctctggtactggtgcacggatcaggtgattgtccagcggactctggctgccaagaacctgtcccatgccaaaggaggtgctctgatggctgcatacctgaaggtgctgcccctcttcataatggtgttccctgggatggtcagccgcatcctcttcccagatcaagtggcctgtgcagatccagagatctgccagaagatctgcagcaacccctcaggctgttcggacatcgcgtatcccaaactcgtgctggaactcctgcccacagggctccgtgggctgatgatggctgtgatggtggcggctctcatgtcctccctcacctccatctttaacagtgccagcaccatcttcaccatggacctctggaatcacctccggcctcgggcatctgagaaggagctcatgattgtgggcagggtgtttgtgctgctgctggtcctggtctccatcctctggatccctgtggtccaggccagccagggcggccagctcttcatctatatccagtccatcagctcctacctgcagccgcctgtggcggtggtcttcatcatgggatgtttctggaagaggaccaatgaaaagggtgccttctggggcctgatctcgggcctgctcctgggcttggttaggctggtcctggactttatttacgtgcagcctcgatgcgaccagccagatgagcgcccggtcctggtgaagagcattcactacctctacttctccatgatcctgtccacggtcaccctcatcactgtctccaccgtgagctggttcacagagccaccctccaaggagatggtcagccacctgacctggtttactcgtcacgaccccgtggtccagaaggaacaagcaccaccagcagctcccttgtctcttaccctctctcagaacgggatgccagaggccagcagcagcagcagcgtccagttcgagatggttcaagaaaacacgtctaaaacccacagctgtgacatgaccccaaagcagtccaaagtggtgaaggccatcctgtggctctgtggaatacaggagaagggcaaggaagagctcccggccagagcagaagccatcatagtttccctggaagaaaaccccttggtgaagaccctcctggacgtcaacctcattttctgcgtgagctgcgccatctttatctggggctattttgcttagtgtggggtgaacccaggggtccaaactctgtttctcttcagtgctccatttttttaatgaaagaaaaaataataaagcttttgtttaccacaagg

SEQ ID NO: 19668 - DNA, 2069 bp, Homo sapiens
  source 1..2069: mol_type = unassigned DNA
actgcggtgagggctgtggctggacgtccctcctggcactttgcctctgtcccctccatccgccgccagcatttttcctcccctccccttcctccagctcgtcccaagcctgcctgtccccagcgtggaggcgggacagtggaagactggctgaggctggagtttggagtttgacccgcttggaggctctctcagcagcgggcatataggaggaagggtcactgctgtctccggaagctcttggctgcaaagagagaggatcccgggtatctccctccttacaaccaccgccacctcctagtgccttagaagccactgacagcccccagggcaggtgagccctgcatctggaataagtccacagtgaagaccaaaagagacacagtgaaaggctacttcctggctggaggggacatggtgtggtggccagtgggtgcatccttgtttgccagcaatgttggaagtggacatttcattggcctggcagggtcaggtgctgctacgggcatttctgtatcagcttatgaacttaatggcttgttttctgtgctgatgttggcctggatcttcctacccatctacattgctggtcaggtcaccacgatgccagaatacctacggaagcgcttcggtggcatcagaatccccatcatcctggctgtactctacctatttatctacatcttcaccaagatctcggtagacatgtatgcaggtgccatcttcatccagcagtctttgcacctggatctgtacctggccatagttgggctactggccatcactgctgtatacacggttgctggtggcctggctgctgtgatctacacggatgccctgcagacgctgatcatgcttataggagcgctcaccttgatgggctacagtgattgtccagcggactctggctgccaagaacctgtcccatgccaaaggaggtgctctgatggctgcatacctgaaggtgctgcccctcttcataatggtgttccctgggatggtcagccgcatcctcttcccagatcaagtggcctgtgcagatccagagatctgccagaagatctgcagcaacccctcaggctgttcggacatcgcgtatcccaaactcgtgctggaactcctgcccacagtgccagcaccatcttcaccatggacctctggaatcacctccggcctcgggcatctgagaaggagctcatgattgtgggcagggtgtttgtgctgctgctggtcctggtctccatcctctggatccctgtggtccaggccagccagggcggccagctcttcatctatatccagtccatcagctcctacctgcagccgcctgtggcggtggtcttcatcatgggatgtttctggaagaggaccaatgaaaagggtgccttctggggcctgatctcgggcctgctcctgggcttggttaggctggtcctggactttatttacgtgcagcctcgatgcgaccagccagatgagcgcccggtcctggtgaagagcattcactacctctacttctccatgatcctgtccacggtcaccctcatcactgtctccaccgtgagctggttcacagagccaccctccaaggagatggtcagccacctgacctggtttactcgtcacgaccccgtggtccagaaggaacaagcaccaccagcagctcccttgtctcttaccctctctcagaacgggatgccagaggccagcagcagcagcagcgtccagttcgagatggttcaagaaaacacgtctaaaacccacagctgtgacatgaccccaaagcagtccaaagtggtgaaggccatcctgtggctctgtggaatacaggagaagggcaaggaagagctcccggccagagcagaagccatcatagtttccctggaagaaaaccccttggtgaagaccctcctggacgtcaacctcattttctgcgtgagctgcgccatctttatctggggctattttgcttagtgtggggtgaacccaggggtccaaactctgtttctcttcagtgctccatttttttaatgaaagaaaaaataataaagcttttgtttaccacaagg

SEQ ID NO: 19669 - DNA, 2399 bp, Homo sapiens
  source 1..2399: mol_type = unassigned DNA
actgcggtgagggctgtggctggacgtccctcctggcactttgcctctgtcccctccatccgccgccagcatttttcctcccctccccttcctccagctcgtcccaagcctgcctgtccccagcgtggaggcgggacagtggaagactggctgaggctggagtttggagtttgacccgcttggaggctctctcagcagcgggcatataggaggaagggtcactgctgtctccggaagctcttggctgcaaagagagaggatcccgggtatctccctccttacaaccaccgccacctcctagtgccttagaagccactgacagcccccagggcaggtgagccctgcatctggaataaggatccagaggtctcgttcaggaccatggagagcggcaccagcagccctcagcctccacagttagatcccctggatgcgtttccccagaagggcttggagcctggggacatcgcggtgctagttctgtacttcctctttgtcctggctgttggactatggtccacagtgaagaccaaaagagacacagtgaaaggctacttcctggctggaggggacatggtgtggtggccagtgggtgcatccttgtttgccagcaatgttggaagtggacatttcattggcctggcagggtcaggtgctgctacgggcatttctgtatcagcttatgaacttaatggcttgttttctgtgctgatgttggcctggatcttcctacccatctacattgctggtcaggtagacatgtatgcaggtgccatcttcatccagcagtctttgcacctggatctgtacctggccatagttgggctactggccatcactgctgtatacacggttgctggtggcctggctgctgtgatctacacggatgccctgcagacgctgatcatgcttataggagcgctcaccttgatgggctacagtttcgccgcggttggtgggatggaaggactgaaggagaagtacttcttggccctggctagcaaccggagtgagaacagcagctgcgggctgccccgggaagatgccttccatattttccgagatccgctgacatctgatctcccgtggccgggggtcctatttggaatgtccatcccatccctctggtactggtgcacggatcaggtgattgtccagcggactctggctgccaagaacctgtcccatgccaaaggaggtgctctgatggctgcatacctgaaggtgctgcccctcttcataatggtgttccctgggatggtcagccgcatcctcttcccagatcaagtggcctgtgcagatccagagatctgccagaagatctgcagcaacccctcaggctgttcggacatcgcgtatcccaaactcgtgctggaactcctgcccacagggctccgtgggctgatgatggctgtgatggtggcggctctcatgtcctccctcacctccatctttaacagtgccagcaccatcttcaccatggacctctggaatcacctccggcctcgggcatctgagaaggagctcatgattgtgggcagggtgtttgtgctgctgctggtcctggtctccatcctctggatccctgtggtccaggccagccagggcggccagctcttcatctatatccagtccatcagctcctacctgcagccgcctgtggcggtggtcttcatcatgggatgtttctggaagaggaccaatgaaaagggtgccttctggggcctgatctcgggcctgctcctgggcttggttaggctggtcctggactttatttacgtgcagcctcgatgcgaccagccagatgagcgcccggtcctggtgaagagcattcactacctctacttctccatgatcctgtccacggtcaccctcatcactgtctccaccgtgagctggttcacagagccaccctccaaggagatggtcagccacctgacctggtttactcgtcacgaccccgtggtccagaaggaacaagcaccaccagcagctcccttgtctcttaccctctctcagaacgggatgccagaggccagcagcagcagcagcgtccagttcgagatggttcaagaaaacacgtctaaaacccacagctgtgacatgaccccaaagcagtccaaagtggtgaaggccatcctgtggctctgtggaatacaggagaagggcaaggaagagctcccggccagagcagaagccatcatagtttccctggaagaaaaccccttggtgaagaccctcctggacgtcaacctcattttctgcgtgagctgcgccatctttatctggggctattttgcttagtgtggggtgaacccaggggtccaaactctgtttctcttcagtgctccatttttttaatgaaagaaaaaataataaagcttttgtttaccacaagg

SEQ ID NO: 19670 - DNA, 2030 bp, Homo sapiens
  source 1..2030: mol_type = unassigned DNA
ctgcctgcagccatggccagtacggttagccccagcaccatagctgagaccccagagccacctccattgtctgaccacatccgaaatgctgctgacatctcagtcattgtcatctattttctggtggtgatggctgttgggctgtgggcgatgctgaagaccaaccgaggtactataggaggcttcttcctcgctggtcgtgatatggcctggtggccgatgggcgcctctctctttgccagtaacatcggcagcaaccactatgtggggctggctgggacaggagcagcttcaggagtcgccaccgtaacatttgaatggacttcctcagtaatgttgctgattcttgggtggatctttgtccctatctacatcaagtcgggggtgatgaccatgccggaatatctcaagaagcggtttggtggggagcgactccaggtctacctctccatcctctccctcttcatctgtgtggttttgttaatttctgcagacatatttgctggagccatattcatcaagctggccttgggattggacctttacctggcaatcttcatcctcttggctatgactgctgtttacaccaccactgggggcttggcctcggtgatttacacagacaccctccagaccatcatcatgctgattggctcttttattctcatggggtttgcatttaacgaagttggaggttatgagagctttaccgagaagtacgtgaatgccaccccatccgtagtcgagggggacaacttgacaatcagtgccagttgctacacacctcgggcggactccttccacatcttccgagatgctgtgactggggacattccatggccaggaattatatttggaatgcccattacagctttgtggtactggtgcacaaatcaggtcattgtgcagcgctgcctgtgtggcaaggacatgtctcacgtgaaggccgcttgcattatgtgtgcttacctgaagctgctgcccatgttcctcatggtgatgccggggatgatcagccgcatcctgtacacagatatggtagcatgtgtggtaccttctgaatgcgtgaaacactgtggcgttgatgttggctgcaccaactacgcataccccacgatggtgctggaactgatgccccaaggactgcgaggcctgatgctttcggtcatgctggcctctctcatgagctccctgacctccatcttcaacagcgccagcaccctcttcaccattgacctctacaccaagatgcggaagcaagcgtcggagaaagagctcctgatagctggacggatatttgttcttctattaactgttgtgagcattgtgtgggtcccactggtacaagtttctcaaaatggacaactaatccattacacagaatcaatttctagctaccttgggcctccaattgcagctgtctttgtgcttgccatcttctgtaaaagagtcaatgaacagggagcattctggggtctaatggttggacttgcaatgggcctcattcgtatgataacagagtttgcttatggaacagggagttgcttggctcccagtaactgtcccaagattatctgtggagtgcactatctgtacttttccatcgttctcttttttgggtccatgctggtcaccctgggaatttccctcttaacaaaacccattcctgatgtacatctgtaccgcctgtgctgggttcttcggaacagtacagaggagcgaatcgatatagatgcagaagagaaaagtcaggaagaaacagatgatggtgttgaagaagattatcctgagaaatcacgtggatgcctcaagaaagcttatgacttgttctgcggtttgcagaagggacccaagctaaccaaggaggaggaggaagccttgagcaagaagctcacagacacgtctgagaggccctcgtggaggacaatagtgaacatcaacgccatcctcctcctggctgtggtggtctttattcacggctactatgcctgaactctatctgagccattagaataatgaataattcttaa

SEQ ID NO: 19671 - DNA, 2032 bp, Homo sapiens
  source 1..2032: mol_type = unassigned DNA
cgattcccacctcgccctgcgccgcgcgccctccgccggcgccaacacctgtcaactctgcgcgctcccaggttcttggagacgccgagtgaggagccgccctgaccgcccggccccgctccgcactgcaccccgacccaccccgcaccctccctttctgcaccctcgcacccacacccctcgcggttccagggggcggcggccccgggcggagcgctttcgcgtgcagccaccactccagacttaatgaagtagccagctgcagaagaatctggatcattagataaaaatggctttccatgtggaaggactgatagctatcatcgtgttctaccttctaattttgctggttggaatatgggctgcctggagaaccaaaaacagtggcagcgcagaagagcgcagcgaagccatcatagttggtggccgagatattggtttattggttggtggatttaccatgacagctacctgggtcggaggagggtatatcaatggcacagctgaagcagtttatgtaccaggttatggcctagcttgggctcaggcaccaattggatattctcttagtctgattttaggtggcctgttctttgcaaaacctatgcgttcaaaggggtatgtgaccatgttagacccgtttcagcaaatctatggaaaacgcatgggcggactcctgtttattcctgcactgatgggagaaatgttctgggctgcagcaattttctctgctttgggagccaccatcagcgtgatcatcgatgtggatatgcacatttctgtcatcatctctgcactcattgccactctgtacacactggtgggagggctctattctgtggcctacactgatgtcgttcagctcttttgcatttttgtagggctgtggatcagcgtcccctttgcattgtcacatcctgcagtcgcagacatcgggttcactgctgtgcatgccaaataccaaaagccgtggctgggaactgttgactcatctgaagtctactcttggcttgatagttttctgttgttgatgctgggtggaatcccatggcaagcatactttcagagggttctctcttcttcctcagccacctatgctcaagtgctgtccttcctggcagctttcgggtgcctggtgatggccatcccagccatactcattggggccattggagcatcaacagactggaaccagactgcatatgggcttccagatcccaagactacagaagaggcagacatgattttaccaattgttctgcagtatctctgccctgtgtatatttctttctttggtcttggtgcagtttctgctgctgttatgtcatcagcagattcttccatcttgtcagcaagttccatgtttgcacggaacatctaccagctttccttcagacaaaatgcttcggacaaagaaatcgtttgggttatgcgaatcacagtgtttgtgtttggagcatctgcaacagccatggccttgctgacgaaaactgtgtatgggctctggtacctcagttctgaccttgtttacatcgttatcttcccccagctgctttgtgtactctttgttaagggaaccaacacctatggggccgtggcaggttatgtttctggcctcttcctgagaataactggaggggagccatatctgtatcttcagcccttgatcttctaccctggctattaccctgatgataatggtatatataatcagaaatttccatttaaaacacttgccatggttacatcattcttaaccaacatttgcatctcctatctagccaagtatctatttgaaagtggaaccttgccacctaaattagatgtatttgatgctgttgttgcaagacacagtgaagaaaacatggataagacaattcttgtcaaaaatgaaaatattaaattagatgaacttgcacttgtgaagccacgacagagcatgaccctcagctcaactttcaccaataaagaggccttccttgatgttgattccagtccagaagggtctgggactgaagataatttacagtga

SEQ ID NO: 19672 - DNA, 5152 bp, Homo sapiens
  source 1..5152: mol_type = unassigned DNA
ctgcgccgcgcgccctccgccggcgccaacacctgtcaactctgcgcgctcccaggttcttggagacgccgagtgaggagccgccctgaccgcccggccccgctccgcactgcaccccgacccaccccgcaccctccctttctgcaccctcgcacccacacccctcgcggttccagggggcggcggccccgggcggagcgctttcgcgtgcagccaccactccagaagacttaatgaagtagccagctgcagaagaatctggatcattagataaaaatggctttccatgtggaaggactgatagctatcatcgtgttctaccttctaattttgctggttggaatatgggctgcctggagaaccaaaaacagtggcagcgcagaagagcgcagcgaagccatcatagttggtggccgagatattggtttattggttggtggatttaccatgacagctacctgggtcggaggagggtatatcaatggcacagctgaagcagtttatgtaccaggttatggcctagcttgggctcaggcaccaattggatattctcttagtctgattttaggtggcctgttctttgcaaaacctatgcgttcaaaggggtatgtgaccatgttagacccgtttcagcaaatctatggaaaacgcatgggcggactcctgtttattcctgcactgatgggagaaatgttctgggctgcagcaattttctctgctttgggagccaccatcagcgtgatcatcgatgtggatatgcacatttctgtcatcatctctgcactcattgccactctgtacacactggtgggagggctctattctgtggcctacactgatgtcgttcagctcttttgcatttttgtagggctgtggatcagcgtcccctttgcattgtcacatcctgcagtcgcagacatcgggttcactgctgtgcatgccaaataccaaaagccgtggctgggaactgttgactcatctgaagtctactcttggcttgatagttttctgttgttgatgctgggtggaatcccatggcaagcatactttcagagggttctctcttcttcctcagccacctatgctcaagtgctgtccttcctggcagctttcgggtgcctggtgatggccatcccagccatactcattggggccattggagcatcaacagactggaaccagactgcatatgggcttccagatcccaagactacagaagaggcagacatgattttaccaattgttctgcagtatctctgccctgtgtatatttctttctttggtcttggtgcagtttctgctgctgttatgtcatcagcagattcttccatcttgtcagcaagttccatgtttgcacggaacatctaccagctttccttcagacaaaatgcttcggacaaagaaatcgtttgggttatgcgaatcacagtgtttgtgtttggagcatctgcaacagccatggccttgctgacgaaaactgtgtatgggctctggtacctcagttctgaccttgtttacatcgttatcttcccccagctgctttgtgtactctttgttaagggaaccaacacctatggggccgtggcaggttatgtttctggcctcttcctgagaataactggaggggagccatatctgtatcttcagcccttgatcttctaccctggctattaccctgatgataatggtatatataatcagaaatttccatttaaaacacttgccatggttacatcattcttaaccaacatttgcatctcctatctagccaagtatctatttgaaagtggaaccttgccacctaaattagatgtatttgatgctgttgttgcaagacacagtgaagaaaacatggataagacaattcttgtcaaaaatgaaaatattaaattagatgaacttgcacttgtgaagccacgacagagcatgaccctcagctcaactttcaccaataaagaggccttccttgatgttgattccagtccagaagggtctgggactgaagataatttacagtgaccccatctaaataaaatactgcttttgcaaacagaacactgtaatagggtagttctggagagatggtatgcagcatacaaaaatatattaaaaatataaacaatgttcaggagagtaaaaattcatataaagtgcaattgcacaaatacaagccaagctagaaggaagcacctatgaaagcaacaactttgtttctcatccatagtagtattgattttgatgctagatagttttgctaggtataaaaaataagtaaagttccacttagagaacaaagggccaaatagagtttttatatttgttatgataaaaggaagtagatgtgaaaaagcctaagaaaaaggaaattggacagttttgatacaaactttgtttgctaatgcactgatgagtctagtttcattatagcacgaagctatgagaataacttcagtcactcccttgaatggtgcaatgaattaaccagctgatttttcttagtgtgatgattaaccccttctttcatgttctgagctataacatttgctgaatatgcaatttgttattcttttattaatggcatgtaatattctgagcacgggcaaagaaaacacacaaaagattatgtattggcatttatttatgtgcaaggtgataggaaaactgaatccatctttgtagaagagcactgggctaatttgtatgtttccatagctactatatgcataaacaacagtacctgaaggattattaagcaaccttaaagcaataagttcattaaacagaaggtaataggaagaacagtacatttttgtctttatctcaagtatataaagttttgccccatgataaaataagtaacatataaattaatacataagttaatattggaagtgaaattaggccttatgtaaggagaggtagctacacagcatctgttacggttaatgagaggcacactgctaaatttacgtatatttcattgaatactttatgggaagcctccacaacacctcctgatagtagtaaaattagaaaaaaacaaactctactaatttttagatattcattaataggaaagatttaatgttacagcatctactctttggcactttttcacataagccagccttagagactagacaaataactactgcaaaaagtacatagtgaattttaaaatgtagaagaaagcaaaaaataaaataagtcctaaagtgaagaagccatcaattttaacatttgatgtctagataacattcatgagattggtcattaaatactattttgctccttttctggtgttacacatacacactcatacgtgtgtgtgtgtgtatgtgtgtgtgtgtatgtgtaatgatttgtgtccatttcaagtgttttcacaccagtcacacattatagaaattactggagccatgtctacaaaagcaaagtgaagtgatgagctgaaaagtgatcagggaatctgatcccataaagaaagtgagtctgaattgttgaaactaaagcacttcttttccaaaaatacttctgcaactcatgaacaaaatgaagttaacttagtgtttagcattaaaaataaaagttgtaccttgaccctagaattccttttataagatttaattgtaattgtctcaaagcatcaaataatacatctttatcattaaacatgaatttaatgtctaggataatttttaaaagaggaaattaaataattttacatgtctcatattttcagtgctttctcaaaatttgatggtgaatattacattgcattcaaaatcttcactgaatatcatatgtatctaaatgaaaagagaattacttatattcatctattttctcagaatctattcagtaccctatggagtacatggaagaagtatatttttggaaccagtaagtatgggagtccacgattctcaggtattgattgaaaaaagagaaaggggcaagaaattcattaaagaaaaaccacagatactgaaacatttgacacataaaagtaattaattgctggagactacaattcctggcaaacaccattattccagatgcaccatgctacccagcatgctacctgaatggcggtttttatccatcctgtcaccctgagcatctgtctcaacctgctgaggcacagacttccaccatgtgcatcaggaaacacctcactcatactgtcatataatgcaacagggaggcatagtctctctacaggtctctctctttacgttgtaccattctgttgggcaacaattgtcccaacaaccacacttaaatccagtggggaaaaaaaggttaacagtaaaaatttcttccacgtaattcaatttctcacaatagacagaaacagggggaaaatgtttgccctgttcaaagtactaaaactagataacttaaataatttaagccaataaataatattatattgtatttaacccattattcctcacctaccctcaaagtaggtatacaaaagactagtttgttattaatccacaaatatgctaaatgttagcaagatgatttttaagtacaaaaaagtttaagattgcaaggaaggaaacaatggtcacaaggtctttacttatgcacatttgtgcataaatttccacccaatttccaagacagttgtatcacaaagctgtgaaatgtgcaagagtatactttgtacccatcatgtgctctgttttgacataatgagtaatgcagacatttacatgttcttccagcttcaatcagtagacctgattttcaaaatctgccctcagatgaaaataaaataaacgaaacatttagacaatggctatattaatctgggaaggcaacacctgtggataaaacattagaagaaaacatatattttattttcatacttttgatatgattgtaacatatttcttgagtaatttaaatgctttgttttcccacacatattcaaatcagcaagcttgtagctggactgcaatatcaacaacaagttgtttcaaacagcatcaaaatacaacttcattgctacacttacaagtaatgaattttatgtgactatgaaacgaatataagcttaaaataagtgaatctaataaaatggctattcctctttttacttggaaataataaattaacattatattttaaacataaa

SEQ ID NO: 19673 - DNA, 4178 bp, Homo sapiens
  source 1..4178: mol_type = unassigned DNA
attaacctatcaaataaggcagtctaaaaactccaggcgtccctttccgtaaggacccggactgttgaactggaaagctaaaattcaaggcgtgacaattgccctttgtcccacattcctccaccggtcgcctgcttatttaaatggtgcgtcccctcgggtaccacttgaacaaaacctgcccagagcgctccctgtgtagattcgctggaagcagctggaggctccagttctcatctgctcaggtgtccccggcgccttggcgaactcggccactccagttcctcacgtggtgagcactcagggcagcgggtcgattttccgaggtcccatacctgggtttgaggggcgcggctcgcagcggcgggtgcaggggcgactgccagccctcaccccgcctcggggtgcgttcggaggccgacacctggaggacgcctccagtccccgcgggacgccacgcctgcgcgccagggatccgggataagaagtgcgcgccgggctccggctgcgcgccgcggggccaccagtttgcgcgcagggctcaggcgaccgtgcggccatggacacgccacggggcatcggcaccttcgtggtgtgggactacgtggtgttcgcgggcatgctggtcatctcggccgccatcggcatctactacgccttcgctgggggcggccagcagacctccaaggacttcctgatgggcggccgcagaatgaccgcagtgcccgtggcgctgtccctcaccgctagcttcatgtcagccgtcactgtcctgggcaccccctccgaggtctaccgttttggggccatttttagcatctttgccttcacctacttctttgtggtggtcatcagcgcggaggtcttcctcccggtgttctacaaactgggaattaccagcacctacgagtatttagaacttcgatttaacaaatgtgttcgtctctgtggaacagtcctcttcattgttcaaacaattctgtatactggaattgttatttatgcccctgccctggctttgaatcaagtcacaggatttgatctgtggggcgcggtagtggcaacgggggtggtctgcacattctactgcacactgggtggtcttaaagcagttatctggacagatgtttttcaagttgggatcatggtggctggatttgcatccgtgattatacaggctgtggtgatgcaaggtggaatcagcactattttaaatgatgcctatgatggtggaagattaaatttctggaattttaatcctaaccctttgcaaagacacaccttctggacaattattataggagggaccttcacatggaccagcatctacggtgtcaaccaatcccaggtgcagagatatatttcttgtaaaagcagattccaggcaaaactgtctctctacatcaatcttgtgggactctgggcaatcctcacatgctcagtgttttgtgggctcgccctatattccaggtaccatgactgtgatccttggacagccaagaaagtgtctgcaccagaccagctcatgccttatttggtactggacattctgcaagattatccaggacttcctggactttttgtggcctgtgcttacagtgggacattaagcacagtgtcctccagtattaatgccttagcagcagtaactgtggaagatctaatcaaaccttacttcagatcgctctcagaaaggtctctgtcttggatttcccaaggaatgagtgtggtgtatggagccctgtgtattggaatggctgcgctggcgtcacttatgggagctttgttgcaggcagcactcagcgtatttggtatggttggtggaccacttatgggcctgttcgctttgggcattttggttccctttgccaactcaattggagcacttgttggtctgatggctggatttgccatttctctatgggttggaattggagctcaaatatatcctccacttcctgagagaacattgccattgcaccttgatatccaaggctgtaacagcacctacaatgagacaaatttgatgacaaccacagaaatgccatttactactagtgtttttcaaatatacaatgttcaaaggactccactgatggataactggtattctttatcatatctgtacttcagcactgttggaactttggtaacattattagtggggatacttgtcagtttatcaacaggaggaagaaaacagaacttagaccccagatacatactaaccaaagaggactttttatccaattttgatatttttaagaaaaagaagcatgttttgagctataaatcacatccagtggaagatggtggaactgataatcctgctttcaaccacattgaattgaactcagatcagagtggcaagagcaatgggactcgtttgtgaagctgctctgatactagatatccttaaatgatgtttcaattttatatgttttctaagataattggatcaggttttctttgtgtgtgtgtgtgtgttgtatcatgagtgtttgggggataagtttttgttaaaacaaagtctggactatcttcatttactacatcattaattgatgttactctggagtttagaattctggcattgacatttccctctctttcctttatttcgatgaagctataattgtgaaaattgtaactacatagatgctgaaaggctaatacacacatatgcacatgtatttgattgtcaaaggtatattcttaaatttgggtattattgaaaatattttccatgccttggtgctagcatataagtttggaagtttgccaacatcacaattcatcttgaaaagagcttttttccctcctaccacatacaccattcttagggagcaatgaggtaacaggtctgtgttgtctagatctttgctttttatccccctatcagtccagggcatatactaacctgcaaactgattctgaatcaggaaggtggtaatcaataagtattctggctgggaaagaccgtgggcccaatgatcaaagtcttcttggtgctgttcattaattcttgtgccttttggcttgttttctagagtttctgggctttggctgctgatactgcctttcttagactgtaatttttatctgcatgcccagtttctgacctatcaacttgggttttattgtgcactctaactgagcttgtcttcataattttctgtttattgccctgggcttggatatgtctcaagacactcatgtgaatcatgccaccccaaatcctggcttatcaagtcccagactataaattatgaactcccattagcttggtactaacatatacttgatgtaggtatttatggacttgatgatccaagaatattatattcttcaaaatggttaagctccatggagttagatgactacacttaatgctattaagttgaacttttgaatgtcaactaatttgcaatcaattaaagatacatatgcctagaaattttgaaatttcggtatatttatccagttaaagggctaaattatataagcaaacactactttttttaaaacgtctggactcaaaaaatgctttgttccatgttttaaaatttttaagtagcagtctcaaagttgcttagctgtttattttgctatgttcctagctaagagtttggttataggagttcatcaataacttattttttgtacagttcccacattagatactgtttaaaagttcttttttaaactcaattttttttagaaacataagagaaatatttagatacatacaaatgtttttatgattaaataattttatgcttattttctgatacgtgttatttaggtaatcatgccctgtacatttagaggttgctaactgacaatgttaagaaatttaaaaaaaaaaaaaagcctgggcatgatggctcatgcttgtaatctgaacatttgggaggctgaggcaggaagatcgcttgaggtccagagtttaagtccagcctggaaacatagttagacctcatctctacaaaaataaaaaataaaaataaaaaaaacttagctaggcatgttgccacatacttgtagtcccagttattagggaagctgaggtgggaggatagcttaagcccaggatttcaaggctgcattgagctatgattacaccactgcactccagcctgggtaacagagtgaaatcttgtctctgggaaaaaaaa

SEQ ID NO: 19674 - DNA, 3983 bp, Homo sapiens
  source 1..3983: mol_type = unassigned DNA
gtgtagattcgctggaagcagctggaggctccagttctcatctgctcaggtgtccccggcgccttggcgaactcggccactccagttcctcacgtggtgagcactcagggcagcgggtcgattttccgaggtcccatacctgggtttgaggggcgcggctcgcagcggcgggtgcaggggcgactgccagccctcaccccgcctcggggtgcgttcggaggccgacacctggaggacgcctccagtccccgcgggacgccacgcctgcgcgccagggatccgggataagaagtgcgcgccgggctccggctgcgcgccgcggggccaccagtttgcgcgcagggctcaggcgaccgtgcggccatggacacgccacggggcatcggcaccttcgtggtgtgggactacgtggtgttcgcgggcatgctggtcatctcggccgccatcggcatctactacgccttcgctgggggcggccagcagacctccaaggacttcctgatgggcggccgcagaatgaccgcagtgcccgtggcgctgtccctcaccgctagcttcatgtcagccgtcactgtcctgggcaccccctccgaggtctaccgttttggggccatttttagcatctttgccttcacctacttctttgtggtggtcatcagcgcggaggtcttcctcccggtgttctacaaactgggaattaccagcacctacgagtatttagaacttcgatttaacaaatgtgttcgtctctgtggaacagtcctcttcattgttcaaacaattctgtatactggaattgttatttatgcccctgccctggctttgaatcaagtcacaggatttgatctgtggggcgcggtagtggcaacgggggtggtctgcacattctactgcacactgggtggtcttaaagcagttatctggacagatgtttttcaagttgggatcatggtggctggatttgcatccgtgattatacaggctgtggtgatgcaaggtggaatcagcactattttaaatgatgcctatgatggtggaagattaaatttctggaattttaatcctaaccctttgcaaagacacaccttctggacaattattataggagggaccttcacatggaccagcatctacggtgtcaaccaatcccaggtgcagagatatatttcttgtaaaagcagattccaggcaaaactgtctctctacatcaatcttgtgggactctgggcaatcctcacatgctcagtgttttgtgggctcgccctatattccaggtaccatgactgtgatccttggacagccaagaaagtgtctgcaccagaccagctcatgccttatttggtactggacattctgcaagattatccaggacttcctggactttttgtggcctgtgcttacagtgggacattaagcacagtgtcctccagtattaatgccttagcagcagtaactgtggaagatctaatcaaaccttacttcagatcgctctcagaaaggtctctgtcttggatttcccaaggaatgagtgtggtgtatggagccctgtgtattggaatggctgcgctggcgtcacttatgggagctttgttgcaggcagcactcagcgtatttggtatggttggtggaccacttatgggcctgttcgctttgggcattttggttccctttgccaactcaattggagcacttgttggtctgatggctggatttgccatttctctatgggttggaattggagctcaaatatatcctccacttcctgagagaacattgccattgcaccttgatatccaaggctgtaacagcacctacaatgagacaaatttgatgacaaccacagaaatgccatttactactagtgtttttcaaatatacaatgttcaaaggactccactgatggataactggtattctttatcatatctgtacttcagcactgttggaactttggtaacattattagtggggatacttgtcagtttatcaacaggaggaagaaaacagaacttagaccccagatacatactaaccaaagaggactttttatccaattttgatatttttaagaaaaagaagcatgttttgagctataaatcacatccagtggaagatggtggaactgataatcctgctttcaaccacattgaattgaactcagatcagagtggcaagagcaatgggactcgtttgtgaagctgctctgatactagatatccttaaatgatgtttcaattttatatgttttctaagataattggatcaggttttctttgtgtgtgtgtgtgtgttgtatcatgagtgtttgggggataagtttttgttaaaacaaagtctggactatcttcatttactacatcattaattgatgttactctggagtttagaattctggcattgacatttccctctctttcctttatttcgatgaagctataattgtgaaaattgtaactacatagatgctgaaaggctaatacacacatatgcacatgtatttgattgtcaaaggtatattcttaaatttgggtattattgaaaatattttccatgccttggtgctagcatataagtttggaagtttgccaacatcacaattcatcttgaaaagagcttttttccctcctaccacatacaccattcttagggagcaatgaggtaacaggtctgtgttgtctagatctttgctttttatccccctatcagtccagggcatatactaacctgcaaactgattctgaatcaggaaggtggtaatcaataagtattctggctgggaaagaccgtgggcccaatgatcaaagtcttcttggtgctgttcattaattcttgtgccttttggcttgttttctagagtttctgggctttggctgctgatactgcctttcttagactgtaatttttatctgcatgcccagtttctgacctatcaacttgggttttattgtgcactctaactgagcttgtcttcataattttctgtttattgccctgggcttggatatgtctcaagacactcatgtgaatcatgccaccccaaatcctggcttatcaagtcccagactataaattatgaactcccattagcttggtactaacatatacttgatgtaggtatttatggacttgatgatccaagaatattatattcttcaaaatggttaagctccatggagttagatgactacacttaatgctattaagttgaacttttgaatgtcaactaatttgcaatcaattaaagatacatatgcctagaaattttgaaatttcggtatatttatccagttaaagggctaaattatataagcaaacactactttttttaaaacgtctggactcaaaaaatgctttgttccatgttttaaaatttttaagtagcagtctcaaagttgcttagctgtttattttgctatgttcctagctaagagtttggttataggagttcatcaataacttattttttgtacagttcccacattagatactgtttaaaagttcttttttaaactcaattttttttagaaacataagagaaatatttagatacatacaaatgtttttatgattaaataattttatgcttattttctgatacgtgttatttaggtaatcatgccctgtacatttagaggttgctaactgacaatgttaagaaattttaaaaaaaaaaaaaagcctgggcatgatggctcatgcttgtaatctgaacatttgggaggctgaggcaggaagatcgcttgaggtccagagtttaagtccagcctggaaacatagttagacctcatctctacaaaaataaaaaataaaaataaaaaaaacttagctaggcatgttgccacatacttgtagtcccagttattagggaagctgaggtgggaggatagcttaagcccaggatttcaaggctgcattgagctatgattacaccactgcactccagcctgggtaacagagtgaaatcttgtctctgggaaaaaaaa

SEQ ID NO: 19675 - DNA, 3165 bp, Homo sapiens
  source 1..3165: mol_type = unassigned DNA
agtgattagcctgtggagcaggaaagtccagcgatgggcagctggtcacggcagtgggtgaaagcaggggtggtcatctgacgaggggaggggaagcaggtggtgcccagcaaggtggaaggagaagtggacaggagaaacctcggggcattcccgagggcccaggaactgcaataaatgatcacagggaaacttagagttcagagagggggtgtgatttgcctgaggtcacacagcaagttagagacccagctccacgactcattgtcttggctttggccctcgtcatcctgcccacccagcggggcttcccaacccaccacacagccatggacgggaaggtggcagtgcaagagtgtgggcctcctgcagtctcctgggtccccgaggagggagagaagttggaccaggaagacgaggaccaggtgaaggatcggggccaatggaccaacaagatggagtttgtgctgtcagtggccggggagatcattgggctgggcaatgtctggaggtttccctatctctgctacaaaaacggaggtggagccttcttcatcccctacttcatcttcttctttgtctgcggcatcccggtgttcttcctggaggtggcgttgggccaatacaccagccaagggagtgtcacagcctggaggaagatctgccccctcttccagggcattggtctggcatctgtggtcatcgagtcatatttgaatgtctactacatcatcatccttgcctgggctctcttctacctgttcagctccttcacttctgagctgccctggacgacctgcaacaacttttggaacacagagcattgcacggactttctgaaccactcaggagccggcacagtgaccccatttgagaattttacctcacctgtcatggaattctgggagagacgagttctgggcatcacctcgggcatccatgacctgggctccctgcgctgggagctggccctgtgcctcctgctcgcctgggtcatctgctatttctgcatctggaagggggtcaagtccacaggcaaggtggtttatttcacagccacgtttccgtacctgatgcttgtcattttgctgatcagaggtgtcacccttcccggagcctaccagggcatcatctactacttgaagccagatttgttccgcctcaaggaccctcaggtgtggatggatgcgggcacccagatcttcttctcctttgccatctgccaggggtgcctgacagccctgggcagctacaacaagtatcacaacaactgctacaaggactgcatcgccctctgcttcctgaacagtgccaccagctttgtggctgggtttgttgtcttctccatcctgggcttcatgtcccaagagcaaggggtgcccatttctgaagtggccgagtcaggtcctgggctggccttcatcgccttccccaaggctgtgactatgatgcccttatcccagctgtggtcctgcctgttctttatcatgctcatattcctagggctggacagccagtttgtctgtgtggagtgcctggtgacagcctccatagacatgttccccaggcagctccggaagagcgggcggcgcgagctcctcatcctcaccatcgccgtcatgtgctacctgatagggcttttcctggtcaccgagggcgggatgtacatcttccagctgtttgactactatgcttccagtggcatatgcctgctgttcctgtcattgtttgaagtggtctgcataagctgggtgtatggggcggaccgtttctatgacaacattgaggacatgattggctaccggccatggcccctggtgaagatctcctggctcttcctgacccctggactttgcctggccactttcctcttctccttgagcaagtacacccccctcaagtacaacaacgtctatgtgtacccgccctggggatactccattggctggttcctggctctgtcctccatggtctgtgtcccactcttcgtcgtcatcaccctcctgaagactcggggtcctttcaggaagcgtctgcgtcagctcatcacccctgactccagtctgccacagcccaagcaacatccctgcttggatggcagtgctggccggaactttgggccctccccaacaagggaaggactgatagccggggagaaggagacccatttgtagggtgtggccagaggccaggcggctcctaagccgggaacctaggtcagggccaccctccattctcagcggacagcctctgcctctgtctcctgccacaatcctgctgggaacctctggagagccacaggcacccccagctggaggccagactcctctcttgtgctagctggagcagctccttcccctttgctgataacaccaccactgggacgtgccatgttgggacgccactccctgtgggaaggcaccatcgtttttataaaggggggtctttttggaggccgccatctgattgcaacacctcgagttatgaggattccactgtggggatgcctcttgttagagcgtactgcatttgtacacggggagaggagctataattggaacgcacactgccgtccaatgtggagagcctgatgggacaataccctgttggaagtgacaactgaacacactgtgttggatcggaggttccgttaggggatccttccttaggcttaacgacagaggcaagcctttgcatgccgtcagtctggagtttcctccgagtctctcatggcatctccagctcctgccctagttccgcactgttcttgcagtgtttcatcaactcctggagcattggaatggaaggggcttgggagatgattcctagacttcacaaacactcggcatgcctccctgcactgtccgttcctctgcccaaggccgatattgctaactgatcacagattctttcccacctcacaatccttccgaatgtgctccaggcagcaccatttgccatcctgcttctaacgcaaacccctgacttcatggatgaggaacctggagaccaaagagacaaagggactttttcaagttcacatggggacccccttcttgggggccagagatatgactaaaaccttatctccttgtgctcaggccagtgtcttcccattaaccccctgccttagttaacaagtgtgtatggattgccttccatgcg

SEQ ID NO: 19676 - DNA, 1992 bp, Homo sapiens
  source 1..1992: mol_type = unassigned DNA
ttagcccctctaggctgtctctgaggttgggactgagctccgtgtgactcgagctgcctgtggggcgtggctggagggccactgcgtccccaccaggagtgaccttggcctgtccccccacctccaggtggtttatttcacagccacgtttccgtacctgatgcttgtcattttgctgatcagaggtgtcacccttcccggagcctaccagggcatcatctactacttgaagccagatttgttccgcctcaaggaccctcaggtgtggatggatgcgggcacccagatcttcttctcctttgccatctgccaggggtgcctgacagccctgggcagctacaacaagtatcacaacaactgctacaaggactgcatcgccctctgcttcctgaacagtgccaccagctttgtggctgggtttgttgtcttctccatcctgggcttcatgtcccaagagcaaggggtgcccatttctgaagtggccgagtcagggcgggatgtacatcttccagctgtttgactactatgcttccagtggcatatgcctgctgttcctgtcattgtttgaagtggtctgcataagctgggtgtatggggcggaccgtttctatgacaacattgaggacatgattggctaccggccatggcccctggtgaagatctcctggctcttcctgacccctggactttgcctggccactttcctcttctccttgagcaagtacacccccctcaagtacaacaacgtctatgtgtacccgccctggggatactccattggctggttcctggctctgtcctccatggtctgtgtcccactcttcgtcgtcatcaccctcctgaagactcggggtcctttcaggaagcgtctgcgtcagctcatcacccctgactccagtctgccacagcccaagcaacatccctgcttggatggcagtgctggccggaactttgggccctccccaacaagggaaggactgatagccggggagaaggagacccatttgtagggtgtggccagaggccaggcggctcctaagccgggaacctaggtcagggccaccctccattctcagcggacagcctctgcctctgtctcctgccacaatcctgctgggaacctctggagagccacaggcacccccagctggaggccagactcctctcttgtgctagctggagcagctccttcccctttgctgataacaccaccactgggacgtgccatgttgggacgccactccctgtgggaaggcaccatcgtttttataaaggggggtctttttggaggccgccatctgattgcaacacctcgagttatgaggattccactgtggggatgcctcttgttagagcgtactgcatttgtacacggggagaggagctataattggaacgcacactgccgtccaatgtggagagcctgatgggacaataccctgttggaagtgacaactgaacacactgtgttggatcggaggttccgttaggggatccttccttaggcttaacgacagaggcaagcctttgcatgccgtcagtctggagtttcctccgagtctctcatggcatctccagctcctgccctagttccgcactgttcttgcagtgtttcatcaactcctggagcattggaatggaaggggcttgggagatgattcctagacttcacaaacactcggcatgcctccctgcactgtccgttcctctgcccaaggccgatattgctaactgatcacagattctttcccacctcacaatccttccgaatgtgctccaggcagcaccatttgccatcctgcttctaacgcaaacccctgacttcatggatgaggaacctggagaccaaagagacaaagggactttttcaagttcacatggggacccccttcttgggggccagagatatgactaaaaccttatctccttgtgctcaggccagtgtcttcccattaaccccctgccttagttaacaagtgtgtatggattgcc

SEQ ID NO: 19677 - DNA, 3332 bp, Homo sapiens
  source 1..3332: mol_type = unassigned DNA
gggtgtgaaggactacagagagagccaggttttggtgccatgcacacagggaaacttagagttcagagagggggtgtgatttgcctgaggtcacacagcaagttagagacccagctccacgactcattgtcttgctgcccagagctgctggctcccctgtttactctgagctgatcgatcaccttagcacacagctggctaggagagaaccatgcagtcacttcggccacacctgcccgttgacccttgctacctcggcaggctttgatcccttctgacctggaggccagaggctaggctgaggtcactcagcagacatcaaggacctgggcagatgggccggctgggatggtggcgagctgtacagataaaaagggacatgaaaatgaaaagcccgagcctgagttttcatcacggttccactcctgagtggtcttgggtgaatcacttcatctgccaaggcctggatttcctcatctgcaaactcagaaaactaaggctttggccctcgtcatcctgcccacccagcggggcttcccaacccaccacacagccatggacgggaaggtggcagtgcaagagtgtgggcctcctgcagtctcctgggtccccgaggagggagagaagttggaccaggaagacgaggaccaggtgaaggatcggggccaatggaccaacaagatggagtttgtgctgtcagtggccggggagatcattgggctgggcaatgtctggaggtttccctatctctgctacaaaaacggaggtggagccttcttcatcccctacttcatcttcttctttgtctgcggcatcccggtgttcttcctggaggtggcgttgggccaatacaccagccaagggagtgtcacagcctggaggaagatctgccccctcttccagggcattggtctggcatctgtggtcatcgagtcatatttgaatgtctactacatcatcatccttgcctgggctctcttctacctgttcagctccttcacttctgagctgccctggacgacctgcaacaacttttggaacacagagcattgcacggactttctgaaccactcaggagccggcacagtgaccccatttgagaattttacctcacctgtcatggaattctgggagagacgagttctgggcatcacctcgggcatccatgacctgggctccctgcgctgggagctggccctgtgcctcctgctcgcctgggtcatctgctatttctgcatctggaagggggtcaagtccacaggcaaggtggtttatttcacagccacgtttccgtacctgatgcttgtcattttgctgatcagaggtgtcacccttcccggagcctaccagggcatcatctactacttgaagccagatttgttccgcctcaaggaccctcaggtgtggatggatgcgggcacccagatcttcttctcctttgccatctgccaggggtgcctgacagccctgggcagctacaacaagtatcacaacaactgctacaaggactgcatcgccctctgcttcctgaacagtgccaccagctttgtggctgggtttgttgtcttctccatcctgggcttcatgtcccaagagcaaggggtgcccatttctgaagtggccgagtcaggtcctgggctggccttcatcgccttccccaaggctgtgactatgatgcccttatcccagctgtggtcctgcctgttctttatcatgctcatattcctagggctggacagccagtttgtctgtgtggagtgcctggtgacagcctccatagacatgttccccaggcagctccggaagagcgggcggcgcgagctcctcatcctcaccatcgccgtcatgtgctacctgatagggcttttcctggtcaccgagggcgggatgtacatcttccagctgtttgactactatgcttccagtggcatatgcctgctgttcctgtcattgtttgaagtggtctgcataagctgggtgtatggggcggaccgtttctatgacaacattgaggacatgattggctaccggccatggcccctggtgaagatctcctggctcttcctgacccctggactttgcctggccactttcctcttctccttgagcaagtacacccccctcaagtacaacaacgtctatgtgtacccgccctggggatactccattggctggttcctggctctgtcctccatggtctgtgtcccactcttcgtcgtcatcaccctcctgaagactcggggtcctttcaggaagcgtctgcgtcagctcatcacccctgactccagtctgccacagcccaagcaacatccctgcttggatggcagtgctggccggaactttgggccctccccaacaagggaaggactgatagccggggagaaggagacccatttgtagggtgtggccagaggccaggcggctcctaagccgggaacctaggtcagggccaccctccattctcagcggacagcctctgcctctgtctcctgccacaatcctgctgggaacctctggagagccacaggcacccccagctggaggccagactcctctcttgtgctagctggagcagctccttcccctttgctgataacaccaccactgggacgtgccatgttgggacgccactccctgtgggaaggcaccatcgtttttataaaggggggtctttttggaggccgccatctgattgcaacacctcgagttatgaggattccactgtggggatgcctcttgttagagcgtactgcatttgtacacggggagaggagctataattggaacgcacactgccgtccaatgtggagagcctgatgggacaataccctgttggaagtgacaactgaacacactgtgttggatcggaggttccgttaggggatccttccttaggcttaacgacagaggcaagcctttgcatgccgtcagtctggagtttcctccgagtctctcatggcatctccagctcctgccctagttccgcactgttcttgcagtgtttcatcaactcctggagcattggaatggaaggggcttgggagatgattcctagacttcacaaacactcggcatgcctccctgcactgtccgttcctctgcccaaggccgatattgctaactgatcacagattctttcccacctcacaatccttccgaatgtgctccaggcagcaccatttgccatcctgcttctaacgcaaacccctgacttcatggatgaggaacctggagaccaaagagacaaagggactttttcaagttcacatggggacccccttcttgggggccagagatatgactaaaaccttatctccttgtgctcaggccag

SEQ ID NO: 19678 - DNA, 2101 bp, Homo sapiens
  source 1..2101: mol_type = unassigned DNA
tctttctgtctgggagtccctggacaagtcacatgggattctgcgctgggaggaacagggtaaggcgtgaacgtggagggcagtttccctttcaggtcccggctctcttggctttcccataagcagctgccttgggactctcctggagacctgatgcccacagccaagctgaccacaggagccggtgctggggactgaggctttggccctcgtcatcctgcccacccagcggggcttcccaacccaccacacagccatggacgggaaggtggcagtgcaagagtgtgggcctcctgcagtctcctgggtccccgaggagggagagaagttggaccaggaagacgaggaccaggtgaaggatcggggccaatggaccaacaagatggagtttgtgctgtcagtggccggggagatcattgggctgggcaatgtctggaggtttccctatctctgctacaaaaacggaggtggagccttcttcatcccctacttcatcttcttctttgtctgcggcatcccggtgttcttcctggaggtggcgttgggccaatacaccagccaagggagtgtcacagcctggaggaagatctgccccctcttccagggcattggtctggcatctgtggtcatcgagtcatatttgaatgtctactacatcatcatccttgcctgggctctcttctacctgttcagctccttcacttctgagctgccctggacgacctgcaacaacttttggaacacagagcattgcacggactttctgaaccactcaggagccggcacagtgaccccatttgagaattttacctcacctgtcatggaattctgggagagacgagttctgggcatcacctcgggcatccatgacctgggctccctgcgctgggagctggccctgtgcctcctgctcgcctgggtcatctgctatttctgcatctggaagggggtcaagtccacaggcaaggtggtttatttcacagccacgtttccgtacctgatgcttgtcattttgctgatcagaggtgtcacccttcccggagcctaccagggcatcatctactacttgaagccagatttgttccgcctcaaggaccctcaggtgtggatggatgcgggcacccagatcttcttctcctttgccatctgccaggggtgcctgacagccctgggcagctacaacaagtatcacaacaactgctacaaggactgcatcgccctctgcttcctgaacagtgccaccagctttgtggctgggtttgttgtcttctccatcctgggcttcatgtcccaagagcaaggggtgcccatttctgaagtggccgagtcaggtcctgggctggccttcatcgccttccccaaggctgtgactatgatgcccttatcccagctgtggtcctgcctgttctttatcatgctcatattcctagggctggacagccagtttgtctgtgtggagtgcctggtgacagcctccatagacatgttccccaggcagctccggaagagcgggcggcgcgagctcctcatcctcaccatcgccgtcatgtgctacctgatagggcttttcctggtcaccgagggcgggatgtacatcttccagctgtttgactactatgcttccagtggcatatgcctgctgttcctgtcattgtttgaagtggtctgcataagctgggtgtatggggcggaccgtttctatgacaacattgaggacatgattggctaccggccatggcccctggtgaagatctcctggctcttcctgacccctggactttgcctggccactttcctcttctccttgagcaagtacacccccctcaagtacaacaacgtctatgtgtacccgccctggggatactccattggctggttcctggctctgtcctccatggtctgtgtcccactcttcgtcgtcatcaccctcctgaagactcggggtcctttcaggaagcgtctgcgtcagctcatcacccctgactccagtctgccacagcccaagcaacatccctgcttggatggcagtgctggccggaactttgggccctccccaacaagggaaggactgatagccggggagaaggagacccatttgtag

SEQ ID NO: 19679 - DNA, 736 bp, Homo sapiens
  source 1..736: mol_type = unassigned DNA
cccctctaggctgtctctgaggttgggactgagctccgtgtgactcgagctgcctgtggggcgtggctggagggccactgcgtccccaccaggagtgaccttggcctgtccccccacctccaggtggtttatttcacagccacgtttccgtacctgatgcttgtcattttgctgatcagaggtgtcacccttcccggagcctaccagggcatcatctactacttgaagccagatttgttccgcctcaaggaccctcagggactgcatcgccctctgcttcctgaacagtgccaccagctttgtggctgggtttgttgtcttctccatcctgggcttcatgtcccaagagcaaggggtgcccatttctgaagtggccgagtcaggtcctgggctggccttcatcgccttccccaaggctgtgactatgatgcccttatcccagctgtggtcctgcctgttctttatcatgctcatattcctagggctggacagccagtttgtctgtgtggagtgcctggtgacagcctccatagacatgttccccaggcagctccggaagagcgggcggcgcgagctcctcatcctcaccatcgccgtcatgtgctacctgatagggcttttcctggtcaccgagggcgggatgtacatcttccagctgtttgactactatgcttccagtggcatatgcctgctgttcctgtcattgtttgaagtggtctgcataagctgggtgtat

SEQ ID NO: 19680 - DNA, 574 bp, Homo sapiens
  source 1..574: mol_type = unassigned DNA
agatttgagcattatttccaacccagagagccggagactgtgcttcatgcctttttaaagccaggagtggtggtttatttcacagccacgtttccgtacctgatgcttgtcattttgctgatcagaggtgtcacccttcccggagcctaccagggcatcatctactacttgaagccagatttgttccgcctcaaggaccctcaggtgtggatggatgcgggcacccagatcttcttctcctttgccatctgccaggggtgcctgacagccctgggcagctacaacaagtatcacaacaactgctacaaggactgcatcgccctctgcttcctgaacagtgccaccagctttgtggctgggtttgttgtcttctccatcctgggcttcatgtcccaagagcaaggggtgcccatttctgaagtggccgagtcaggtcctgggctggccttcatcgccttccccaaggctgtgactatgatgcccttatcccagctgtggtcctgcctgttctttatcatgctcatattcctagggctggacagccagtttgtctgtgtggagtgcctggtgacag

SEQ ID NO: 19681 - DNA, 546 bp, Homo sapiens
  source 1..546: mol_type = unassigned DNA
gcttagcccctctaggctgtctctgaggttgggactgagctccgtgtgactcgagctgcctgtggggcgtggctggagggccactgcgtccccaccaggagtgaccttggcctgtccccccacctccaggtggtttatttcacagccacgtttccgtacctgatgcttgtcattttgctgatcagaggtgtcacccttcccggagcctaccagggcatcatctactacttgaagccagatttgttccgcctcaaggaccctcaggtgtggatggatgcgggcacccagatcttcttctcctttgccatctgccaggggtgcctgacagccctgggcagctacaacaagtatcacaacaactgctacaaggactgcatcgccctctgcttcctgaacagtgccaccagctttgtggctgggtttgttgtcttctccatcctgggcttcatgtcccaagagcaaggggtgcccatttctgaagtggccgagtcaggtcctgggctggccttcatcgccttccccaaggctgtgactatgatgccctta

SEQ ID NO: 19682 - DNA, 741 bp, Homo sapiens
  source 1..741: mol_type = unassigned DNA
gcggcggacgcccgggccgccccaacgccgctgcgcggtggagaccgcggtggaacccgtccttgccagggtgggctcgccgggccccaaaggagaggttttgttcatagtcagcattgatttttcagccaggctgttctgaaaggtccacagtccttcgttaagtagtgagcacttcgggaggctgaggcaggaggatcgcctgagcccgggagttcgagaccagcctgggcagcatagcattggtctggcatctgtggtcatcgagtcatatttgaatgtctactacatcatcatccttgcctgggctctcttctacctgttcagctccttcacttctgagctgccctggacgacctgcaacaacttttggaacacaggagacgagttctgggcatcacctcgggcatccatgacctgggctccctgcgctgggagctggccctgtgcctcctgctcgcctgggtcatctgctatttctgcatctggaagggggtcaagtccacaggcaaggtggtttatttcacagccacgtttccgtacctgatgcttgtcattttgctgatcagaggtgtcacccttcccggagcctaccagggcatcatctactacttgaagccagatttgttccgcctcaaggaccctcaggtgtggatggatgcgggcacccagatcttcttctcctttgccatctgccaggggtgcctgacagccctgggcagctacaacaagtatcacaac

SEQ ID NO: 19683 - DNA, 557 bp, Homo sapiens
  source 1..557: mol_type = unassigned DNA
gggctctcttctacctgttcagctccttcacttctgagctgccctggacgacctgcaacaacttttggaacacagagcattgcacggactttctgaaccactcaggagccggcacagtgaccccatttgagaattttacctcacctgtcatggaattctgggagagacgagttctgggcatcacctcgggcatccatgacctgggctccctgcgctgggagctggccctgtgcctcctgctcgcctgggtcatctgctatttctgcatctggaagggggtcaagtccacaggcaaggtggtttatttcacagccacgtttccgtacctgatgcttgtcattttgctgatcagaggtgtcacccttcccggagcctaccagggcatcatctactacttgaagccagatttgttccgcctcaaggaccctcaggtatgtaccgtgctgggaccacttccccaggtgccttccccacccagccaggtctgtagttttgaaagtcttgtatagctttttccttggtttaaaagcaataaatgcccactggagataaattag

SEQ ID NO: 19684 - DNA, 665 bp, Homo sapiens
  source 1..665: mol_type = unassigned DNA
tctgagctgccctggacgacctgcaacaacttttggaacacagagcattgcacggactttctgaaccactcaggagccggcacagtgaccccatttgagaattttacctcacctgtcatggaattctgggagtaggtgctgggcccatttgccacatatgaagaggaaatttggatgtctgagctgtgcaagtctgaatgtctggggtgcaagtttaagattctgtgtgtgctttccagcacttcctcccccgccccactccaaccccacacatcactgaggcaggggagaacgctctcacatctacccacacgggtccacggagactcacatttatccgtcatgtccaccttcagccccacatccctacctccatgcgtgtgtctgcccacacatgtccagtggggtgctggacagagtcttcacagctttaggggagctgagtgtgcatgtctcttcccactgccatgctcggtggtgtcatgccagtagcttgaaattgcccaaggcgggagtgctcacatcaagacatgggcacaccctccactcacacactcaccctctcacctgacaacgtaccccttcacattacgtgtgcccacactcgtccacctgcattcccacgcaagactgcctgtactctctcacactgagctaacccccac

SEQ ID NO: 19685 - DNA, 549 bp, Homo sapiens
  source 1..549: mol_type = unassigned DNA
cccgagggcccaggaactgcaataaatgatcacagggaaacttagagttcagagagggggtgtgatttgcctgaggtcacacagcaagttagagacccagctccacgactcattgtcttggctttggccctcgtcatcctgcccacccagcggggcttcccaacccaccacacagccatggacgggaaggtggcagtgcaagagtgtgggcctcctgcagtctcctgggtccccgaggagggagagaagttggaccaggaagacgaggaccaggagccttcttcatcccctacttcatcttcttctttgtctgcggcatcccggtgttcttcctggaggtggcgttgggccaatacaccagccaagggagtgtcacagcctggaggaagatctgccccctcttccagggcattggtctggcatctgtggtcatcgagtcatatttgaatgtctactacatcatcatccttgcctgggctctcttctacctgttcagctccttcacttctgagctgccctggacgacctgcaacaacttttggaacacag

SEQ ID NO: 19686 - DNA, 577 bp, Homo sapiens
  source 1..577: mol_type = unassigned DNA
atccctgtttctctagagccttggaggagcgtggggcacttggtagacctggtcgctttgattccctcaatacccctcagaggctttggccctcgtcatcctgcccacccagcggggcttcccaacccaccacacagccatggacgggaaggtggcagtgcaagagtgtgggcctcctgcagtctcctgggtccccgaggagggagagaagttggaccaggaagacgaggaccaggtgaaggatcggggccaatggaccaacaagatggagtttgtgctgtcagtggccggggagatcattgggctgggcaatgtctggaggtttccctatctctgctacaaaaacggaggtggagccttcttcatcccctacttcatcttcttctttgtctgcggcatcccggtgttcttcctggaggtggcgttgggccaatacaccagccaagggagtgtcacagcctggaggaagatctgccccctcttccagggcattggtctggcatctgtggtcatcgagtcatatttgaatgtctactacatcatcatccttgcctgggctctcttctacctgttcagc

SEQ ID NO: 19687 - DNA, 554 bp, Homo sapiens
  source 1..554: mol_type = unassigned DNA
acatgggattctgcgctgggaggaacagggtaaggcgtgaacgtggagggcagtttccctttcaggtcccggctctcttggctttcccataagcagctgccttgggactctcctggagacctgatgcccacagccaagctgaccacaggagccggtgctggggactgagggaaacttagagttcagagagggggtgtgatttgcctgaggtcacacagcaagttagagacccagctccacgactcattgtcttggctttggccctcgtcatcctgcccacccagcggggcttcccaacccaccacacagccatggacgggaaggtggcagtgcaagagtgtgggcctcctgcagtctcctgggtccccgaggagggagagaagttggaccaggaagacgaggaccaggagccttcttcatcccctacttcatcttcttctttgtctgcggcatcccggtgttcttcctggaggtggcgttgggccaatacaccagccaagggagtgtcacagcctggaggaagatctgccccctcttccagggcattggtctgg

SEQ ID NO: 19688 - DNA, 567 bp, Homo sapiens
  source 1..567: mol_type = unassigned DNA
tatagcctggagtctctgtttccctttcaggtcccggctctcttggctttcccataagcagctgccttgggactctcctggagacctgatgcccacagccaagctgaccacaggagccggtgctggggactgagggaaacttagagttcagagagggggtgtgatttgcctgaggtcacacagcaagttagagacccagctccacgactcattgtcttggctttggccctcgtcatcctgcccacccagcggggcttcccaacccaccacacagccatggacgggaaggtggcagtgcaagagtgtgggcctcctgcagtctcctgggtccccgaggagggagagaagttggaccaggaagacgaggaccaggtgaaggatcggggccaatggaccaacaagatggagtttgtgctgtcagtggccggggagatcattgggctgggcaatgtctggaggtttccctatctctgctacaaaaacggaggtggtgagttcactttgaggtaggcatggtggggagagctgtgtgctggcagctgggcagtgcctacctgggccctcctt

SEQ ID NO: 19689 - DNA, 467 bp, Homo sapiens
  source 1..467: mol_type = unassigned DNA
atccagcgtgggagcagctcagtgattagcctgtggagcaggaaagtccagcgatgggcagctggtcacggcagtgggtgaaagcaggggtggtcatctgacgaggggaggggaagcaggtggtgcccagcaaggtggaaggagaagtggacaggagaaacctcggggcattcccgagggcccaggaactgcaataaatgatcacaggtgaggggttcctgcccgctgcctgccggctgagcgtgacgagctgggtgccaggcgcctcccaggaggaagctgtcttggctttgggcggtggatgctatgggtgtgcttgtacccgaggggggcactcaggggagttgcaggcagccaccagctgagaccggcactcacggggtgtgaaggactacagagagagccaggttttggtgccatgcacacagggaaacttagagttcagagagggggtgtgatttgcctga

SEQ ID NO: 19690 - DNA, 3294 bp, Homo sapiens
  source 1..3294: mol_type = unassigned DNA
gttcagaggccccaccttctcttttcctcccaatcagctgcccagagctgctggctcccctgtttactctgagctgatcgatcaccttagcacacagctggctaggagagaaccatgcagtcacttcggccacacctgcccgttgacccttgctacctcggcaggctttgatcccttctgacctggaggccagaggctaggctgaggtcactcagcagacatcaaggacctgggcagatgggccggctgggatggtggcgagctgtacagataaaaagggacatgaaaatgaaaagcccgagcctgagttttcatcacggttccactcctgagtggtcttgggtgaatcacttcatctgccaaggcctggatttcctcatctgcaaactcagaaaactaaggctttggccctcgtcatcctgcccacccagcggggcttcccaacccaccacacagccatggacgggaaggtggcagtgcaagagtgtgggcctcctgcagtctcctgggtccccgaggagggagagaagttggaccaggaagacgaggaccaggtgaaggatcggggccaatggaccaacaagatggagtttgtgctgtcagtggccggggagatcattgggctgggcaatgtctggaggtttccctatctctgctacaaaaacggaggtggagccttcttcatcccctacttcatcttcttctttgtctgcggcatcccggtgttcttcctggaggtggcgttgggccaatacaccagccaagggagtgtcacagcctggaggaagatctgccccctcttccagggcattggtctggcatctgtggtcatcgagtcatatttgaatgtctactacatcatcatccttgcctgggctctcttctacctgttcagctccttcacttctgagctgccctggacgacctgcaacaacttttggaacacagagcattgcacggactttctgaaccactcaggagccggcacagtgaccccatttgagaattttacctcacctgtcatggaattctgggagagacgagttctgggcatcacctcgggcatccatgacctgggctccctgcgctgggagctggccctgtgcctcctgctcgcctgggtcatctgctatttctgcatctggaagggggtcaagtccacaggcaaggtggtttatttcacagccacgtttccgtacctgatgcttgtcattttgctgatcagaggtgtcacccttcccggagcctaccagggcatcatctactacttgaagccagatttgttccgcctcaaggaccctcaggtgtggatggatgcgggcacccagatcttcttctcctttgccatctgccaggggtgcctgacagccctgggcagctacaacaagtatcacaacaactgctacaaggactgcatcgccctctgcttcctgaacagtgccaccagctttgtggctgggtttgttgtcttctccatcctgggcttcatgtcccaagagcaaggggtgcccatttctgaagtggccgagtcaggtcctgggctggccttcatcgccttccccaaggctgtgactatgatgcccttatcccagctgtggtcctgcctgttctttatcatgctcatattcctagggctggacagccagtttgtctgtgtggagtgcctggtgacagcctccatagacatgttccccaggcagctccggaagagcgggcggcgcgagctcctcatcctcaccatcgccgtcatgtgctacctgatagggcttttcctggtcaccgagggcgggatgtacatcttccagctgtttgactactatgcttccagtggcatatgcctgctgttcctgtcattgtttgaagtggtctgcataagctgggtgtatggggcggaccgtttctatgacaacattgaggacatgattggctaccggccatggcccctggtgaagatctcctggctcttcctgacccctggactttgcctggccactttcctcttctccttgagcaagtacacccccctcaagtacaacaacgtctatgtgtacccgccctggggatactccattggctggttcctggctctgtcctccatggtctgtgtcccactcttcgtcgtcatcaccctcctgaagactcggggtcctttcaggaagcgtctgcgtcagctcatcacccctgactccagtctgccacagcccaagcaacatccctgcttggatggcagtgctggccggaactttgggccctccccaacaagggaaggactgatagccggggagaaggagacccatttgtagggtgtggccagaggccaggcggctcctaagccgggaacctaggtcagggccaccctccattctcagcggacagcctctgcctctgtctcctgccacaatcctgctgggaacctctggagagccacaggcacccccagctggaggccagactcctctcttgtgctagctggagcagctccttcccctttgctgataacaccaccactgggacgtgccatgttgggacgccactccctgtgggaaggcaccatcgtttttataaaggggggtctttttggaggccgccatctgattgcaacacctcgagttatgaggattccactgtggggatgcctcttgttagagcgtactgcatttgtacacggggagaggagctataattggaacgcacactgccgtccaatgtggagagcctgatgggacaataccctgttggaagtgacaactgaacacactgtgttggatcggaggttccgttaggggatccttccttaggcttaacgacagaggcaagcctttgcatgccgtcagtctggagtttcctccgagtctctcatggcatctccagctcctgccctagttccgcactgttcttgcagtgtttcatcaactcctggagcattggaatggaaggggcttgggagatgattcctagacttcacaaacactcggcatgcctccctgcactgtccgttcctctgcccaaggccgatattgctaactgatcacagattctttcccacctcacaatccttccgaatgtgctccaggcagcaccatttgccatcctgcttctaacgcaaacccctgacttcatggatgaggaacctggagaccaaagagacaaagggactttttcaagttcacatggggacccccttcttgggggccagagatatgactaaaaccttatctccttgtgctcaggccagtgtcttcccattaaccccctgccttagttaacaagtgtgtatggattgccttccatgcg

SEQ ID NO: 19691 - DNA, 2185 bp, Homo sapiens
  source 1..2185: mol_type = unassigned DNA
agataattcttctcccctgactggacctctggcagcagcttcactaaggtgggatggatagcagggtctcaggcacaaccagtaatggagagacaaaaccagtgtatccagtcatggaaaagaaggaggaagatggcaccctggagcgggggcactggaacaacaagatggagtttgtgctgtcagtggctggggagatcattggcttaggcaacgtctggaggtttccctatctctgctacaaaaatgggggaggtgccttcttcatcccctacctcgtcttcctctttacctgtggcattcctgtcttccttctggagacagcactaggccagtacactagccagggaggcgtcacagcctggaggaagatctgccccatctttgagggcattggctatgcctcccagatgatcgtcatcctcctcaacgtctactacatcattgtgttggcctgggccctgttctacctcttcagcagcttcaccatcgacctgccctggggcggctgctaccatgagtggaacacagaacactgtatggagttccagaagaccaacggctccctgaatggtacctctgagaatgccacctctcctgtcatcgagttctgggagcggcgggtcttgaagatctctgatgggatccagcacctgggggccctgcgctgggagctggctctgtgcctcctgctggcctgggtcatctgctacttctgcatctggaagggggtgaagtccacaggcaaggtggtgtacttcacggccacatttccttacctcatgctggtggtcctgttaattcgaggggtgacgttgcctggggcagcccaaggaattcagttttacctgtacccaaacctcacgcgtctgtgggatccccaggtgtggatggatgcaggcacccagatattcttctccttcgccatctgtcttgggtgcctgacagccctgggcagctacaacaagtaccacaacaactgctacagggactgcatcgccctctgcttcctcaacagcggcaccagctttgtggccggctttgccatcttctccatcctgggcttcatgtctcaggagcagggggtgcccatttctgaggtggccgagtcaggccctggcctggctttcatcgcttacccgcgggctgtggtgatgctgcccttctctcctctctgggcctgctgtttcttcttcatggtcgttctcctgggactggatagccagtttgtgtgtgtagaaagcctggtgacagcgctggtggacatgtaccctcacgtgttccgcaagaagaaccggagggaagtcctcatccttggagtatctgtcgtctccttccttgtggggctgatcatgctcacagagggcggaatgtacgtgttccagctctttgactactatgcggccagtggcatgtgcctcctgttcgtggccatcttcgagtccctctgtgtggcttgggtttacggagccaagcgcttctacgacaacatcgaagacatgattgggtacaggccatggcctcttatcaaatactgttggctcttcctcacaccagctgtgtgcacagccacctttctcttctccctgataaagtacactccgctgacctacaacaagaagtacacgtacccgtggtggggcgatgccctgggctggctcctggctctgtcctccatggtctgcattcctgcctggagcctctacagactcggaaccctcaagggccccttcagagagagaatccgtcagctcatgtgcccagccgaggacctgccccagcggaacccagcaggaccctcggctcccgccacccccaggacctcactgctcagactcacagagctagagtctcactgctagggggcaggcccttggatggtgcctgtgtgcctggccttggggatggctgtggagggaacgtggcagaagcagccccatgtgcttccctgcccccgacctggagtggataagacaagaggggtattttggagtccacctgctgagctggaggcctcccactgcaacttttcagctcaggggttgttgaacagatgtgaaaggccagtgccaagagtgtccctctgagacccttgggaagctgggtgggggctggtaggtggggcgagacttgctggcttcgggccctctcatccttcattccattaaatccacattcttcccgc

SEQ ID NO: 19692 - DNA, 425 bp, Homo sapiens
  source 1..425: mol_type = unassigned DNA
catggtcgttctcctgggactggatagccagtttgtgtgtgtagaaagcctggtgacagcgctggtggacatgtaccctcacgtgttccgcaagaagaaccggagggaagtcctcatccttggagtatctgtcgtctccttccttgtggggctgatcatgctcacagaggaacgacaaagtaggcaggtccctcctctggcctttgggcatggaccacccacctccagggatgggtgaggagccatttggctccacagtaagtgaagagggcggaatgtacgtgttccagctctttgactactatgcggccagtggcatgtgcctcctgttcgtggccatcttcgagtccctctgtgtggcttgggtttacggagccaagcgcttctacgacaacatcgaagacatgattgggtacaggccatgg

SEQ ID NO: 19693 - DNA, 340 bp, Homo sapiens
  source 1..340: mol_type = unassigned DNA
cgctgggagctggctctgtgcctcctgctggcctgggtcatctgctacttctgcatctggaagggggtgaagtccacaggcaaggtggtgtacttcacggccacatttccttacctcatgctggtggtcctgttaattcgaggggtgacgttgcctggggcagcccaaggaattcagttttacctgtacccaaacctcacgcgtctgtgggatccccagggcggaatgtacgtgttccagctctttgactactatgcggccagtggcatgtgcctcctgttcgtggccatcttcgagtccctctgtgtggcttgggtttacggtgagtgactcctcccct

SEQ ID NO: 19694 - DNA, 494 bp, Homo sapiens
  source 1..494: mol_type = unassigned DNA
tttgcgtggtcctctgaattctgccaggtagccctgctccggcgtccgtgaaggggccaggacagtgtccgccaggaggggctgtgctcccagacaggaagcaggagaggttgcagccctgttctgaccctgccattccgccctctcctcacccctgccccacagggactgcatcgccctctgcttcctcaacagcggcaccagctttgtggccggctttgccatcttctccatcctgggcttcatgtctcaggagcagggggtgcccatttctgaggtggccgagtcaggccctggcctggctttcatcgcttacccgcgggctgtggtgatgctgcccttctctcctctctgggcctgctgtttcttcttcatggtcgttctcctgggactggatagccagaaagcctggtgacagcgctggtggacatgtaccctcacgtgttccgcaagaagaaccggagggaagtcctcatccttggagtatctgtcgt

SEQ ID NO: 19695 - DNA, 490 bp, Homo sapiens
  source 1..490: mol_type = unassigned DNA
acgctgaaacacagctgaagtgaaatcatatggtgcctctcaaaattgaattcaggcgactaagagttatttgttgtttgggattacccattagcatgccagatgggatgatggcagagtggtggcgtcccatgcggtgtggacctacgtggtagagaggggcggctgtgtggcggtttgtcacatctagatccatgttttgcttccctggagccgcattcttttaggactaccttgatttattccgtccctgggctggtggggccgaggagtgtcggaggagagccagtgctttgcgtggtcctctgaattctgccagggactgcatcgccctctgcttcctcaacagcggcaccagctttgtggccggctttgccatcttctccatcctgggcttcatgtctcaggagcagggggtgcccatttctgaggtggccgagtcaggccctggcctggctttcatcgcttacccgcgggctgtggtgatgct

SEQ ID NO: 19696 - DNA, 541 bp, Homo sapiens
  source 1..541: mol_type = unassigned DNA
cacactttaaatagccagcaccttctccttcccccttagataattcttctcccctgactggacctctggcagcagcttcactaaggtgggatggatagcagggtctcaggcacaaccagtaatggagagacaaaaccagtgtatccagtcatggaaaagaaggaggaagatggcaccctggagcgggggcactggaacaacaagatggagtttgtgctgtcagtggctggggagatcattggcttaggcaacgtctggaggtttccctatctctgctacaaaaatgggggagaacactgtatggagttccagaagaccaacggctccctgaatggtacctctgagaatgccacctctcctgtcatcgagttctgggagcggcgggtcttgaagatctctgatgggatccagcacctgggggccctgcgctgggagctggctctgtgcctcctgctggcctgggtcatctgctacttctgcatctggaagggggtgaagtccacaggcaaggtggtgtacttcacggccacatttccttacc

SEQ ID NO: 19697 - DNA, 1001 bp, Homo sapiens
  source 1..1001: mol_type = unassigned DNA
agataattcttctcccctgactggacctctggcagcagcttcactaaggtgggatggatagcagggtctcaggcacaaccagtaatggagagacaaaaccagtgtatccagtcatggaaaagaaggaggaagatggcaccctggagcgggggcactggaacaacaagatggagtttgtgctgtcagtggctggggagatcattggcttaggcaacgtctggaggtttccctatctctgctacaaaaatgggggaggtgccttcttcatcccctacctcgtcttcctctttacctgtggcattcctgtcttccttctggagacagcactaggccagtacactagccagggaggcgtcacagcctggaggaagatctgccccatctttgagggcattggctatgcctcccagatgatcgtcatcctcctcaacgtctactacatcattgtgttggcctgggccctgttctacctcttcagcagcttcaccatcgacctgccctggggcggctgctaccatgagtggaacacagaacactgtatggagttccagaagaccaacggctccctgaatggtacctctgagaatgccacctctcctgtcatcgagttctgggagcggcgggtcttgaagatctctgatgggatccagcacctgggggccctgcgctgggagctggctctgtgcctcctgctggcctgggtcatctgctacttctgcatctggaagggggtgaagtccacaggcaaggttcgtgtggggagctcctgcccctcccattcccggactcctgccctcactgggggctgtcacccaggagttctctaagctgtggccccgttgaggatgggaggcgatgacccagcgaggatttgatgtggctcccttccttgattctccgcctctcctagactcacatacttctggtttttgggactggaagagagcgagaaaggcaggaaggacacctccagggtaatctgatcttggaactgacgatgg

SEQ ID NO: 19698 - DNA, 525 bp, Homo sapiens
  source 1..525: mol_type = unassigned DNA
gttagcatgccttgaagcagctgacctgaagagcacctttcctgttgccatctgatcatgcttgaggagaatgtatacccaagcatctatgtacccacatgtccaagtgtgcgggagagagtgagctgcatttgttgaggttattacgtgtgggaggatgttttgtacagataaccttagcctggctcctgccaaataccttccttcccattctcctagaatttcaccccactctccagttgtgtcataggctggctgatgatttttctcttttttccctcctcgtgacccatgggtagaacactgtatggagttccagaagaccaacggctccctgaatggtacctctgagaatgccacctctcctgtcatcgagttctgggagcggcgggtcttgaagatctctgatgggatccagcacctgggggccctgcgctgggagctggctctgtgcctcctgctggcctgggtcatctgctacttctgcatctggaagggggtgaagtccacaggcaaggttcgtgt

SEQ ID NO: 19699 - DNA, 607 bp, Homo sapiens
  source 1..607: mol_type = unassigned DNA
ctggacctctggcagcagcttcactaaggtgggatggatagcagggtctcaggcacaaccagtaatggagagacaaaaccagtgtatccagtcatggaaaagaaggaggaagatggcaccctggagcgggggcactggaacaacaagatggagtttgtgctgtcagtggctggggagatcattggcttaggcaacgtctggaggtttccctatctctgctacaaaaatgggggaggtgccttcttcatcccctacctcgtcttcctctttacctgtggcattcctgtcttccttctggagacagcactaggccagtacactagccagggaggcgtcacagcctggaggaagatctgccccatctttgaggtttccccgcaggcattggctatgcctcccagatgatcgtcatcctcctcaacgtctactacatcattgtgttggcctgggccctgttctacctcttcagcagcttcaccatcgacctgccctggggcggctgctaccatgagtggaacacagaacactgtatggagttccagaagaccaacggctccctgaatggtacctctgagaatgccacctctcctgtcatcgagttctggga

SEQ ID NO: 19700 - DNA, 560 bp, Homo sapiens
  source 1..560: mol_type = unassigned DNA
agataattcttctcccctgactggacctctggcagcagcttcactaaggtgccttcttcatcccctacctcgtcttcctctttacctgtggcattcctgtcttccttctggagacagcactaggccagtacactagccagggaggcgtcacagcctggaggaagatctgccccatctttgagggcattggctatgcctcccagatgatcgtcatcctcctcaacgtctactacatcattgtgttggcctgggccctgttctacctcttcagcagcttcaccatcgacctgccctggggcggctgctaccatgagtggaacacaggtggtgactttgcacaggacgcttacatagaaatgttagcatgccttgaagcagctgacctgaagagcacctttcctgttgccatctgatcatgcttgaggagaatgtatacccaagcatctatgtacccacatgtccaagtgtgcgggagagagtgagctgcatttgttgagaacactgtatggagttccagaagaccaacggctccctgaatggtacctctgagaatgccacct

SEQ ID NO: 19701 - DNA, 1101 bp, Homo sapiens
  source 1..1101: mol_type = unassigned DNA
agataattcttctcccctgactggacctctggcagcagcttcactaaggtgggatggatagcagggtctcaggcacaaccagtaatggagagacaaaaccagtgtatccagtcatggaaaagaaggaggaagatggcaccctggagcgggggcactggaacaacaagatggagtttgtgctgtcagtggctggggagatcattggcttaggcaacgtctggaggtttccctatctctgctacaaaaatgggggaggtgagatgagagcccttgtgccaccccacccactcctggaaggaggatacttccatctcctgcacttacggcccctctggggagtcccatagatgtatagaattctggaggtaggaggacgcttagaggtcattaaggacactctgtaagagactaagacctagaaaggttacgtgactatcccagggctctttctattataacgtggcatcgtagaaatatgagcacaagctggaaccaggtggatgagagtttggattctggctctgctacttaacactctgtgtgatcttggacaagttacttaagctctcagagcatcaattgccgctcctgcaaattgagataataatgcctgcctttcaaggtcattgtaaggattagagacaatgtgtgtaaagcacttaataaatagtagctctgctgatgatgacgttgataaccaaactgttctgtggtcttaagtaataaatagtagctctgctgatgatgacgttgataaccaaactgttctgtggtcttaagtaataagtagtagctctgttgatgatgacgttgataaccaaactgttctgtggtcttaagtaataagtagtagctctgctgatgatgacgttgataaccaaactgttctgtggtcttaagtaataaatagtagctctgctgatgatgatgttgataaccaaactgttctgtggtcttaagtaataaatagtagctctgctgatgatgacgttgataaccaaactgttctgtggtcttaagtaataaatagtagctctgctgatgatgacgttgataaccaaactgttctgtggtcttaagtaataaatagtagctctgctg

SEQ ID NO: 19702 - DNA, 1950 bp, Homo sapiens
  source 1..1950: mol_type = unassigned DNA
cacactttaaatagccagcaccttctccttcccccttagataattcttctcccctgactggacctctggcagcagcttcactaaggtgggatggatagcagggtctcaggcacaaccagtaatggagagacaaaaccagtgtatccagtcatggaaaagaaggaggaagatggcaccctggagcgggggcactggaacaacaagatggagtttgtgctgtcagtggctggggagatcattggcttaggcaacgtctggaggtttccctatctctgctacaaaaatgggggagaacactgtatggagttccagaagaccaacggctccctgaatggtacctctgagaatgccacctctcctgtcatcgagttctgggagcggcgggtcttgaagatctctgatgggatccagcacctgggggccctgcgctgggagctggctctgtgcctcctgctggcctgggtcatctgctacttctgcatctggaagggggtgaagtccacaggcaaggtggtgtacttcacggccacatttccttacctcatgctggtggtcctgttaattcgaggggtgacgttgcctggggcagcccaaggaattcagttttacctgtacccaaacctcacgcgtctgtgggatccccaggtgtggatggatgcaggcacccagatattcttctccttcgccatctgtcttgggtgcctgacagccctgggcagctacaacaagtaccacaacaactgctacagggactgcatcgccctctgcttcctcaacagcggcaccagctttgtggccggctttgccatcttctccatcctgggcttcatgtctcaggagcagggggtgcccatttctgaggtggccgagtcaggccctggcctggctttcatcgcttacccgcgggctgtggtgatgctgcccttctctcctctctgggcctgctgtttcttcttcatggtcgttctcctgggactggatagccagtttgtgtgtgtagaaagcctggtgacagcgctggtggacatgtaccctcacgtgttccgcaagaagaaccggagggaagtcctcatccttggagtatctgtcgtctccttccttgtggggctgatcatgctcacagagggcggaatgtacgtgttccagctctttgactactatgcggccagtggcatgtgcctcctgttcgtggccatcttcgagtccctctgtgtggcttgggtttacggagccaagcgcttctacgacaacatcgaagacatgattgggtacaggccatggcctcttatcaaatactgttggctcttcctcacaccagctgtgtgcacagccacctttctcttctccctgataaagtacactccgctgacctacaacaagaagtacacgtacccgtggtggggcgatgccctgggctggctcctggctctgtcctccatggtctgcattcctgcctggagcctctacagactcggaaccctcaagggccccttcagagagagaatccgtcagctcatgtgcccagccgaggacctgccccagcggaacccagcaggaccctcggctcccgccacccccaggacctcactgctcagactcacagagctagagtctcactgctagggggcaggcccttggatggtgcctgtgtgcctggccttggggatggctgtggagggaacgtggcagaagcagccccatgtgcttccctgcccccgacctggagtggataagacaagaggggtattttggagtccacctgctgagctggaggcctcccactgcaacttttcagctcaggggttgttgaacagatgtgaaaggccagtgccaagagtgtccctctgagacccttgggaagctgggtgggggctggtaggtggggcgagacttgctggcttcgggccctctcatccttcattccattaaatccacattcttcccgctgac

SEQ ID NO: 19703 - DNA, 3739 bp, Homo sapiens
  source 1..3739: mol_type = unassigned DNA
agaaagccgagggtttccgtcgcgaacccccctccccactcgctcagggctctccaatccgcagctctgcgtgcgggggcgcgcgcatccccccgccgtccgtccgtcagctgtctgtctgggtgtctatgcgggcgcagcagtgcacccttccccagcctcgggcgctgcgcagggacagacaaggcattcgcagcgccctgcccgcgctccacgcccgcagccgccagacggcagcgcctgcgtccgtgcccgccccagccggtgcgcgggagccgcgggggcaaaggcgcagtggccagcggaccatctctcgtgccctcgctctctgcgctccggggcagctgagccccggccacccgctctccaagatgaagaagctccagggagctcacctccgcaagcctgtcaccccagacctgctgatgacccccagtgaccagggcgatgtcgacctggatgtggactttgctgcacaccgggggaactggacaggcaagctggacttcctgctgtcctgcattggctactgtgtaggcctggggaatgtctggcgcttcccctatcgagcgtacaccaatggaggaggcgccttcctcgtgccctacttcctcatgctggccatctgtggcatccccctcttcttcctggagctctccctgggccagttctccagcctagggcccctggctgtctggaaaatcagccctctcttcaaaggcgccggcgcagccatgctgctcatcgtgggcttggtggccatctactacaacatgatcatcgcctacgtgctcttctacctcttcgcctccctcaccagcgacctaccctgggagcactgtggcaactggtggaacacagaactctgcctggagcacagagtctccaaggacggcaacggggccctgcccctcaacctcacctgcaccgtcagccccagcgaggagtactggagccgctacgtcctccacatccaaggcagccagggcatcggcagccctggggagatccgctggaacctctgcctctgcctgctgctggcctgggtcatcgtgttcctctgtatcctcaagggtgtgaagtcttcgggcaaggtggtgtatttcacggccacgttcccctacctcatcctgctcatgctgctggtccgcggagtcaccctcccaggggcctggaagggcatccagttctatctcaccccccagttccaccacttgttgtcttccaaggtgtggattgaagctgctcttcagatcttctattccctgggtgtgggcttcggggggctcctcacctttgcctcctacaacacgtttcaccagaacatctatagagacactttcatcgtcactctgggcaacgccatcaccagcatcctggctggctttgccatcttctccgtgctgggctacatgtctcaggagctgggcgtgcctgtggaccaagtagccaaagcaggccctggcctggcctttgtcgtctacccacaggccatgaccatgctgcctctgtcacccttctggtcctttctcttcttcttcatgcttctgactctcggcctagatagccagtttgcttttctggagaccattgtgacagctgtgacagatgagttcccatactacctgcggcccaagaaggcggtgttctcagggctcatctgcgtggccatgtacctgatggggctgatcctcaccactgatgggggcatgtactggctggtccttctggatgactacagcgccagcttcgggctgatggtggtggttatcaccacgtgccttgccgtgacacgggtgtatggcattcagaggttctgccgagacatccacatgatgctgggcttcaagccgggcctctacttcagggcctgctggctgttcctgtccccagccacgctcttggccctcatggtgtatagcatcgtcaagtaccagccctcggagtatggcagttaccgcttcccgccctgggctgagctgctgggcatcctgatgggcctgctgtcctgcctcatgatcccagctggcatgctggtggctgtgcttcgagaagagggctcactctgggagcggctccaacaggccagccggccggccatggactggggaccatcgctggaggagaaccggacgggcatgtatgtggccacgctggctgggagccagtcaccaaagccactgatggtgcacatgcgcaagtacgggggcatcaccagcttcgagaacacggccatcgaggtggaccgtgagattgcagaggaggaggagtcgatgatgtgaggcaggaggcaggcgggcagaaggccctgcccgggacctcacagtcccttcttagaagcctgcaaaggtcagctgtgccctctgggattctgagaggctatgggggggcctgccatagggatgccagtcccccagtgggggtcccttctgcagcctctgcctctcctgaaacctctgacaaccccctacacacacacacaggcatactcagacccactcaaagctgagaatgatccaactcagccctactttgcggatggacatattaaggccaggaggggagggacttgccccaggtcgcatggcagaggggacttgaacccacgcctcctgaccagccagctccctttcccatggggcagccggcaccaccttctcatctctattcagggcctacacccctccctttttggggggagcctgtccccacacaccttagcacaaccagaatcttgagttgggcagggaaggtcagggctacagaggctcttgaggctccgaggccctggggatcaaaggtcaatgagttaggtggggagaaagatccctgggggctcctgtatgcaggactcctgaaggaggtgggagctgagggccctggaggatggggaaggtttgcagagagaggaagaagagggcagggtggggaggagctctgggccagaggatgctgagctgcctgggcagagaccaagagggttggagacactagttttaccaggttacaggagggttcaagacagaaggaaaactaacagagggggagccagggatgatggggtgggcaggggatttgcatgatgaggagtatcattccagatctgtgcagagcggatcggacgggacagggtggagcggggaggcctgtgcaaagtgggaaagagctgccggtggcctgagccagggtgctggggctgcgggtggggaaaggaggccccagcacttcagacaaagaccaccccttcacccactggaccccaagccgcaaaagctggggaggtaggaagggtcactgtgagggcccagggcccctctcttcccatctcccttgtcctggtggccttcagtgtctcttccagttccaggagctgctgggaagctggccttcattgttggtgacagggcaaccatgggactaggaggtggcccatacacatggctggctggtcctgaggccacccaccttgttccaggacatgggcccgggcccggtgtgggggtagacgcagagggcagagggtagcccttggtactgtgggtccctcaaagaggagagtggggtgcagaaatgcctcagcatggctcatgcacacagcattctcccgtggggcagggttccctcatgcaacaggcctccctgtggccagcctctctgcctgtctctcgctgcgtccccccaaccccttgtgttctattggttcattgttaataaatatcaaatgaggtcacgctcctta

SEQ ID NO: 19704 - DNA, 2431 bp, Homo sapiens
  source 1..2431: mol_type = unassigned DNA
atgcgggcgcagcagtgcacccttccccagcctcgggcgctgcgcagggacagacaaggcattcgcagcgccctgcccgcgctccacgcccgcagccgccagacggcagcgcctgcgtccgtgcccgccccagccggtgcgcgggagccgcgggggcaaaggcgcagtggccagcggaccatctctcgtgccctcgctctctgcgctccggggcagctgagccccggccacccgctctccaagatgaagaagctccagggagctcacctccgcaagcctgtcaccccagacctgctgatgacccccagtgaccagggcgatgtcgacctggatgtggactttgctgcacaccgggggaactggacaggcaagctggacttcctgctgtcctgcattggctactgtgtaggcctggggaatgtctggcgcttcccctatcgagcgtacaccaatggaggaggcgccttcctcgtgccctacttcctcatgctggccatctgtggcatccccctcttcttcctggagctctccctgggccagttctccagcctagggcccctggctgtctggaaaatcagccctctcttcaaaggcgccggcgcagccatgctgctcatcgtgggcttggtggccatctactacaacatgatcatcgcctacgtgctcttctacctcttcgcctccctcaccagcgacctaccctgggagcactgtggcaactggtggaacacagaactctgcctggagcacagagtctccaaggacggcaacggggccctgcccctcaacctcacctgcaccgtcagccccagcgaggagtactggagccgctacgtcctccacatccaaggcagccagggcatcggcagccctggggagatccgctggaacctctgcctctgcctgctgctggcctgggtcatcgtgttcctctgtatcctcaagggtgtgaagtcttcgggcaaggtggtgtatttcacggccacgttcccctacctcatcctgctcatgctgctggtccgcggagtcaccctcccaggggcctggaagggcatccagttctatctcaccccccagttccaccacttgttgtcttccaaggtgtggattgaagctgctcttcagatcttctattccctgggtgtgggcttcggggggctcctcacctttgcctcctacaacacgtttcaccagaacatctatagagacactttcatcgtcactctgggcaacgccatcaccagcatcctggctggctttgccatcttctccgtgctgggctacatgtctcaggagctgggcgtgcctgtggaccaagtagccaaagcaggccctggcctggcctttgtcgtctacccacaggccatgaccatgctgcctctgtcacccttctggtcctttctcttcttcttcatgcttctgactctcggcctagatagccagtttgcttttctggagaccattgtgacagctgtgacagatgagttcccatactacctgcggcccaagaaggcggtgttctcagggctcatctgcgtggccatgtacctgatggggctgatcctcaccactgatgggggcatgtactggctggtccttctggatgactacagcgccagcttcgggctgatggtggtggttatcaccacgtgccttgccgtgacacgggtgtatggcattcagaggttctgccgagacatccacatgatgctgggcttcaagccgggcctctacttcagggcctgctggctgttcctgtccccagccacgctcttggccctcatggtgtatagcatcgtcaagtaccagccctcggagtatggcagttaccgcttcccgccctgggctgagctgctgggcatcctgatgggcctgctgtcctgcctcatgatcccagctggcatgctggtggctgtgcttcgagaagagggctcactctgggagcggctccaacaggccagccggccggccatggactggggaccatcgctggaggagaaccggacgggcatgtatgtggccacgctggctgggagccagtcaccaaagccactgatggtgcacatgcgcaagggcacatctgctaggggtcttctctatgcaagaatgacagtatctgccacgtacatccggagcacggacaagatgctgtcctgccttcaaggagcacacagttctgcagaaacttgcttaggtgacttcaaaccagagatctgtggtgaggaagtgacggtggtggggtgatgacatgggagaattccagcaaaatccacctgggagaaccagcagctccactccacggacagagtggatctctgcggcacagcaacgcagcgaccccagcctggtccctcagctgtaagacacacacggggtgcttctcagggcatggtgtttcctgcttgggcaacccacccaccctgccgcttta

SEQ ID NO: 19705 - DNA, 587 bp, Homo sapiens
  source 1..587: mol_type = unassigned DNA
gtggccagcggaccatctctcgtgccctcgctctctgcgctccggggcagctgagccccggccacccgctctccaagatgaagaagctccagggagctcacctccgcaagcctgtcaccccagacctgctgatgacccccagtgaccagggcgatgtcgacctggatgtggactttgctgcacaccgggggaactggacaggcaagctggacttcctgctgtcctgcattggctactgtgtaggcctggggaatgtctggcgcttcccctatcgagcgtacaccaatggaggaggtatgggcctgaggtcctgtcggagggtgtctggggtgatgggccaaggccctggggtacagtgagcttttaggtggcctcagccactgtctcctaggcgaccttgggcagaactcattgaaagtggtttatagtaacttggggctgggaggaaggagtttaccctgtcttgtccttctcatcacccaagcccttccttcctccctctcatccccaggaaggatacccacatggttccctctctaaggctggccaccccacgccctgcacggtgggcagagggagctgcctct

SEQ ID NO: 19706 - DNA, 7347 bp, Homo sapiens
  source 1..7347: mol_type = unassigned DNA
gcactgctgatgaaacctggcgccggaacccgccagccctcggcgcccattcagtccgcgcaggcaggtgtgagcagcgggtcaactacctggcaggcgcgcacgcggccgcgggctcccgctaaccgcagcctccactcctctccccgcgcgccgcgcccccgccccgccccgccccgcccggtctcgccggccgagcgtccgttggtccttgagcgcgtccgacagtctgtctgttcgcgatcctgccggagccccgccgccgccggcttggattctgaaaccttccttgtatccctcctgagacatctttgctgcaagatcgaggctgtcctctggtgagaaggtggtgaggcttcccgtcatattccagctctgaacagcaacatggggtgcaaagtcctgctcaacattgggcagcagatgctgcggcggaaggtggtggactgtagccgggaggagacgcggctgtctcgctgcctgaacacttttgatctggtggccctcggggtgggcagcacactgggtgctggtgtctacgtcctggctggagctgtggcccgtgagaatgcaggccctgccattgtcatctccttcctgatcgctgcgctggcctcagtgctggctggcctgtgctatggcgagtttggtgctcgggtccccaagacgggctcagcttacctctacagctatgtcaccgttggagagctctgggccttcatcaccggctggaacttaatcctctcctacatcatcggtacttcaagcgtagcgagggcctggagcgccaccttcgacgagctgataggcagacccatcggggagttctcacggacacacatgactctgaacgcccccggcgtgctggctgaaaaccccgacatattcgcagtgatcataattctcatcttgacaggacttttaactcttggtgtgaaagagtcggccatggtcaacaaaatattcacttgtattaacgtcctggtcctgggcttcataatggtgtcaggatttgtgaaaggatcggttaaaaactggcagctcacggaggaggattttgggaacacatcaggccgtctctgtttgaacaatgacacaaaagaagggaagcccggtgttggtggattcatgcccttcgggttctctggtgtcctgtcgggggcagcgacttgcttctatgccttcgtgggctttgactgcatcgccaccacaggtgaagaggtgaagaacccacagaaggccatccccgtggggatcgtggcgtccctcttgatctgcttcatcgcctactttggggtgtcggctgccctcacgctcatgatgccctacttctgcctggacaataacagccccctgcccgacgcctttaagcacgtgggctgggaaggtgccaagtacgcagtggccgtgggctccctctgcgctctttccgccagtcttctaggttccatgtttcccatgcctcgggttatctatgccatggctgaggatggactgctatttaaattcttagccaacgtcaatgataggaccaaaacaccaataatcgccacattagcctcgggtgccgttgctgctgtgatggccttcctctttgacctgaaggacttggtggacctcatgtccattggcactctcctggcttactcgttggtggctgcctgtgtgttggtcttacggtaccagccagagcagcctaacctggtataccagatggccagtacttccgacgagttagatccagcagaccaaaatgaattggcaagcaccaatgattcccagctgggctttttaccagaggcagagatgttctctttgaaaaccatactctcacccaaaaacatggagccttccaaaatctctgggctaattgtgaacatttcaaccagcctcatagctgttctcatcatcaccttctgcattgtgaccgtgcttggaagggaggctctcaccaaaggggcgctgtgggcagtctttctgctcgcagggtctgccctcctctgtgccgtggtcacgggcgtcatctggaggcagcccgagagcaagaccaagctctcatttaaggttcccttcctgccagtgctccccatcctgagcatcttcgtgaacgtctatctcatgatgcagctggaccagggcacctgggtccggtttgctgtgtggatgctgataggcttcatcatctactttggctatggcctgtggcacagcgaggaggcgtccctggatgccgaccaagcaaggactcctgacggcaacttggaccagtgcaagtgacgcacagccccgccccccggaggtggcagcagccccgagggacgcccccagaggaccgggaggcaccccaccctccccaccagtgcaacagaaaccacctgcgtccacaccctcactgcagccaaaggtgcaattacttgacctgcagccccagcccaccctcggctctgcagccggttctccgggccctggtcacctccagacagctgcctggccggggccactaggctgcggctggccactgtgtctcctcacttctctgaacaaagcagttcctcccctaccagctcagccccgagctgccgcagcctcaggcagaacggaggtcaccttctctccttatcttgggaaccaggccttcctcccggggactgttctgggattgaaattgtgcatactccaaactttcgcagccatcttcccgctcagccccagacacccagcaatcaagccagatgagtaccacaaaacagtgtgtccccagcagctccccaccccagagccaaatgacagtagtgcacttaaaaaggaaaatcaggcctgttgtccttctccggttgcattcagatgggtcattagggccggaccctgcctgccccttggcttctcagggctttgctctgacaccatgacagctgcccggggctgagggcagctggctccactcaaatgaggaagaagggatcactcccattagggcctgctttgcttatgcatgtgtgtgcacatgcatgtaaaccagggaccttcagctcacggcctccaggcctgggccagttcttgctgctcctgccgtctcccccgactggctgtgtcctgagtaactggaacatgagacagtatctgcaggactggccccatggtggccgagtcagaagtctgtttcctgtgagtcgccaccgttcactcagtcttgccctcccatgctttggagccagtctggtggctcctgtaaggttctcaaggctggtggcagctcagtctggggtcaggacatgtcggggtcatgcgtttctggccctgacataagctgtctggcctctctgtgacatgatgaaattgaaatcaatccacagtccatgaaattgtgacactccaccagattaagttagggcataacattaacttggaaatggccatgtcatcacccctgcggctgtcctatagctgagatgcgtgggtcgcaggggaggtgatttctaggcatattgctgtcccttttgtgtatctgtcatccggatgcttcggaccccacgcctctgcaagtgggagagacccgagcatcctccccacccccatagctccagtgcacgccacccccgtcttgcctgggtcggggcctgcggccagcaccatttcacacacactccttgtagatgggagccagaggaaacctgaacgtgggtggagcgttccactgagtctacttcaggagacagaaggcccatgctgatgggggaggaggagggatgtgggcattttggacaccaggggaaatggaaatgctgctttcaaaacttagtttcctttccatttcttcctagtctggcctttgacacaaatctggtagaaagaagcctgataaattgagggcacttgtaccctccctgtgcccccagaaggttcttggagagaagtgcaagaatttgtgaacacggcggtggagggcgggtggatggccatgggctgagcctccgtatcaggcctgctcaccttgctgggagctttattctgatctcattttgaatgttccagagggagcatcataagagcccagagctccgatttccaaagagtgatattgacatttatggagattggtgttgtaacatattttgataaatactaacttattttgttggggttttggttgtctcttgtcttaggacctggtagttatttgcttgatttttttttccgttattttctacataggcaaagagaattcgagggatagacagtctccaagaaaagtgaagtggtgggagagaattgcttttttcttttttttcttttctctagtttttctttctggctgagatttccgtgcaagacagcacccaatagactatttagagttgacatttgacattttaatgggcgccatggctcattttgtagattgagaaggtgcgtctcccctgctccaagtctcatcatgacagcgtgctgacagctgggagtctgtggccttcctcacgcagaggccttaaagctggacacagaagcacgcctaggctgggcagggatgggacccatgccccctccttagaggacgggcttcctggttaggaaaggacacgtgggggtgccttgcataatagttcactggtcaccgtgcttttatgagtagtgtttttgtgcacttgccaggggttttctctctgtgtgagaggggagtgatttaagcaatggtgtctggagtaagccttacaattttaatagactttttcttatcatatccctcatttctttccctgaaataaaaatacacacaagcaaaaaaaaaatgatagtttcacatctcttagttcccttgcccaaacaagaatattcttagttccactggccaggattttcctacatagtcagaacttacacattactagaggcacacccaccaaggagtattgtgtctacttttatctgtgcaccagccacaaatacccacattggaaagacccatttgtgatgggtaaacatcccttcctgtctcccacaacccctgtgactgccctgcatgtgttcatgacctccgaaggcccaaattcatgaagcagcaaacccagcagatctccacccccctgcctcaggacctctgctgaagagggggatgaagtgggtctccagggaggcagtgggggccttgttggcagctggctcgggagccggcttacaggagggcagctctgcagttgggaggggcaccgtccggaggagaccaggcctctacacaccccccactctacttatcatccctgctcacacacccttgtccaaggctttatgcatcggatttatttttccaaatcaagaggacagtgatagatgcattttccccaggctgtctcagaaaggtcgctaaatgtatactgttgtcagaattgctgagatctccccccacttttggtttttgcagcagtaaaaactctttccactgtgacttattttctctctcaggcagccagccacctggtcccttgtgctgactctagcacagtggccaggatccaatacgagtccaggggtgaccgcaggatggtgggggcagcgggcttctccacctaccccagccaccaaggccctgacgcactgcctcctgcaccttcagcacatccctgtgcacagctggaagggtgcatggcccgctcacctttgttcagatgggtggaaacgctgatgataccagctcctccctgccgtgcccctgccacggagcaggcattgtgaactggctggtgtttgcagtcccacgtggcatggcctccagcccaacccacagtggagactggagacagggcaatgagtctggtggggggcacgtggacatgccccataggggccccacccagacttaacaggcaaggtcctgggcattgcgcgacgcaggactcaatgctaaagcaagcctgcctggctctgtgccagggcccctcttctgattcacacatcccatttttacacagacccttccttcttaataaaggctgacagttctgttggcagccaagaacccacaccatgaagacagggagtgaggggcctttgtgcccaactccagcacagctgcgttctggggtgtgtgagaggcatgttcgtgtctgtgcgctggtggtctcgtgagacagttccgaggacggggaaattgcagggtggtgggggcgtgaggcttatatgtggaactgatgcagagttcgcctgcagacggatctggatatacactatgtataattgttacgtgtaatttaaaatatatctgtttgccatcgtcatgagaagattatatgtaaggctctgaagggagagggagatgtacattctgccaggctcctggggaccttatccgagtcatgaaattgattactgttgatccagtggtgcaagaagctacactccatgtgtcatcacgcttatgactcctaatgtatttttaaggcaaaaaatgtcagccgactccatcttcacccctcgattcctcgagtccagcctttctgtgccagtgcttcactgagccacaacgctctcgccatcgggacccggctgggcctggagtctcggggcacagttgccatggagccctcctgggtcattctacaaatgtgctgagtgccagctgaaaaccccacaggagatggagtaccttggccaagcttaaagagaagattttctcagggtatttattagtgtgtccagcagggtcaggaagcaggatggaaagatgcactcagactgttaatttattaacaaggcaaatgattttgtgtttcttgatgacagactattaagtttgggacttattttcccatttgagaagttataatatatatttaagatgataagtttcctgcttaagttgtgcctttcagcttcaatgagtttaaggagcactaagggtaatgataccaatgagggttggtttattatcaaacctgaatagctgtggtttctccagtaaatattttcttctactgaacatggagccattattaagagttgtgtgttttttattatgtacatttgtatatttttttgcttgtttgatgttctatttttctaatagttttcttttagtttcttaaagttgtgatactagatttagattctgatgctaactgcaaatcaggttggtctctgctgggtctctcctgcttttattttactttaaggacaagtgtagttgtcgtccaccacctttcaaaaaatgtgaaactgccctgcctcccctttttgctgacaacactgtgtacattgaccacttcctaccatactttatgttgtaaaatcaaactcttttgtggtacattatctcatgcttctgcaaattcgaataaattctatggcttccatgtg

SEQ ID NO: 19707 - DNA, 726 bp, Homo sapiens
  source 1..726: mol_type = unassigned DNA
acctcatgtccattggcactctcctggcttactcgttggtggctgcctgtgtgttggtcttacggtaccagccagagcagcctaacctggtataccagatggccagtacttccgacgagttagatccagcagaccaaaatgaattggcaagcaccaatgattcccagctgggctttttaccagaggcagagatgttctctttgaaaaccatactctcacccaaaaacatggagccttccaaaatctctgggctaattgtgaacatttcaaccagcctcatagctgttctcatcatcaccttctgcattgtgaccgtgcttggaagggaggctctcaccaaaggggcgctgtgggcagtctttctgctcgcagggtctgccctcctctgtgccgtggtcacgggcgtcatctggaggcagcccgagagcaagaccaagctctcatttaaggtgagcagctcggcctagggaaggaaccctggtacacagaccctggccctcctgatgcctggccagccctgcgtgggctcagccgggcctgggtgctcccgaggaaggtttttgctagccagcttcaggtaagatggggcaggggtcctgaaggcacagagaggaccagaccctggaaggaggcagcagcccttctcccctggacgtttccctgagtagtcaagggcaggctgacaccttcctgcatgacacaggccaagagagacctcgccagtcc

SEQ ID NO: 19708 - DNA, 547 bp, Homo sapiens
  source 1..547: mol_type = unassigned DNA
gatgtggccagtggtgtggatgtgaatattcatccctgtggaggaaaatagtggggtctctgagatttgattctgaaaccttccttgtatccctcctgagacatctttgctgcaagatcgaggctgtcctctggtgagaaggtggtgaggcttcccgtcatattccagctctgaacagcaacatggggtgcaaagtcctgctcaacattgggcagcagatgctgcggcggaaggtggtggactgtagccgggaggagacgcggctgtctcgctgcctgaacacttttgatctggtggccctcggggtgggcagcacactgggtgctggtgtctacgtcctggctggagctgtggcccgtgagaatgcaggccctgccattgtcatctccttcctgatcgctgcgctggcctcagtgctggctggcctgtgctatggcgagtttggtgctcgggtccccaagacgggctcagcttacctctacagctatgtcaccgttggagagctctgggccttcatcaccggctggaacttaatcctctcctacat

SEQ ID NO: 19709 - DNA, 1946 bp, Homo sapiens
  source 1..1946: mol_type = unassigned DNA
agtcccgggcccggagccagcgcatgcgcccgcctgtgggcgctgtcccggctgcgagggccgtgagctcacggaccgacggaccgacgggcggccggccggacagacggggcagcgcagggagcggggacgcggcgggacagcgacatggccggccacacgcagcagccgagcgggcgcgggaaccccaggcctgcgccctcgccctccccagtcccagggaccgtccccggcgcctcggagcgggtggcgctcaagaaggagatcgggctgctgagcgcctgcaccatcatcatcgggaacatcatcggctcgggcatcttcatctcgcccaagggggtcctggagcactcaggctccgtgggtctggccctgttcgtctgggtcctgggtgggggcgtgacggctctgggctccctctgctatgcagagctgggagtcgccatccccaagtctggcggggactacgcctacgtcacagagatcttcgggggcctggctggctttctgctgctctggagcgccgtcctcatcatgtaccccaccagccttgctgtcatctccatgaccttctccaactacgtgctgcagcccgtgttccccaactgcatcccccccaccacagcctcccgggtgctgtccatggcctgcctgatgctcctgacatgggtgaacagctccagtgtgcgctgggccacgcgcatccaggacatgttcacaggcgggaagctgctggccttgtccctcatcatcggcgtgggccttctccagatcttccaaggacacttcgaggagctgaggcccagcaatgcctttgctttctggatgacgccctccgtgggacacctggccctggccttcctccagggctccttcgccttcagtggctggaacttcctcaactatgtcaccgaggagatggttgacgcccgaaagaacctacctcgcgccatcttcatctccatcccactggtgaccttcgtgtacacgttcaccaacattgcctacttcacggccatgtccccccaggagctgctctcctccaatgcggtggctgtgaccttcggggagaagctgctgggctacttttcttgggtcatgcctgtctccgtggctctgtcaaccttcggagggatcaatggttacctgttcacctactccaggctgtgcttctctggagcccgcgaggggcacctgcccagcctgctggccatgatccacgtcagacactgcacccccatccccgccctcctcgtctgttgcggggccacagccgtcatcatgctcgtgggcgacacgtacacgctcatcaactatgtgtccttcatcaactacctctgctacggcgtcaccatcctgggcctgctgctgctgcgctggaggcggcctgcactccacaggcccatcaaggtgaaccttctcatccccgtggcgtacttggtcttctgggccttcctgctggtcttcagcttcatctcagagcctatggtctgtggggtcggcgtcatcatcatccttacgggggtgcccattttctttctgggagtgttctggagaagcaaaccaaagtgtgtgcacagactcacagagtccatgacacactggggccaggagctgtgtttcgtggtctacccccaggacgcccccgaagaggaggagaatggcccctgcccaccctccctgctgcctgccacagacaagccctcgaagccacaatgagatttttgtagagactgaagcagttgtttctgtttacatgttgtttattgaggaggtgttttggcaaaaaagttttgttttgtttttttctggaaaaaaaagaaaaaagatacgactctcagaagcctgtttaaggaagccctaaaatgtggactgggtttcctgtcttagcactgccctgctagctcttcctgaaaaggcctataaataaacagggctggctgttc

SEQ ID NO: 19710 - DNA, 1462 bp, Homo sapiens
  source 1..1462: mol_type = unassigned DNA
ctgtgtctcgggcagcaatgctgccccctttcctgccccaacatccccagcagacacaagagatggagactatgagctgctctcgtggctgggtctcgggggtcctgcaccctcaggagctgacgctgacgcactccactgcctgtcaccaggaacctacctcgcgccatcttcatctccatcccactggtgaccttcgtgtacacgttcaccaacattgcctacttcacggccatgtccccccaggagctgctctcctccaatgcggtggctgtggtgagtgggcccctgctcggtccctggctcctgcccaggcccctgccccggccttacacatggcctctctactgtgcccacccagaccttcggggagaagctgctgggctacttttcttgggtcatgcctgtctccgtggctctgtcaaccttcggagggatcaatggttacctgttcacctactccaggtgactgcactggggagacgtgggcatggggagggaaggctggggtgcaggtgtgcaccagtcatgccgtgggccagaggaagggacacctgccgggggaggggtctgcctgaagctgggatgatgatcccacacggtaacaagtgtctgatcacaactgggaggcaaagaaagcaagaggcaggcaggctggatgagggggagaactgtccagtggggctgctgggcccggagcaggaggtcagaggcgacagcttaagagggacatcaggtccaaagctgagacccaggatgtggccagtgcccatatctgtccccaacgctaggctgtgcttctctggagcccgcgaggggcacctgcccagcctgctggccatgatccacgtcagacactgcacccccatccccgccctcctcgtctgttgcggggccacagccgtcatcatgctcgtgggcgacacgtacacgctcatcaactatgtgtccttcatcaactacctctgctacggcgtcaccatcctgggcctgctgctgctgcgctggaggcggcctgcactccacaggcccatcaaggtgaaccttctcatccccgtggcgtacttggtcttctgggccttcctgctggtcttcagcttcatctcagagcctatggtctgtggggtcggcgtcatcatcatccttacgggggtgcccattttctttctgggagtgttctggagaagcaaaccaaagtgtgtgcacagactcacagagtccatgacacactggggccaggagctgtgtttcgtggtctacccccaggacgcccccgaagaggaggagaatggcccctgcccaccctccctgctgcctgccacagacaagccctcgaagccacaatgagatttttgtagagactgaagcagttgtttctgtttacatgttgtttattgaggaggtgttttggcaaaaaagttttgttttgtttttttctggaaaaaaaagaaaaaagatacga

SEQ ID NO: 19711 - DNA, 1641 bp, Homo sapiens
  source 1..1641: mol_type = unassigned DNA
tgcgagggccgtgagctcacggaccgacggaccgacgggcggccggccggacagacggggcagcgcagggagcggggacgcggcgggacagcgacatggccggccacacgcagcagccgagcgggcgcgggaaccccaggcctgcgccctcgccctccccagtcccagggaccgtccccggcgcctcggagcgggtggcgctcaagaaggagatcgggctgctgagcgcctgcaccatcatcatcgggaacatcatcggctcgggcatcttcatctcgcccaagggggtcctggagcactcaggctccgtgggtctggccctgttcgtctgggtcctgggtgggggcgtgacggctctgggctccctctgctatgcagagctgggagtcgccatccccaagtctggcggggactacgcctacgtcacagagatcttcgggggcctggctggctttctgctgctctggagcgccgtcctcatcatgtaccccaccagccttgctgtcatctccatgaccttctccaactacgtgctgcagcccgtgttccccaactgcatcccccccaccacagcctcccgggtgctgtccatggcctgcctgatgctcctgacatgggtgaacagctccagtgtgcgctgggccacgcgcatccaggacatgttcacaggcgggaagctgctggccttgtccctcatcatcggcgtgggccttctccagatcttccaaggacacttcgaggagctgaggcccagcaatgcctttgctttctggatgacgccctccgtgggacacctggccctggccttcctccagggctccttcgccttcagtggctggaacttcctcaactatgtcaccgaggagatggttgacgcccgaaagaacctacctcgcgccatcttcatctccatcccactggtgaccttcgtgtacacgttcaccaacattgcctacttcacggccatgtccccccaggagctgctctcctccaatgcggtggctgtgaccttcggggagaagctgctgggctacttttcttgggtcatgcctgtctccgtggctctgtcaaccttcggagggatcaatggttacctgttcacctactccagtgcggggccacagccgtcatcatgctcgtgggcgacacgtacacgctcatcaactatgtgtccttcatcaactacctctgctacggcgtcaccatcctgggcctgctgctgctgcgctggaggcggcctgcactccacaggcccatcaaggtgaaccttctcatccccgtggcgtacttggtcttctgggccttcctgctggtcttcagcttcatctcagagcctatggtctgtggggtcggcgtcatcatcatccttacgggggtgcccattttctttctgggagtgttctggagaagcaaaccaaagtgtgtgcacagactcacagagtccatgacacactggggccaggagctgtgtttcgtggtctacccccaggacgcccccgaagaggaggagaatggcccctgcccaccctccctgctgcctgccacagacaagccctcgaagccacaatgagatttttgtagagactgaagcagttgtttctgtttacatgttgtttattgaggaggtgttttggcaaaaaa

SEQ ID NO: 19712 - DNA, 789 bp, Homo sapiens
  source 1..789: mol_type = unassigned DNA
tgcgagggccgtgagctcacggaccgacggaccgacgggcggccggccggacagacggggcagcgcagggagcggggacgcggcgggacagcgacatggccggccacacgcagcagccgagcgggcgcgggaaccccaggcctgcgccctcgccctccccagtcccagggaccgtccccggcgcctcggagcgggtggcgctcaagaaggagatcgggctgctgagcgcctgcaccatcatcatcgctttctgctgctctggagcgccgtcctcatcatgtaccccaccagccttgctgtcatctccatgaccttctccaactacgtgctgcagcccgtgttccccaactgcatcccccccaccacagcctcccgggtgctgtccatggcctgcctgatgctcctgacatgggtgaacagctccagtgtgcgctgggccacgcgcatccaggacatgttcacaggcgggaagctgctggccttgtccctcatcatcggcgtgggccttctccagatcttccaaggacacttcgaggagctgaggcccagcaatgcctttgctttctggatgacgccctccgtgggacacctggccctggccttcctccagggctccttcgccttcagtggctggaacttcctcaactatgtcaccgaggagatggttgacgcccgaaagaacctacctcgcgccatcttcatctccatcccactggtgaccttcgtgtacacgttcaccaacattgcctacttcacggccatgtccccccaggagctgctctcctccaa

SEQ ID NO: 19713 - DNA, 1431 bp, Homo sapiens
  source 1..1431: mol_type = unassigned DNA
tgcgagggccgtgagctcacggaccgacggaccgacgggcggccggccggacagacggggcagcgcagggagcggggacgcggcgggacagcgacatggccggccacacgcagcagccgagcgggcgcgggaaccccaggcctgcgccctcgccctccccagtcccagggaccgtccccggcgcctcggagcgggtggcgctcaagaaggagatcgggctgctgagcgcctgcaccatcatcatcgctttctgctgctctggagcgccgtcctcatcatgtaccccaccagccttgctgtcatctccatgaccttctccaactacgtgctgcagcccgtgttccccaactgcatcccccccaccacagcctcccgggtgctgtccatggcctgcctgatgctcctgacatgggtgaacagctccagtgtgcgctgggccacgcgcatccaggacatgttcacaggcgggaagctgctggccttgtccctcatcatcggcgtgggccttctccagatcttccaaggacacttcgaggagctgaggcccagcaatgcctttgctttctggatgacgccctccgtgggacacctggccctggccttcctccagggctccttcgccttcagtggctggaacttcctcaactatgtcaccgaggagatggttgacgcccgaaagtgagtggggcccccaactgggccctgggaagcagccaggccctctggtgggacaggcagcctctccgcccagccccactgccacccaaggctcgggctggtcctcggtggcccacgcctgttgccctgcaaaaatggccctgggaagaaagccggggggcttgcattctagcctggccctgttctctctggctatggacacgtcacagccccttgcagggcctcagaaaggctgaatatcatcatcctgctgtaaatagatccagagatttgcatttggcctaaaattatgcatatacacacaatatggtccctacaaatgaagccaatgactgcgtctgatgctcggccagggatctcgacagtaaacctttgcagctgagcgagctgggactggaaagttccaggaagactctgggtctgtggactgggctctggggccattttggggaattttccaggctgattttggctgtatgcgattttatctttctgcacagacatcagaccctgtcctcaggatgtgatggggcccctcccccatctcccatcctaccagcctgtgtccaggtgggggtggggcagggcagacaacagggtccctgtgtctcgggcagcaatgctgccccctttcctgccccaacatccccagcagacacaagagatggagactatgagctgctctcgtggctgggtctcgggggtcctgcaccctcaggagctgacgctgacgcactccactgcctgtcacca

SEQ ID NO: 19714 - DNA, 797 bp, Homo sapiens
  source 1..797: mol_type = unassigned DNA
gcaattctgataattatagtccctggagttatgcagctaattaaaggtcaaacgcagaactttaaagacgccttttcaggaagagattcaagtattacgcggttgccactggctttttattatggaatgtatgcatatgctggctggttttacctcaactttgttactgaagaagtagaaaaccctgaaaaaccttttctgagcggctactgggaaatttctcattagcagttccgatctttgttgccctctcctgctttggctccatgaacggtggtgtgtttgctgtctccagcaccctttgacaatgataatgctcttctctggagacctcgacagtcttttgaatttcctcagttttgccaggtggctttttattgggctggcagttgctgggctgatttatcttcgatacaaatgcccagatatgcatcgtcctttcaaggtgccactgttcatcccagctttgttttccttcacatgcctcttcatggttgccctttccctctattcggacccatttagtacagggattggcttcgtcatcactctgactggagtccctgcgtattatctctttattatatgggacaagaaacccaggtggtttagaataatgtcggagaaaataaccagaacattacaaataatactggaagttgtaccagaagaagataagttatgaactaatggacttgagatcttggcaatctgcccaaggggagacacaaaatagggatttttacttcattttctgaaagtctagagaattacaactttggtgataaacaaaagga

SEQ ID NO: 19715 - DNA, 9645 bp, Homo sapiens
  source 1..9645: mol_type = unassigned DNA
ggtttgtaatgatagggcggcagcagcagcagcagcagcagtggtggaacgaggaggtggagaattgagagcacgatgcatacacaggtgtttctgagtagtaattagatcgctgtgaaggaaaaagcacacctttgagttttcacctgtgaacactatagcgctgagagagacagtctgaaagcagaggaagacatcgatcagtaacaccaagagacaccaaagttgaaagttttgttttctttccctctgttttatttttcccccgtgtgtccctactatggtcagaaagcctgttgtgtccaccatctccaaaggaggttacctgcagggaaatgttaacgggaggctgccttccctgggcaacaaggagccacctgggcaggagaaagtgcagctgaagaggaaagtcactttactgaggggagtctccattatcattggcaccatcattggagcaggaatcttcatctctcctaagggcgtgctccagaacacgggcagcgtgggcatgtctctgaccatctggacggtgtgtggggtcctgtcactatttggagctttgtcttatgctgaattgggaacaactataaagaaatctggaggtcattacacatatattttggaagtctttggtccattaccagcttttgtacgagtctgggtggaactcctcataatacgccctgcagctactgctgtgatatccctggcatttggacgctacattctggaaccattttttattcaatgtgaaatccctgaacttgcgatcaagctcattacagctgtgggcataactgtagtgatggtcctaaatagcatgagtgtcagctggagcgcccggatccagattttcttaaccttttgcaagctcacagcaattctgataattatagtccctggagttatgcagctaattaaaggtcaaacgcagaactttaaagacgccttttcaggaagagattcaagtattacgcggttgccactggctttttattatggaatgtatgcatatgctggctggttttacctcaactttgttactgaagaagtagaaaaccctgaaaaaaccattccccttgcaatatgtatatccatggccattgtcaccattggctatgtgctgacaaatgtggcctactttacgaccattaatgctgaggagctgctgctttcaaatgcagtggcagtgaccttttctgagcggctactgggaaatttctcattagcagttccgatctttgttgccctctcctgctttggctccatgaacggtggtgtgtttgctgtctccaggttattctatgttgcgtctcgagagggtcaccttccagaaatcctctccatgattcatgtccgcaagcacactcctctaccagctgttattgttttgcaccctttgacaatgataatgctcttctctggagacctcgacagtcttttgaatttcctcagttttgccaggtggctttttattgggctggcagttgctgggctgatttatcttcgatacaaatgcccagatatgcatcgtcctttcaaggtgccactgttcatcccagctttgttttccttcacatgcctcttcatggttgccctttccctctattcggacccatttagtacagggattggcttcgtcatcactctgactggagtccctgcgtattatctctttattatatgggacaagaaacccaggtggtttagaataatgtcggagaaaataaccagaacattacaaataatactggaagttgtaccagaagaagataagttatgaactaatggacttgagatcttggcaatctgcccaaggggagacacaaaatagggatttttacttcattttctgaaagtctagagaattacaactttggtgataaacaaaaggagtcagttatttttattcatatattttagcatattcgaactaatttctaagaaatttagttataactctatgtagttatagaaagtgaatatgcagttattctatgagtcgcacaattcttgagtctctgatacctacctattggggttaggagaaaagactagacaattactatgtggtcattctctacaacatatgttagcacggcaaagaaccttcaaattgaagactgagatttttctgtatatatgggttttgtaaagatggttttacacactatagatgtctatactgtgaaaagtgttttcaattctgaaaaaaagcatacatcatgattatggcaaagaggagagaaagaaatttattttacattgacattgcattgcttccccttagataccaatttagataacaaacactcatgctttaatggattatacccagagcactttgaacaaaggtcagtggggattgttgaatacattaaagaagagtttctaggggctactgtttatgagacacatccaggagttatgtttaagtaaaaatccttgagaatttattatgtcagatgttttttcattcattatcaggaagttttagttatctgtcatttttttttttcacatcagtttgatcaggaaagtgtataacacatcttagagcaagagttagtttggtattaaatcctcattagaacaaccacctgtttcactaataacttacccctgatgagtctatctaaacatatgcattttaagccttcaaattacattatcaacatgagagaaatcaccaacaaagaagatgttcaaaataatagtcccatatctgtaatcatatctacatgcaatgttagtaattctgaagttttttaaatttatggctatttttacacgatgatgaattttgacagtttgtgcattttctttatacattttatattcttctgttaaaatatctcttcagatgaaactgtccagattaattaggaaaaggcatatattaacataaaaattgcaaaagaaatgtcgctgtaaataagatttacaactgatgtttctagaaaatttccacttctatatctaggctttgtcagtaatttccacaccttaattatcattcaacttgcaaaagagacaactgataagaagaaaattgaaatgagaatctgtggataagtgtttgtgttcagaagatgttgttttgccagtattagaaaatactgtgagccgggcatggtggcttacatctgtaatcccagcactttgggaggctgagggggtggatcacctgaggtcgggagttctagaccagcctgaccaacatggagaaaccccatctctactaaaaatacaaaattagctgggcatggtggcacatgctggtaatctcagctattgaggaggctgaggcaggagaattgcttgaacccgggaggcggaggttgcagtgagccaagattgcaccactgtactccagcctgggtgacaaagtcagactccatctccaaaaaaaaaagattatatatatatatatatgtgtgtgtatgtgtgtgtgtgtgtgtgtgtgtatatatatatatatatatatacacacacacacacacactttttatatatatatatatatatatatagtggaacttacaaatgagagtaatataatgatgaaattttgaactgttatttataaacatctaaggtaaaatggttagtcatggccagagtatgtttcatcctttaatttttgtccatttgaaaataaggatttttgaaagaattataccaattaaaattattaaaggcaaacatagaattcataaaaaattgtccaaagtagaaatgatgacctataatttggagcatttccaattcagtaatttcaattttgctcttgaaaacatttaatatatatccaagactgacatttctttagctgaacctaacgtttgggtctctgagtgaatttataataactccttccttccttagcatagggttttcaaaatttgatttataattcctatttccagtaaatattgttcatttgtccacatctctccctatgatatgttgctggaggtaagaatttctttcatattcctattttttttttccccatagactaggctcatagaatttaaacaagcaaattttcctgagctttttcttgccaaatgaaagaagactggtaaattctcatagagaggtttgtgtagttcttggctcttcctggggttaatgtgcttatattcacagtggcaaattggtctcagactttaatttatttatttttgatttgaatttctctttaaaagtatcaatttaaaaggtaactagaattattctttctcattttcaaaagtgatttttgcattattaaatttccctgccattgtaatgccatttcacgcagaaaaaaagtcagccagtaattaagaaaaaaagtgatggagattaagtagtattttggcttatttttaggactcatcatgagaagacacagttcctttaatcaggaaattaatatccataattttcactcaaaattgcagtatgtaaagcagattctcaaaaactctcctgaacacttatttatatatatgtttttatataagtaaaatttttctcatatttttatacgatatgcacacacacacatacatgcacatactacttactacatgttctgtacttgtactttgtaccatgcatattcaaatgtttatatacataagtttattataacataaacagtaaaagtaatgaatactgtttaaaataactaatatagtattttttaatttttgtggggatggattctcaaatacttgtgattttaaaagattctaaagctaaaacacaacttgattttaaaaagaatgattctccttacacaattataaatatttgcagtaaatattttccttataatactgttttgaccccatttaaaaagtattagattatattcctttgatccaatgaaaactgaaccttataaatggttagctgaaagtagaccttattcttgtccttctttagaagagtaaagatttgtcctagggaagatggctgacttcggttcccaacatgcgtatgcatttagactgtagctcctcagccctgtggacacaaaatttggacagcttattaggttacgttagcaatgcatgacggtttctccaacactaagatattcacgttgaaacagatttcctgttcgtcttatgtgtctggtaaaattgtttccccaattacaatttgacatatcaatagagggttaacaagagtataattacataacagaattcctcatgaactgtaatcagtctacaggaaaatcattattttatcttgatttgcagatgaatatactgctaagaaagggagcaactctgacctttgttaaagttgatcttttgtaattgaggtataaggtatgaaaagataaaaaaccgaaggccagagaatcaggaaatgaaagatagtatggactgaaggtaacaatattttaatgttatgcaatatagtcagagaaatattaaaaattagttgtttgctgtgcataggtggatctcgcaggaagctaatgaaacctaagcttcagtgcctctcacttagacatgttccattcgaggtcctgaacctaactttgtattaggaattctgtactaattttgttgaagaagaccagcaaagttgtgtacacttctacccccacaaaatctgcattgtccatgtgagtaaagtaaaataattcctgttatttttttctgttagaaataagtatggaggatatgtttttaaaaatttatgagttaattgaaatatccatatataacaagtgactttctcacaatatatatgatgtgatatatagggagatagtttcactttcatcatattttatacgttgattctgaactatagaaaaataataaatgggattttaattatagctcttagttgggaaagaaatatagagagatgtgggatttgaatgcccatgaaagacattttattttacttgaatatattcttgcttcactttaccctccataatatgttgtacattagtgctgatcaagtttacagagttacattttgctttcctaaccattcagtcaggaattaaaatatggcattgtataacaactgggaagaagctcatagtggatataaattagagtagataatgggtcaccttgatagcctctgtttacattacttgtatatgggcaaaataattattacctatacgtgtatttaagcttaattttcatataaacagtatttttaatctatgttaaaatagataatatctaaaagtgtgatctctaggtagtccttagtttattagtactgtacttcaaaaagatttttaaataggtccggcacggtggctcatgcctgtaatcccagcactttgggaggctgaggcgggcgaatcacctgaggtcaggagttcgagatcagcctggccaacatggtgaaaccctgtctcaactaaaaatataaaaattagccgggcgtggtggcaggcgcctgtaatcccagctactcgggaggctgaggcaggagaatcacttgaacccaaggggcagaagctgcagttagccaagatcgcatcattgcactccagcctaggggacaagagcgcgagacttcatctcaaaaaaaaaaaaaaaaaaaaaaaaagatttttaaataatagctaaaggtatgctctctaggtcatccttagtttattagtactgtacttaaaaattattttttaatagtcaattttgggagataattatttctttccttatattttccaattagttggtgtctaaaaataaatgttttgtctaattttagatcaggtatacattcacaaaagcataaatcatagtctcacaggaaattcaccaattttccatatgtcgtgagataactgtcctttctacaacctcataacaatgaatttatataattacctagattttcttagtgtgaatctacccattagttttattttcttggtagttatttttttccctcctctctgttactattggccttaaaatacacagaggacggttacagtgtcctaatagctgttacatgtgtgtgtttcagcgtacttgaatcaagtgtacatttatagtaccaataaccgcctttacagctttacagttaacaattctctcacaaaactgtagagcattaggcatctgagagccatagagggccaactttgttccagagtgaacatgctttttttcctcaacatatacactactgattttttttaaaagtatgactttcaagtgaattaatgtattggttaggagaactgcttgctaagtccttattacctcttgttaaagcctcagaaggccgtgctgaaagccagaggggaaaaaaagagtaatgcacaggtatctcttttgcagtggtgactgtattttgagtaccttgtgtgacagggtattattacagcatcttgtgggaaaacctattaggcctttgcatgttaaagctgtataatttgttgggttgtgagtggtctgacttaaatgtgtattataaaatttagacatcaaattttcctactaactaactttattagatgcatacttggaagcacagtcatatcacactgggaggcaatgcaatgtggttacctggtcctaggtttgaactgtcttatttcaaaagatttctgaattaatttttccctagaatttctccttcattccaaagtacaaacatactttgaagaatgaaacagattgttcccatgaatgtatgctcatactcgactagaaacgatctatgttaaatgactgtgtatatgaattatttcaagtactaccccaaataactttcttattgctctgaaagaagaaaagcaatgtaaatcactatgattattgcacaaacaaccagaattctccaacaattttaagtaatctgatcctcttcttggagaaaattgttacctaatagtttttccttatgaatgttattactactggtataaatcaaatttctataaatttcctacttaagtcttaagaactgggttcttcctttgatgttattcatgttcagaaaggaaacaacactttactcttttaggacaattcctagaatctatagtagtatcaggatatattttgctttaaaatatattttggttattttgaatacagacattggctccaaattttcatctttgcacaatagtatgacttttcactagaacttctcaacatttgggaactttgcaaatatgagcatcatatgtgttaaggctgtatcatttaatgctatgagatacattgttttctccctatgccaaacaggtgaacaaacgtagttgttttttactgatactaaatgttggctacctgtgattttatagtatgcacatgtcagaaaaaggcaagacaaatggcctcttgtactgaatacttcggcaaacttattgggtcttcattttctgacagacaggatttgactcaatatttgtagagcttgcgtagaatggattacatggtagtgatgcactggtagaaatggtttttagttattgactcagaattcatctcaggatgaatcttttatgtctttttattgtaagcatatctgaatttactttataaagatggttttagaaagctttgtctaaaaatttggcctaggaatggtaacttcattttcagttgccaaggggtagaaaaataatatgtgtgttgttatgtttatgttaacatattattaggtactatctatgaatgtatttaaatatttttcatattctgtgacaagcatttataatttgcaacaagtggagtccatttagcccagtgggaaagtcttggaactcaggttacccttgaaggatatgctggcagccatctctttgatctgtgcttaaactgtaatttatagaccagctaaatccctaacttggatctggaatgcattagttatgaccttgtaccattcccagaatttcaggggcatcgtgggtttggtctagtgattgaaaacacaagaacagagagatccagctgaaaaagagtgatcctcaatatcctaactaactggtcctcaactcaagcagagtttcttcactctggcactgtgatcatgaaacttagtagaggggattgtgtgtattttatacaaatttaatacaatgtcttacattgataaaattcttaaagagcaaaactgcattttatttctgcatccacattccaatcatattagaactaagatatttatctatgaagatataaatggtgcagagagactttcatctgtggattgcgttgtttcttagggttcctagcactgatgcctgcacaagcatgtgatatgtgaaataaaatggattcttctatagctaaatgagttccctctggggagagttctggtactgcaatcacaatgccagatggtgtttatgggctatttgtgtaagtaagtggtaagatgctatgaagtaagtgtgtttgttttcatcttatggaaactcttgatgcatgtgcttttgtatggaataaattttggtgcaatatgatgtcattcaactttgcattgaattgaattttggttgtatttatatgtattatacctgtcacgcttctagttgcttcaaccattttataaccatttttgtacatattttacttgaaaatattttaaatggaaatttaaataaacatttgatagtttacataa

SEQ ID NO: 19716 - DNA, 10103 bp, Homo sapiens
  source 1..10103: mol_type = unassigned DNA
atctgaataattgaggagctgttcagcagcagcggctgcctcctgccttcctttgccgccaccaccacttcccatcccagctagagagacagctccgcgcagtaagtgcggactgccagccaccagccttggcagccagctcgtcgcctccagccccgaccccgacattcatgcccaggagaaggctgcactgggtccctctgggcctttcctaaaagggagatccctgttcactagatgagttccagaaccatccactaaggctttgtagcccccttccatcagctgaccttcactgcatcccctatcgctcaagatgagtggcttcttcacctcgctggacccccggcgggtgcagtggggagctgcctggtatgcaatgcactccaggatcctacgcaccaaaccagtggagtccatgctagagggaactgggaccaccacggcacatggaactaagctagcccaggtactcaccacagtggacctcatctctcttggcgttggcagctgtgtgggcactggcatgtatgtggtctctggcctggtggccaaggaaatggcaggacctggtgtcattgtgtccttcatcattgcagccgtcgcatccatattatcaggcgtctgctatgcagagtttggagttcgagtccccaagaccacaggatctgcctacacctacagctatgtcactgttggggaatttgtggcatttttcattggctggaacctgatcctggagtacctgattggcactgcggccggagccagtgctctgagcagcatgtttgactcactagccaaccacaccatcagccgctggatggcggacagcgtgggaaccctcaatggcctggggaaaggtgaagaatcatacccagaccttctggctctgttgatcgcggtcatcgtgaccatcattgttgctctgggggtgaagaattccataggcttcaacaatgttctcaatgtgctgaacctggcagtatgggtgttcatcatgatcgcaggcctcttcttcatcaatgggaaatactgggcggagggccagttcttgccccacggctggtcaggggtgctgcaaggagcagcaacatgcttctacgctttcattggctttgacatcatcgccaccactggagaggaagccaagaatcccaacacgtccatcccttatgctatcactgcctccctggtcatctgcctgacagcatatgtgtctgtgagcgtgatcttaactctgatggtgccatattataccattgacacggaatccccactcatggagatgtttgtggctcatgggttctatgctgccaaattcgtagtggccattgggtcggttgcaggactgacagtcagcttgctggggtccctcttcccgatgccgagggtcatttatgccatggctggtgacgggctccttttcaggttcctggctcacgtcagctcctacacagagacaccagtggtggcctgcatcgtgtcggggttcctggcagcgctcctcgcactgttggtcagcttgagagacctgatagagatgatgtctatcggcacgctcctggcctacaccttggtctctgtctgtgtcttgctccttcgataccaacctgagagtgacattgatggttttgtcaagttcttgtctgaggagcacaccaagaagaaggagggcattctggctgactgtgagaaggaagcttgttctcctgtgagtgagggggatgagttttctggcccagccaccaacacatgtggggccaagaacttaccatccttgggagacaatgagatgctcatagggaaatcagacaagtcaacctacaacgtcaaccaccccaattacggcaccgtggacatgaccacaggcatagaagctgatgaatccgaaaatatttatctcatcaagttaaagaagctgattgggcctcattattacaccatgagaatccggctgggccttccaggcaaaatggaccggcccacagcagcgacggggcacacggtgaccatctgcgtgctcctgctcttcatcctcatgttcatcttctgctccttcatcatctttggttctgactacatctcagagcagagctggtgggccatccttctggttgttctgatggtgctgctgatcagcaccctggtgtttgtgatcctgcagcagccagagaaccccaagaagctgccctacatggccccttgcctcccctttgtgcctgcctttgccatgctggtgaacatctatctcatgctaaagctctccaccatcacatggatccggtttgcggtctggtgctttgtgggtctgctcatttattttggatatggcatctggaacagcaccctggaaatcagcgctcgagaagaggccctgcaccaaagcacgtaccaacgctacgacgtggatgaccccttctcagtggaggagggtttctcctacgccacagagggcgagagccaggaggactggggcgggcccactgaagacaaaggcttctattaccaacagatgtcagatgcgaaggcaaacggccggacaagtagcaaagcgaagagcaaaagcaaacacaaacagaactcagaggccctgattgcaaatgatgagttagattactctccagagtaggagaaacacacaagtgggtagaaatggtgatgactgattttcagtaacttaacctgtgggctagaaggtgaaaacttttttggctctcatttcacaaatccagccttccccaaattcaatccctagtcatagcctgtcatttgctacttttgctcttcaggatagttctgttgaagggcttaacctgggtcccctaactggtcgccttgttaaataaaataaataaataaacaagaggctatatgaaattccatcttaggtgcaaccaccagagctgatggtaccaaatgtttcctaggcctttgctttgctggttgaagcccaagcaggggctctgggcagaaggcagaatttcagtcacctgagacatggggacaaagctctgttcttggcatgtcaggctgagtgctgctccccgaggtcagggtgggtagatgggcattggcacttcctgagcaagcatcattttatcctgcaatctcacccaaaattaattcatggaaaagacacatgcttctttttattcaccaacattctcacagcttccaaactataattttaggatccagcaaagttcagggactctggaccattttcccaatggtttcagattcaccataaagcagtcaggcagacccagtgatatggtaagaagcaccatcaaagctctatgtaaatgcccagaagaaaattaaataaccatatcttgcggtaaaagccagaagggcattggcagaaattaactctctgtcatggcctctcttatatcagactgcagctcctggtgatatgatgaaagcgggcaaaggtggagcatgatttcatggcactgatatgccttgaaaaagtaggttgtttgttttataatcagataaaaatttttacaaggagaagtgagccagccactgagatcacattgcaaattctctttcatatttctaaaattataaattctaaagtttttgagataggcaaccacttgattggtgtgtgctactctgaaaacaaaataggctgaagtatagcgacttaggtagttgcattccatgagatcacatttcacttctgaaccttattccttggggctagctcactttcagaggtgtatttttttttcctgttatttcccagagtagtttcactgaagcccagagaaatatctacctggtaagatgtaaatttgggccataaaaggggctattaaaagaattttctcagaaatagaatagatgagagaatttgcaaaggaaaaaaacacacatgggctacaatataaattctactcttgggttacaagaattcctgtggctgcactgagatacgtacaaatgtatgtgaaggcacaatttgaatcaagctatcatagaattaaccaagctattaaaattaatcaagctattaataaaatctctgtgaggatttcctgaaagagggacaaaagaagaaattccttgtcctttctctcctggatgtatcagtatgccaaacgttttccagaacatattcgctagcactcaagtctgttctttctgaaaggctgaggctcatgccatcttggcatgctttaggattatggcaaggaggtaaaagtccattttttcattcaactaacactggttgagaatagacccaatgctaagtgacaggaatgaatagaagcatggcacttgcccttgggggctacagtccatggatgagcagcactggagcctggtaaatgcagataaaacaacaaacttgacaagtctccaggctgatgcactgggttttaacatacatataaagatgaattgaaactagtttttaaaaaatatgctttaaataaattacatatcgtaatcatagccaatgtataccattaaactaaaataactgcaattttctagatattttttattcttctgtagtcattgtttagaactctggtttcctgaggtcattttgtcattttaatatcatgcttgacaatgctatgttttctcttccctagagttaaccataaagatacagtgcctactctgtgaaatacagcattaggaattaattataaactaattatcagtcatcttttgaaaacaaagttttgaattggctataggactcaacaaatctgcctggtgtaaatagaatctgttaagcttgatacatatctagatagatgaggaggggttgtattcattaagcatgagaatagagaaataggagtgcaaaatggcaaaatcttaacgtgggtgaaagagcttccttttactagtgaggtttaagtattaaagtaacaatagcctggtggcagatgaatgcaatttctataggatgggaatggaaaatgtatgctttggttaacaccattgctgttgacttcatgcagattctattaagcactctcatttcaggagccatttttcccacatagtatattagtatattttaagcttagctccctttatttttctaaagttgataaatcacctccctagcaaccttagttttaaaaaaaaaatcactaagatagaaaaagtattttcaggtacatagacatgtttgtcctcaggtttacctgcttctgtgaacagtcccagattttacaatgcagttttcaaataccatcaatcactacaatgacaatattactattttcttaacaggtttctaaacgatgtatgtgtgggatcacattaaaagtaagatcaccttataattatcttagaaactttgccccttgaagggagtccaaggaagacctacattttattgaattctgaatagcaaaagctctccgagtgagatttcattgtgtggatttgtggtttggagccaattacttgattttcttcagattttattctacttatttattggtactctgcttcatttcaaaaggatttgaggcagctactaaaatatatataatacaaaacaaaaattaagtgaggaactcagagcaaacaaaaatagaaacagaaaggataagacaaaactagacgtatatttagtacataaatgcagaaccctgacatgctttactaaatttgccaatgagtgacaccatgaaaaataatagaattagtggtaatgacaagaagaagtacttctgcatgataagaacaaatctttccccatgcaggtagaggtttgaaatagcatagatcattaaaatccacaggtaagcttcaaacctagattttgctagctacatgtgcctggcatatagtgtgtattcaagaaatacctgatgattgacagaatgaatgaattggaggaaaatgaaatatttattcaacaattacttgtggagtgcctattatgtactatggcagatattgatatcgtaagtcagataaaaatccagctcttaagaagtagaggaaatagagcttggtgtggtggcatgtgcctatgatcccagatagttgagagactgagggaggaggatcacttgagcccaggagttcaaggctgcagtgagctatgatcacaccactgtactccagcctgggtaacagaagaataccctgtctcttaaaaaggaaaatcaaataggggaaatgggatatataaataaagaacaatagtgaatgtgtcaggtgagatgacggacttgtaatgtgctgtggggggtcaaatatgaagaaggccttcttcctctggaaaggtcataaagaatgtcacacttgtgttggaacttgtgaagtgggtagaattttatcaagtagaaatgagagaaaggcatgccaagcaaaggatcggcatgaataaggtctactagtttgtggtcctctggctaagaatttgtgctgtgcctccattaagagaaagcaaggagctagtttgcctggagcacatgatttatgcatgacttatacatgcaacaataagaaataatgctaggaaggcaggtgagggatcactcacagagagacttgaatgtcacactgagctgactggctttcctcgggtgagagagtgggaaataattggggaactgacgaaagtgtgaatccaggaaggctgaactttaagaaagctgagacggtggcttccttacctatgcaaggaactaacaagccacatatacactccaaattgatttaacaaattaaagagaaaaatagctgtactttgagtcctgtgtctgcattcatcattaacctaagaaaatacagccatttaatacgtggacaagcaacacaatttaacagccactttaaagttttcaacaataggtttcaacaactaaacctaacaactttttatatctatctaatctaaacagtaaaatctcagctccaggttttactgagcttgagtgctacttttttttttttagacagagtctcattctgtcacccaggctggagtgcagtggcatgatcttggctcactgcaaccttcacctcccgggttcaagctattctcctgcctcagcctcccaagcagctgggattataggcgtgtgccagttctacttcttagtaacaaactagtagctaatcaaatgcctacataatggtcatgataaatctgtttaaataaatggcgggcggaagggagttgttgaatttaacaatccatccttcttcagaatctataggtcagccagaatataaatctagtaattattgaaaaacaaaacacaaactccttcaaagaaatctctctcctctattctgctgaaaagggttggtaaacctgacatcctttcttttattggaagacaaatccaacatttgttagacatccaacatttgttggaagtctaccttacaagaaaccacctcttatctgcaacataaacagaagctacatcaggttgaaaatccacatagaagactggagaaaattgccgtcccctttcgcactaggttttaccaggggcccaagatgtcagaggaaagtccgcggagggccaaacacaggtttacctaattatgaatctcagattagaatgtcttattgtgtggaaaagtcagaactcaggaaatgtgtctgaagccagagcgggggtctgcttacggagtctacgcagcgggtaggggtccactattggagtataaacctcaggtcagtgagtagtgcagaggtgtccctaacttccaatggagggaaagagaggagagcaaaggaaacacatccagaagtcgccacgagggctgtgtgccagcgctccattttcatgctgtttggaacaagacgtgtcaaggaagatgtttctatccaaagtcttcatggagcctctgcttcccctgtacctgtgtagctccctgaaactgaggacccacgtgtctgcaaagacctctggagatcctaagagagagaggcaccagcaggtaaccagtggtggcctggccacgaaagagtatttgaaattcaacagtgagcaagtgcagaaacagcatcccaaaccgcaggccccaccacacgcaggaaccagaaagctgaagtttcaccaaggagtttacttagtatttctcgctgggaatggggatgggtagcaaaaagcccctttcatgtacataatggttggtcctatgtcctacttttattttctctaagagttttagaagaaaggctgttttaatttttttttctccttaagagcaacttcctttttaaaatgctttcctcttcttgtcctgcttgagtaatgcaggcatcattctgaaatcattctgaaacagctaggcagtcgccttttgccaaaattacttctctaagaaaatagagtgttcttttttttaggacttagaacccacaaggggtgagtggaagttttgtagcccatcaaaggtgaatatgtgttctgcagtatcaactaaaacagtgtacaaaatcattaaactgggccgggcgcagtggctcatgcctgtaatcccagcactttgggaggccgaggcgggtggatcacctgaggccaggagttcaagaccagcctgaccaacatggagaaaccccatctctactaaaaatacaaaattagccaggtgtggtgttgcatgcctgtaatcccagctattagggaggctgaggcaggagaatcgcttgaacccgggaggcagaggttgcagtgagtcgagatcacaccattgcactccagcctgggcaataagagcaaaactccgtctcaaaaataataataataataatttaactgtgttctgcacacacagaattacaaaatccctataggactttcacagatagctttgggcttaaggtcttcggacaacaggtagttctaatttcttactctttgggacatttagtacatgttggtacacataaggaaagaaaatggcttatattagagctaggaaacaggggcagcctggatttttatggtaggaactcactctgtgcttttttttttttctgttaagttttcttgacactgacttcggtaacattggctaaagggaattgtgagtcatgtgaatttcacctgcagtgcagactttaaaggactgtgttcattctgatttggggatgaagagaatgttccatgcacatctattgattggtcttggcagttgctgatacgcttgtctcattcacactcccaaaggcgaggatttaccctagaaatcataaacccccactttccaaagcaaagatgctgttaatgttatgatggtgcataaatacctcaactgtctgggctgagagagggggctgcaggtttttaagagagcagctatagtcctcattccatgtagtcacatcatctgatgacaggactccacattctagcttttctcactgtggaaaagaaacgttactgtttaattaatatccaaagttataaatacagcttgtaaattttactaacttgtttctttttcgtttcgtccttgagaagtacaacttgcatttacagatggtaattcctagtgttgttctctgctatctttttttggtatgaaattgctgtatttgttaaagtttgttcgttttgtggtttttaattcccattggtgtgctgtacaatgtagtgtatcatgaagaaagaaataatatgcagatgtattatgaaatgtgttttattttcaaatgtgtggtgttgacaatatattgatttatcaagatactaagggaaaattctaaatttaacaaaatgtgtatattttaataaatgcataaagctttattgtgtgcctttaaatttaaaaatgggtttataaagaaagtcagaaacaaaagtgtcttactataaaatatccatagtaatgtaaagcttttacacgagactaccaaaaaaaaagaaagaaaagaaaaaggagccttcccatattttgttaaccttaaccagtatctgaagtctgttactttttttccattcttaaatggagatgaataagtgaatttcgccttaagtgtttcaattgtcctttgtagaaaagccagataaatgagttcactttgaattgcattattgtggaaaattcattttcagaataaaacattttaaaaagta

SEQ ID NO: 19717 - DNA, 473 bp, Homo sapiens
  source 1..473: mol_type = unassigned DNA
ttcctttgccgccaccaccacttcccatcccagctagagagacagctccgcgcagtaagtgcggactgccagccaccagccttggcagccagctcgtcgcctccagccccgaccccgacagggtctcactctgttgccgaggctagagtacggcggtgcaattatggcttactgcaaccttgacctagcagggctcaactgatcctcccacctcagcctccggactagctggaactacaggcatgcgccaccacacctggctaatttttgtattttttttgtagagacagggttttgccatgttgcccaggctgatctcaaactcctaggctcaagcagtcatctgccttggcctcccaaagtgctggcatgaaccactgtgtctggcctactatttggacttttaaggtgattttctcctctttaggcaaggaacatcaagcctttcctagcataagaccaaaaacaaacca

SEQ ID NO: 19718 - DNA, 2236 bp, Homo sapiens
  source 1..2236: mol_type = unassigned DNA
aagccgcagctttgaagcctgagcggccgaactcggcagctccaacccaactcggcttaactccgcctcaccgagcccagtccaagactctgtgctccctaggtttgcaacagctctctgatcatcttcttcaattcctgctaggatgccgtggcaagcatttcgcagatttggtcaaaagctggtacgcagacgtacactggagtcaggcatggctgagactcgccttgccagatgcctaagcaccctggatttagtggccctgggtgtgggcagcacattgggtgcaggcgtgtatgtcctagctggcgaggtggccaaagataaagcagggccatccattgtgatctgctttttggtggctgccctgtcttctgtgttggctgggctgtgctatgcggagtttggtgcccgggttccccgttctggttcggcatatctctacagctatgtcactgtgggtgaactctgggccttcaccactggctggaacctcatcctctcctatgtcattggtacagccagtgtggcccgggcctggagctctgcttttgacaacctgattgggaaccacatctctaagactctgcaggggtccattgcactgcacgtgccccatgtccttgcagaatatccagatttctttgctttgggcctcgtgttgctgctcactggattgttggctctcggggctagtgagtcggccctggttaccaaagtgttcacaggcgtgaaccttttggttcttgggttcgtcatgatctctggcttcgttaagggggacgtgcacaactggaagctcacagaagaggactacgaattggccatggctgaactcaatgacacctatagcttgggtcctctgggctctggaggatttgtgcctttcggcttcgagggaattctccgtggagcagcgacctgtttctatgcatttgttggtttcgactgtattgctaccactggagaagaagcccagaatccccagcgttccatcccgatgggcattgtgatctcactgtctgtctgctttttggcgtattttgctgtctcttctgcactcaccctgatgatgccttactaccagcttcagcctgagagccctttgcctgaggcatttctctacattggatgggctcctgcccgctatgttgtggctgttggctccctctgtgctctttctaccagcctcctgggctccatgttccccatgcctcgggtgatctacgcgatggcagaggatggcctcctgttccgtgtacttgctcggatccacaccggcacacgcaccccaatcatagccaccgtggtctctggcattattgcagcattcatggcattcctcttcaaactcactgatcttgtggacctcatgtcaattgggaccctgcttgcttactccctggtgtcgatttgtgttctcatcctcaggtatcaacctgatcaggagacaaagactggggaagaagtggagttgcaggaggaggcaataactactgaatcagagaagttgaccctatggggactatttttcccactcaactccatccccactccactctctggccaaattgtctatgtttgttcctcattgcttgctgtcctgctgactgctctttgcctggtgctggcccagtggtcagttccattgctttctggagacctgctgtggactgcagtggttgtgctgctcctgctgctcattattgggatcattgtggtcatctggagacagccacagagttccactccccttcactttaaggtgcctgctttgcctctcctcccactaatgagcatctttgtgaatatttaccttatgatgcagatgacagctggtacctgggcccgatttggggtctggatgctgattggctttgctatctacttcggctatgggatccagcacagcctggaagagattaagagtaaccaaccctcacgcaagtctagagccaaaactgtagaccttgatcccggcactctctatgtccactcagtttgacatcgtcacacctaaatgctgtctggtcccctgcacaataatggagagtactcctgaccccagtgacagctagccctcccctgtgatggtggtggtggatactaatacagttctgtacgatgtgaaggatgtgtctttgctatttcttgtctattttaacccgtctgcttctaaatgatgtctagctgcttaccaactttaaaaaatgatattaaaagaaagtagaaaaat

SEQ ID NO: 19719 - DNA, 2235 bp, Homo sapiens
  source 1..2235: mol_type = unassigned DNA
ataaggggcgcttggcgcgcaacgaccccaagccgcagctttgaagcctgagcggccgaactcggcagctccaacccaactcggcttaactccgcctcaccgagcccagtccaagactctgtgctccctaggtttgcaacagctctctggatgccgtggcaagcatttcgcagatttggtcaaaagctggtacgcagacgtacactggagtcaggcatggctgagactcgccttgccagatgcctaagcaccctggatttagtggccctgggtgtgggcagcacattgggtgcaggcgtgtatgtcctagctggcgaggtggccaaagataaagcagggccatccattgtgatctgctttttggtggctgccctgtcttctgtgttggctgggctgtgctatgcggagtttggtgcccgggttccccgttctggttcggcatatctctacagctatgtcactgtgggtgaactctgggccttcaccactggctggaacctcatcctctcctatgtcattggtacagccagtgtggcccgggcctggagctctgcttttgacaacctgattgggaaccacatctctaagactctgcaggggtccattgcactgcacgtgccccatgtccttgcagaatatccagatttctttgctttgggcctcgtgttgctgctcactggattgttggctctcggggctagtgagtcggccctggttaccaaagtgttcacaggcgtgaaccttttggttcttgggttcgtcatgatctctggcttcgttaagggggacgtgcacaactggaagctcacagaagaggactacgaattggccatggctgaactcaatgacacctatagcttgggtcctctgggctctggaggatttgtgcctttcggcttcgagggaattctccgtggagcagcgacctgtttctatgcatttgttggtttcgactgtattgctaccactggagaagaagcccagaatccccagcgttccatcccgatgggcattgtgatctcactgtctgtctgctttttggcgtattttgctgtctcttctgcactcaccctgatgatgccttactaccagcttcagcctgagagccctttgcctgaggcatttctctacattggatgggctcctgcccgctatgttgtggctgttggctccctctgtgctctttctaccagcctcctgggctccatgttccccatgcctcgggtgatctacgcgatggcagaggatggcctcctgttccgtgtacttgctcggatccacaccggcacacgcaccccaatcatagccaccgtggtctctggcattattgcagcattcatggcattcctcttcaaactcactgatcttgtggacctcatgtcaattgggaccctgcttgcttactccctggtgtcgatttgtgttctcatcctcaggtatcaacctgatcaggagacaaagactggggaagaagtggagttgcaggaggaggcaataactactgaatcagagaagttgaccctatggggactatttttcccactcaactccatccccactccactctctggccaaattgtctatgtttgttcctcattgcttgctgtcctgctgactgctctttgcctggtgctggcccagtggtcagttccattgctttctggagacctgctgtggactgcagtggttgtgctgctcctgctgctcattattgggatcattgtggtcatctggagacagccacagagttccactccccttcactttaaggtgcctgctttgcctctcctcccactaatgagcatctttgtgaatatttaccttatgatgcagatgacagctggtacctgggcccgatttggggtctggatgctgattggctttgctatctacttcggctatgggatccagcacagcctggaagagattaagagtaaccaaccctcacgcaagtctagagccaaaactgtagaccttgatcccggcactctctatgtccactcagtttgacatcgtcacacctaaatgctgtctggtcccctgcacaataatggagagtactcctgaccccagtgacagctagccctcccctgtgatggtggtggtggatactaatacagttctgtacgatgtgaaggatgtgtctttgctatttcttgtctattttaacccgtctgcttctaaatgatgtctagctgcttaccaactttaaaaaatgatattaaaagaaagtag

SEQ ID NO: 19720 - DNA, 3983 bp, Homo sapiens
  source 1..3983: mol_type = unassigned DNA
gtcctttcacgcgtgtcttcgtgttggtgcgcttttcactggtcataaagtgctgctcacggccgtgaactgctacagcgtgaaggccgccacccgggtccaggatgcctttgccgccgccaagctcctggccctggccctgatcatcctgctgggcttcgtccagatcgggaagggtgatgtgtccaatctagatcccaacttctcatttgaaggcaccaaactggatgtggggaacattgtgctggcattatacagcggcctctttgcctatggaggatggaattacttgaatttcgtcacagaggaaatgatcaacccctacagaaacctgcccctggccatcatcatctccctgcccatcgtgacgctggtgtacgtgctgaccaacctggcctacttcaccaccctgtccaccgagcagatgctgtcgtccgaggccgtggccgtggacttcgggaactatcacctgggcgtcatgtcctggatcatccccgtcttcgtgggcctgtcctgcttcggctccgtcaatgggtccctgttcacatcctccaggctcttcttcgtggggtcccgggaaggccacctgccctccatcctctccatgatccacccacagctcctcacccccgtgccgtccctcgtgttcacgtgtgtgatgacgctgctctacgccttctccaaggacatcttctccgtcatcaacttcttcagcttcttcaactggctctgcgtggccctggccatcatcggcatgatctggctgcgccacagaaagcctgagcttgagcggcccatcaaggtgaacctggccctgcctgtgttcttcatcctggcctgcctcttcctgatcgccgtctccttctggaagacacccgtggagtgtggcatcggcttcaccatcatcctcagcgggctgcccgtctacttcttcggggtctggtggaaaaacaagcccaagtggctcctccagggcatcttctccacgaccgtcctgtgtcagaagctcatgcaggtggtcccccaggagacatagccaggaggccgagtggctgccggaggagcatgcgcagaggccagttaaagtagatcacctcctcgaacccactccggttccccgcaacccacagctcagctgcccatcccagtccctcgccgtccctcccaggtcgggcagtggaggctgctgtgaaaactctggtacgaatctcatccctcaactgagggccagggacccaggtgtgcctgtgctcctgcccaggagcagcttttggtctccttgggccctttttcccttccctcctttgtttacttatatatatattttttttaaacttaaattttgggtcaacttgacaccactaagatgattttttaaggagctgggggaaggcaggagccttcctttctcctgccccaagggcccagaccctgggcaaacagagctactgagacttggaacctcattgctaccacagacttgcactgaagccggacagctgcccagacacatgggcttgtgacattcgtgaaaaccaaccctgtgggcttatgtctctgccttagggtttgcagagtggaaactcagccgtagggtggcactgggagggggtgggggatctgggcaaggtgggtgattcctcccaggaggtgcttgaggccccgatggactcctgaccataatcctagccccgagacaccatcctgagccagggaacagccccagggttggggggtgccggcatctcccctagctcaccaggcctggcctctgggcagtgtggcctcttggctatttctgtgtccagttttggaggctgagttctggttcatgcagacaaagccctgtccttcagtcttctagaaacagagacaagaaaggcagacacaccgcggccaggcacccatgtgggcgcccaccctgggctccacacagcagtgtcccctgccccagaggtcgcagctaccctcagcctccaatgcattggcctctgtaccgcccggcagccccttctggccggtgctgggttcccactcccggcctaggcacctccccgctctccctgtcacgctcatgtcctgtcctggtcctgatgcccgttgtctaggagacagagccaagcactgctcacgtctctgccgcctgcgtttggaggcccctgggctctcacccagtccccacccgcctgcagagagggaactagggcaccccttgtttctgttgttcccgtgaatttttttcgctatgggaggcagccgaggcctggccaatgcggcccactttcctgagctgtcgctgcctccatggcagcagccagggacccccagaacaagaagaccccgcaggatccctcctgagctcggggggctctgccttctcaggccccgggcttcccttctccccagccagaggtggagccaagtggtccagcgtcactccagtgctcagctgtggctggaggagctggcctgtggcacagccctgagtgtcccaagccgggagccaacgaagccggacacggcttcactgaccagcggctgctcaagccgcaagctctcagcaagtgcccagtggagcctgccgcccccgcctgggcaccgggaccccctcaccatccagtgggcccggagaaacctgatgaacagtttggggactcaggaccagatgtccgtctctcttgcttgaggaatgaagacctttattcacccctgccccgttgcttcccgctgcacatggacagacttcacagcgtctgctcataggacctgcatccttcctggggacgaattccactcgtccaagggacagcccacggtctggaggccgaggaccaccagcaggcaggtggactgactgtgttgggcaagacctcttccctctgggcctgttctcttggctgcaaataaggacagcagctggtgccccacctgcctggtgcattgctgtgtgaatccaggaggcagtggacatcgtaggcagccacggccccgggtccaggagaagtgctccctggaggcacgcaccactgcttcccactggggccggcggggcccacgcacgacgtcagcctcttaccttcccgcctcggctaggggtcctcgggatgccgttctgttccaacctcctgctctgggacgtggacatgcctcaaggatacagggagccggcggcctctcgacggcacgcacttgcctgttggctgctgcggctgtgggcgagcatgggggctgccagcgtctgttgtggaaagtagctgctagtgaaatggctggggccgctggggtccgtcttcacactgcgcaggtctcttctgggcgtctgagctggggtgggagctcctccgcagaaggttggtggggggtccagtctgtgatccttggtgctgtgtgccccactccagcctggggaccccacttcagaaggtaggggccgtgtcccgcggtgctgactgaggcctgcttccccctccccctcctgctgtgctggaattccacagggaccagggccaccgcaggggactgtctcagaagacttgatttttccgtccctttttctccacactccactgacaaacgtccccagcggtttccacttgtgggcttcaggtgttttcaagcacaacccaccacaacaagcaagtgcattttcagtcgttgtgcttttttgttttgtgctaacgtcttactaatttaaagatgctgtcggcaccatgtttatttatttccagtggtcatgctcagccttgctgctctgcgtggcgcaggtgccatgcctgctccctgtctgtgtcccagccacgcagggccatccactgtgacgtcggccgaccaggctggacaccctctgccgagtaatgacgtgtgtggctgggaccttctttattctgtgttaatggctaacctgttacactgggctgggttgggtagggtgttctggcttttttgtggggtttttatttttaaagaaacactcaatcatccta

SEQ ID NO: 19721 - DNA, 4537 bp, Homo sapiens
  source 1..4537: mol_type = unassigned DNA
gcggcgcgcacactgctcgctgggccgcggctcccgggtgtcccaggcccggccggtgcgcagagcatggcgggtgcgggcccgaagcggcgcgcgctagcggcgccggcggccgaggagaaggaagaggcgcgggagaagatgctggccgccaagagcgcggacggctcggcgccggcaggcgagggcgagggcgtgaccctgcagcggaacatcacgctgctcaacggcgtggccatcatcgtggggaccattatcggctcgggcatcttcgtgacgcccacgggcgtgctcaaggaggcaggctcgccggggctggcgctggtggtgtgggccgcgtgcggcgtcttctccatcgtgggcgcgctctgctacgcggagctcggcaccaccatctccaaatcgggcggcgactacgcctacatgctggaggtctacggctcgctgcccgccttcctcaagctctggatcgagctgctcatcatccggccttcatcgcagtacatcgtggccctggtcttcgccacctacctgctcaagccgctcttccccacctgcccggtgcccgaggaggcagccaagctcgtggcctgcctctgcgtgctgctgctcacggccgtgaactgctacagcgtgaaggccgccacccgggtccaggatgcctttgccgccgccaagctcctggccctggccctgatcatcctgctgggcttcgtccagatcgggaagggtgatgtgtccaatctagatcccaacttctcatttgaaggcaccaaactggatgtggggaacattgtgctggcattatacagcggcctctttgcctatggaggatggaattacttgaatttcgtcacagaggaaatgatcaacccctacagaaacctgcccctggccatcatcatctccctgcccatcgtgacgctggtgtacgtgctgaccaacctggcctacttcaccaccctgtccaccgagcagatgctgtcgtccgaggccgtggccgtggacttcgggaactatcacctgggcgtcatgtcctggatcatccccgtcttcgtgggcctgtcctgcttcggctccgtcaatgggtccctgttcacatcctccaggctcttcttcgtggggtcccgggaaggccacctgccctccatcctctccatgatccacccacagctcctcacccccgtgccgtccctcgtgttcacgtgtgtgatgacgctgctctacgccttctccaaggacatcttctccgtcatcaacttcttcagcttcttcaactggctctgcgtggccctggccatcatcggcatgatctggctgcgccacagaaagcctgagcttgagcggcccatcaaggtgaacctggccctgcctgtgttcttcatcctggcctgcctcttcctgatcgccgtctccttctggaagacacccgtggagtgtggcatcggcttcaccatcatcctcagcgggctgcccgtctacttcttcggggtctggtggaaaaacaagcccaagtggctcctccagggcatcttctccacgaccgtcctgtgtcagaagctcatgcaggtggtcccccaggagacatagccaggaggccgagtggctgccggaggagcatgcgcagaggccagttaaagtagatcacctcctcgaacccactccggttccccgcaacccacagctcagctgcccatcccagtccctcgccgtccctcccaggtcgggcagtggaggctgctgtgaaaactctggtacgaatctcatccctcaactgagggccagggacccaggtgtgcctgtgctcctgcccaggagcagcttttggtctccttgggccctttttcccttccctcctttgtttacttatatatatattttttttaaacttaaattttgggtcaacttgacaccactaagatgattttttaaggagctgggggaaggcaggagccttcctttctcctgccccaagggcccagaccctgggcaaacagagctactgagacttggaacctcattgctaccacagacttgcactgaagccggacagctgcccagacacatgggcttgtgacattcgtgaaaaccaaccctgtgggcttatgtctctgccttagggtttgcagagtggaaactcagccgtagggtggcactgggagggggtgggggatctgggcaaggtgggtgattcctcccaggaggtgcttgaggccccgatggactcctgaccataatcctagccccgagacaccatcctgagccagggaacagccccagggttggggggtgccggcatctcccctagctcaccaggcctggcctctgggcagtgtggcctcttggctatttctgtgtccagttttggaggctgagttctggttcatgcagacaaagccctgtccttcagtcttctagaaacagagacaagaaaggcagacacaccgcggccaggcacccatgtgggcgcccaccctgggctccacacagcagtgtcccctgccccagaggtcgcagctaccctcagcctccaatgcattggcctctgtaccgcccggcagccccttctggccggtgctgggttcccactcccggcctaggcacctccccgctctccctgtcacgctcatgtcctgtcctggtcctgatgcccgttgtctaggagacagagccaagcactgctcacgtctctgccgcctgcgtttggaggcccctgggctctcacccagtccccacccgcctgcagagagggaactagggcaccccttgtttctgttgttcccgtgaatttttttcgctatgggaggcagccgaggcctggccaatgcggcccactttcctgagctgtcgctgcctccatggcagcagccagggacccccagaacaagaagaccccgcaggatccctcctgagctcggggggctctgccttctcaggccccgggcttcccttctccccagccagaggtggagccaagtggtccagcgtcactccagtgctcagctgtggctggaggagctggcctgtggcacagccctgagtgtcccaagccgggagccaacgaagccggacacggcttcactgaccagcggctgctcaagccgcaagctctcagcaagtgcccagtggagcctgccgcccccgcctgggcaccgggaccccctcaccatccagtgggcccggagaaacctgatgaacagtttggggactcaggaccagatgtccgtctctcttgcttgaggaatgaagacctttattcacccctgccccgttgcttcccgctgcacatggacagacttcacagcgtctgctcataggacctgcatccttcctggggacgaattccactcgtccaagggacagcccacggtctggaggccgaggaccaccagcaggcaggtggactgactgtgttgggcaagacctcttccctctgggcctgttctcttggctgcaaataaggacagcagctggtgccccacctgcctggtgcattgctgtgtgaatccaggaggcagtggacatcgtaggcagccacggccccgggtccaggagaagtgctccctggaggcacgcaccactgcttcccactggggccggcggggcccacgcacgacgtcagcctcttaccttcccgcctcggctaggggtcctcgggatgccgttctgttccaacctcctgctctgggacgtggacatgcctcaaggatacagggagccggcggcctctcgacggcacgcacttgcctgttggctgctgcggctgtgggcgagcatgggggctgccagcgtctgttgtggaaagtagctgctagtgaaatggctggggccgctggggtccgtcttcacactgcgcaggtctcttctgggcgtctgagctggggtgggagctcctccgcagaaggttggtggggggtccagtctgtgatccttggtgctgtgtgccccactccagcctggggaccccacttcagaaggtaggggccgtgtcccgcggtgctgactgaggcctgcttccccctccccctcctgctgtgctggaattccacagggaccagggccaccgcaggggactgtctcagaagacttgatttttccgtccctttttctccacactccactgacaaacgtccccagcggtttccacttgtgggcttcaggtgttttcaagcacaacccaccacaacaagcaagtgcattttcagtcgttgtgcttttttgttttgtgctaacgtcttactaatttaaagatgctgtcggcaccatgtttatttatttccagtggtcatgctcagccttgctgctctgcgtggcgcaggtgccatgcctgctccctgtctgtgtcccagccacgcagggccatccactgtgacgtcggccgaccaggctggacaccctctgccgagtaatgacgtgtgtggctgggaccttctttattctgtgttaatggctaacctgttacactgggctgggttgggtagggtgttctggcttttttgtggggtttttatttttaaagaaacactcaatcatccta

SEQ ID NO: 19722 - DNA, 780 bp, Homo sapiens
  source 1..780: mol_type = unassigned DNA
gaccttgcatgttgctcagatgaggtttctcctttaaaacaaaattccctggtgctcagctgggcccagccaggctggacagtccccggtggccaccacggccgtccacagccctgctcgtgggccccagggctcagccagccgcctctctcttccagtgtgtgatgacgctgctctacgccttctccaaggacatcttctccgtcatcaacttcttcagcttcttcaactggctctgcgtggccctggccatcatcggcatgatctggctgcgccacagaaagcctgagcttgagcggcccatcaaggtgaacctggccctgcctgtgttcttcatcctggcctgcctcttcctgatcgccgtctccttctggaagacacccgtggagtgtggcatcggcttcaccatcatcctcagcgggctgcccgtctacttcttcggggtctggtggaaaaacaagcccaagtggctcctccagggcatcttctccacgaccgtcctgtgtcagaagctcatgcaggtggtcccccaggagacatagccaggaggccgagtggctgccggaggagcatgcgcagaggccagttaaagtagatcacctcctcgaacccactccggttccccgcaacccacagctcagctgcccatcccagtccctcgccgtccctcccaggtcgggcagtggaggctgctgtgaaaactctggtacgaatctcatccctcaactgagggccagggacccaggtgtgcctgtgctcctgcccaggagcagcttttgg

SEQ ID NO: 19723 - DNA, 20987 bp, Homo sapiens
  source 1..20987: mol_type = unassigned DNA
ggcgctgcacggtagtcagcccgccgccgccgcctgctttgtgcttcccacagaagatgggagcgacctcttcctgatcgggagctgtttaaaaggagggagtgcgccgtattttctactagcgtggaggaacggaggaagaatccattcacactccccaaaccagtaggttgtgacagttggaagtgtcatgtacaacatgcggcgattaagtctttcacccaccttttcaatgggatttcatctgttagttactgtgagtctcttattttcccatgtggaccatgtaattgctgagacagaaatggaaggagaaggaaatgaaactggtgaatgtactggatcatattactgtaagaaaggggtgattttgcccatttgggaaccccaagacccttcttttggggacaaaattgctagagctactgtgtattttgtggccatggtctacatgtttcttggagtctctatcatagctgatcggttcatgtcctctatagaagtcatcacatctcaagaaaaagaaataaccataaagaaacccaatggagagaccaccaagacaactgtgaggatctggaatgaaacagtttctaacctgaccttgatggccctgggatcttctgctcctgagattctcctttcagtaattgaagtgtgtggccataacttcactgcaggagacctcggtcctagcaccatcgtgggaagtgctgcattcaatatgttcatcattattgcactctgtgtttatgtggtgcctgacggagagacaaggaagattaagcatttgcgtgtcttctttgtgacagcagcctggagcatctttgcctacacctggctttacattattttgtctgtcatatctcctggtgttgtggaggtctgggaaggtttgcttactttcttcttctttcccatctgtgttgtgttcgcttgggtagcggataggagacttctgttttacaagtatgtctacaagaggtatcgagctggcaagcagagggggatgattattgaacatgaaggagacaggccatcttctaagactgaaattgaaatggacgggaaagtggtcaattctcatgttgaaaatttcttagatggtgctctggttctggaggtggatgagagggaccaagatgatgaagaagctaggcgagaaatggctaggattctgaaggaacttaagcagaagcatccagataaagaaatagagcaattaatagaattagctaactaccaagtcctaagtcagcagcaaaaaagtagagcattttatcgcattcaagctactcgcctcatgactggagctggcaacattttaaagaggcatgcagctgaccaagcaaggaaggctgtcagcatgcacgaggtcaacactgaagtgactgaaaatgaccctgttagtaagatcttctttgaacaagggacatatcagtgtctggagaactgtggtactgtggcccttaccattatccgcagaggtggtgatttgactaacactgtgtttgttgacttcagaacagaggatggcacagcaaatgctgggtctgattatgaatttactgaaggaactgtggtgtttaagcctggtgatacccagaaggaaatcagagtgggtatcatagatgatgatatctttgaggaggatgaaaatttccttgtgcatctcagcaatgtcaaagtatcttctgaagcttcagaagatggcatactggaagccaatcatgtttctacacttgcttgcctcggatctccctccactgccactgtaactatttttgatgatgaccacgcaggcatttttacttttgaggaacctgtgactcatgtgagtgagagcattggcatcatggaggtgaaagtattgagaacatctggagctcgaggaaatgttatcgttccatataaaaccatcgaagggactgccagaggtggaggggaggattttgaggacacttgtggagagctcgaattccagaatgatgaaattgtgaagatcattaccattagaatatttgaccgtgaggaatatgagaaagagtgcagtttctcccttgtgcttgaggaaccaaaatggataagaagaggaatgaaaggtggcttcacaataacagacgaatatgatgacaagcagccactgaccagcaaagaggaagaggagaggcgcattgcagaaatggggcgccccatcctgggagagcacaccaagttggaagtgatcattgaagaatcctatgaattcaagagtactgtggacaaactcattaagaagacaaacctggcccttgtggttgggactaacagctggagagaacagttcattgaagctatcactgtcagtgctggggaagatgatgacgacgatgaatgtggggaagagaagctgccctcctgtttcgattacgtgatgcactttctgactgtgttctggaaggtcctgtttgccttcgtcccccctactgaatactggaatggctgggcgtgtttcattgtctccatcctcatgattggcctactgacagctttcattggagacctggcttcccactttggctgcaccattggcctgaaagattctgtgactgcagtcgtgttcgtcgcacttggaacatcagtgccagacacatttgccagcaaagtggcagccacccaggaccagtatgcagacgcctccataggtaacgtcacgggcagcaacgcggtgaatgtcttcctgggaatcggtgtggcctggtccatcgctgccatctaccacgcagccaatggggaacagttcaaagtgtcccctggcacactagctttctctgtcactctcttcaccatttttgctttcatcaatgtgggggtgctgctgtatcggcggaggccagaaatcggaggtgagctgggtgggccccggactgccaagctcctcacatcctgcctctttgtgctcctatggctcttgtacattttcttctcctccctggaggcctactgccacataaaaggcttctaaaggaactatcagatatagtaaatttatatatatacatatatatacataaaaattatgtataatggacagaggaaactgacatttgtcatgttcacttacctgctgatggaatccagcttcaagagcatactctgtactagggccgaagtaaaaaaccatcacctcccattcccaggggcatcatcatgttcaacaaggcatggaggcagggccatctttgcagctcagtctagaagggctgcactctctccaggttgataaatccttaaggctttgatttgttttgtttttggttttgttttcagtggagctggggaggtagttaatgtttggctttatttttgttattttgttttgttttgtttttttgggagagtcagggttgttgcttttctttgtggaaagtgaaaccatccaaatgtaaatgggttttggtaaaaatttaaatcattagtattccccctcacctcccccaatcactttaaaacttattttggattaagaaaaaatctgggcatggaagaagaaagaagcatgtcttcatcgtattaccaaagttcatgcttatctccggaatgtgagtggaggtgaagctgcctccaagaagaagcataaaagtggaatggagccaggaaatccgatggttctagaaatagtctgatatttaaacatgtgatacctggcagtctcgtttaacaggtacaaggaaaacgtgcctagattcccaggaacgtgcaaaatcctttctttcttatctctttagctctggactgtgattggcaaggtccttcttccagcattcagcccagctaagcccccaggtgccccatcccaaccctgttcctcctgtccacctgccatcccctatgcaaacagtaagaataaccccattcaaaaagcacatcatcgttttccatttgcattaacatgtgtctcagtcccatgttgccgttgcttgggattgtctgtcagttttattttcaaaggcatccatggcttgcacaatcctgttccagtcatgactgaacatttgctccttcttcatgtgccgttcggaaatgttgttgtgatacctgttacacagtgcatggtgaaaaacaaataaaacaaaacaaagagtatctgtatatagtagagtatagtacatactgttctcccatttggcaatgttgattggacattgaagacataagtgagttttcttttcacctgagttgttacttttgtgctgttattgagtttgattaattactagggataaaaggagaaaatggattattgttcacggttctgcacattcatttctaagaagcaataactgtcatgtggggagaagttaaagctattgagaggatagcaggcaaactacaaagatcttcatggaaaattagccatgtggaacacatcagaggcctctaaaaatcacccattaattcaggaaggccaaggagaaaggccttatagagacgttgatatgttggatgtgcctaggctttcagagccaccctttccacaacacccctccctgcaaagtatttatttcacatctgcactgtctggcacagatggtagatagtgctggtttgttcattttatttttttacttaaaaggctattttgagccctgtttctttcactgtccagtctagtcctctttgattatatcagtagttgctgagtaagaaagaagccagggtgaccaacgggcctttaaaagtgttgtctcctctacttatgctgaaagagaaggcaattaaataagactagtacctcccaggaggattggactgggatatttttaaccctttaaaaagaatagctgtttctatgttaaaataccaaagaacatggataaacccaacattccaaagtagtgagtccactaatgagaaaaataatagaatgactttggtcacctctcggagacttctgtgtctataaggaatcccaggctggagacattcctagccctctgtattgattcaaaaatacttaataaattaaagctgttgagacttattttttcttctgtcactcagtaaccatgatccttcctcatttaataaacatttggtgactgaatgagtaattaaatgctggttacccacttaatgtgccaggtagtatgatactttctggggactaagccatgaacaaaacagtctagatccctgccctcagaagggttacagtttatgtgattactattttcatgagtaaaagtgaagaaagccatatggaaagatttttatcttgcaagaaaaaacaattatgaaactcttttaacataaacacactgaaactgtatcaaagcaattgtccaaattgtatttatacccaagaatttctttaactaagagagcataaggcatatgtttggaaaaccaccctctttatctttgaccgacttgcagataaatatatctctccattttaaaccaagaagggcaatcatgttggtgatccagatcactgagaaagcccagtgtatcccatcttttatctttgttggcaatggaacttttctatggcccacactttacaattctttgtcattctaacccatccttcccatccttattttttttttttttgagaattgctaaatggaaagctagcctagaagcaccaagtaaatatattcaaggaatataagttgtttaaacattagaaaaatttttgcactcattttttagctgtattaggaatgtcaataatcctgtagcaaattttcacagagaactttaagaaattcttgcattggtcgatttcaatttgaaagctttttggtttgtttgctttttaaattttcatgttctaggaaactatgattctggttgttcaggattgttattattatagttgtgtaaaattattttattttgtgtgtattgtgcacagcttggggggggggcgggaaatgcactaattgtgctcttccttataaatggtacatattactgacacagacaaataaagtttctaattgtttctgatttaatcactagtgatacagcatattctgtatgaaatgttttctcctttctcattgtcatctacttcattttttgttttcatgttttgaagaaataaaaaccaaaatggtattattgtgcaactggtatcatcatccaaagaaaaaaacagacaccaagtattcaaactcttgcaaacgtcaacccttcggtcatgcaatgttctctttttaatgtcccaggagaacacagtgtcagaatatttgtctgtcctacagtgctgagatatatgttggacattcctccatttcactgattttttttacgttgcttagtatgactctatctacatcctttcctgcatccaggatcataagcccataaacagttacatgtcagacaactttttagcatgcagagtattacatcaaatcagtcgatcccaaaaaattccaatcccaaaattgatggtagtacagtttcttcccaaggggatgtttaagtaaatttctcttttagtttcatatgttatattcctcttgtagaacttctgcctcgcattaacgatttctgtctatatcttattaacttcatatatcatatagtcaaaacagtatagaaggaagtgatgtcagaaatggaataagcatttgtggggaaaaaatgtgacctctaaggtttgtgtacttatttgaagttgacatattagtggacttagttcttactataatagaatctgtccacatgtacaagtaaatgctactttattgatccgatcatctttaaaattttctttagtattcctcattatattctttatatggtcatatgtggtatactttcatgtatgaatgaaggaattatttaaatattttatagtatcaaactgtcaatatgtctcttgagtaccagcctttggtttaacacaaaatgagcagccaacctctatttctttatatagcaaaaagattaattcaatgaccagagctccttgaccgtctaacaacctttcagaaaaattctgtgacctgataattatcagtttcttacaagcaaattttaatgggttcaaatttcctgattccatccttcaaccagtgagtgttttataaaattttgctttttgtagttcatagcctaatagcactaattttttgttgcttttcaaacataaaatttttacaaaatattgttttagaaaccctgcaaaaattctgatgcatgcctttcccctgtggcctcactattaatgaaagctcaccactcacattgcattttccacaggggtcttgattcattggtgattccacagcaaaaggtccctgatcctaaactgtcaaaataaagtagcgagactgatatacatctgataactttgtggaagcaattagaaaattttctctggtagatgatgatgccctccatcctctaatagtggcagaactttgccttctcaagagaataaatcagcccctttaagacttcttttaatatttttgggctggggatatggagtctctctgttgattctgactttctgactatgattttgggcagttgcatgcagagcaagttctgagtgtagtttcataatctcaagaacgtttggccattttatgattgacagcatgtaatattggatctcacctgacctacaactggcattcagcttttatcattgtaatcacttcacttggccaaggcagttggtaaaactgagcaaagttaaatataaattccaatcattaaattggtgagtgcattatgcagaagatacagaatcctatttcagaaaaagaaacatgctattataagtggattccttagattttgttcagctctacctacggagttttgctaatagaatgtagttctgctattcttttttaccattatgtactcaccacttctaaccatcttgttgtcttcccatcacgcagtacatttcaaaatgctgggcggtcccgatggtattacacccacaaggacagcataggaagggtaaacaattgaaatagatatttcatgttgggagcttaattaggccatgattaatcgtctctcaaagcagagactgtcttatctataaaaggagcaaccactgagaggtggaactcccaaaggaaagcactgcaggtttccagcccacaagaaatggtacgtatttcactttctttgactttttccctgcctgtcaagatgtccaaatgtactcagaggctgtccacattttcagttttgtcaaaggttctctgattcaattttgtaagaaacatttaaatcagtggttatgtaaattattgtttattttgttttacttttaggaaagagcattactgtataacttcaaaaagcaatatgacttagtagttaaaattatgacccatattttttcaggaagacttgcttgcccaaaattgtcttgtctatctgttatcaatgtagtcattcatagctgcctcagtggttcacattttttagaattatgcttccctagcattttttcaaagagttggagagttttccccatgggaataaacagtcttaatatttcctttccctaatttcagcctttgcagttcttcggtgactactcccattatatccaactacccttagtgatgctcactattacctcccggcaatagggaaagagcttatgctataaagtgattgctcaagacatgtttttctgaaagtgaacttatcataggagaaatcaaatataatgacattccacctagataagagtcactaggacatagtatggaatctttgtaaatgagcgggacagatcatacctacagttacacatataatagtgttgtttattttatacctcttgaatcatatttattatgcttcagtgctgcccatcgacctagccttttattctatcaatatgtaggtgtggattgggaatgagaaccgacattcacatccctgatgctcatgagggtttctacaaaggtggagtatgtaaacatagaaaaacgtaacagatagcttccatgcctctaagaaatatgagtgggtcaaatgcttctctgtgggtactatttttctgctatgcaaatggtagaaaagttcacattaatagccaaacagaccaagagagaaattagctaacttcactgttaatctgtctactttgacagttaagatatagcccagccctcctaatttgttgactgcaaagacagatacgcctagttaaatccaagaatgcactgggggacggggggataaagttactagaataattatacaaccctccgtactaagattgcttattcgccaagaagaatcctgcccagagattttcagagacatttccttacattcccaaccttcttttaatttacacaactttttaattagaccccttgaagccacatagtaaaacaagagatgaattatctaaggagaacttttggccctccctctaatgtgaagatcacatacttgactgtatttcccattctttccaaatggaaagaacagtccaattaagtaaccaactatgtaaccactttttgacgtaattccacctaaaaaacaaagagtgaactaaattgtacaaacattaaacctaacagtgatatgaccagatggctagttttgagaaaaataatattttctgtagataccttgctctcccttcctgtactcatcctaatgctcaagtttgagaaatactccaaggaagaaatcttgaaagattgtacattcaaataatgctcatgtaattgagtaatatggcatttgggatgagaataagagcgtatttaaaaataagagaattggcacaaaaatgtgttaactaggattttattacaaattgccctaagatatttgcaagttattatatttaagtgaaataaatcccagtttccagaaacaacagtacaatttatattcgcaggttttatatgaaaatcaaagttgggcatacatactttttggctttggcaaccaaagaaaagcatgtttttggcacacgtttccaaattattgagttatttgtagaatacattggacctgtacaggtatctcattaaaattaccttcaataatttccctttcttcctttaagccatcaagtttctaaattttacaacttcacagtttagcaatttcatttatgaaaggctgattccattttgatgttgatttttacatttcagaatttttcatatataaatatttgatgcattagatgggatactgagcttgagtctggcccaaatgaaccacaaggcccagactgatctatcagtagttagaaggcttctaatacactggctttctaatgtacagtaaatactagcgttgttttcaatattctttcttttgactaaaagtttccattccaactggtgaaaaatttttaaaaaatatttataatgatagttagagaactgtttatatgaggatcagacattgtttcagcactggatctcctctgtcccctctcttgctacagcatacagcccagagacacacatgtaaaagtaggtgatctctgtaaacttcagctgcatttctgtatgtctaggattgtcctagtatcagatatcctttgagaaagagttggagaggcatggaaggaagcatattcctgacctcccccctttttagctaaagatacaaattcagagctgtttgaaaagggcttagaataatattaattaaacatattctataatacaaagagaagtacttttttaaaatacatttatttttctttcttttttagcaggcatttctgacagaaaatctttagggccaattagagtttctttctgacttttaattgccctctgccttttgggaaagtgttgaaaaaagctctggaaaaaaatatgctggtcaaggtcgaaccctggggaattaaaaacatgagatttttatattttccctccaaacatagcactgagcaggcaggttcccatgcctgttgttaatcggcattttcttttttttttttttttttttgagacggagtctcgctctgtcgcccaggctggagtgcagtggcgggatctcggctcactgcaagctccacctcccgggttcacgaatcggcattttctaaacacgtgttttggtgtgctgggagcagaggagtaggaggcccacccagtcccaccacacataccgggacatctttgaccacatgggtcctctgccgttcgtattttagcttagatgttcttaactgaactaacttccaattttcatatacactgatcatcttgtccctagcattttccctccaagatcctgctaacaggcaaactagccctttcaaacagttggtacctgagatttctcagagctctcttatcaagagtaaggagtgagattgcagaaggggcagtaatgtcaataccaagttattggaaactacttaaccagccactgcattacatactggagcccgtctaggacacttgcccttggaaatggtggaaagactttgttttatttctatttcatcaacagaacttttgtagcattgaatctaagcaaaggataacatcatattataatggaaagttatttttaactacaactgttattgttaaatttagaagaaaatattgtctttgaagtttcagtccaaaactctaaggagaacaaggtttttactgccatcggtaatcctgtgagaaatttgacactccagatcttatttgagacagataagtctatgataaatatatgtatgagacttaaaatattcttgatattctcaggttgttctcacaaattctgcatagatttagttgtttttttttttatgagaacctttcttatcaaaaaggattgaaaatttttccaacaactggttgttaaatgagtctagcacccaaagaagctgtgagcagttggttctaccagtgactcttctaggagctctttccaggttggtctcgaactcctgacctcaggtgatccgcctgccctggcttcccaaagtgctggtattacaggcatgagccactttgcccagcctgatagttctgactcaatccctagacacattcttcagaaacaactgtacatggtgagagaaaagtgaaaaggaaaaaagttttccttccttcaaaatacactaaatttgcttatcacctttaaaatttggactgaatgtttaaactttaaacacaaagcaaagggagatgctcttaaatgtgaaatctgaagcaaagattgcatttttgcaaagctatccagaagatgtgttaattattgagacatgggattcattaacacatcagcgcccaaccactgcctctcctgcccccattcacacattatccacaatcaaataagcagctaagcaggggaaacctatcactgttaatgtcataatcacatcaccactgaattaccagatgtggtcaggaactaggcaaagtaggtgggaccaatcctaggactggggccataccacaacctcagctcagccccttgtcggatacggtttctgaatttagtacaatgccagaagtattttttttctttcagctgtgaaccagcctgttttgtttgacaagcctttccagattcatgcagctcaatcacgtgcttgttgccagtttgagagtgaacctattatttcaaacttgttgccgtgaccaatttttacaaaactgaaagtagcactgtgaggtggattggacctagtgatgaggtgtctacacttgcatccttttcttccaagagaatattctgacactccaactctagaagtcatgtcattagtaaaatgaaaataataattgcttaatcactgtttagaattagttcatacttcttcagagcttgaagcctccacgactcaacatcagatccatggatagtattactatacctttacccaaagactggatttattttgtaaaaatatcagaatgggtctgggtccctttaaagcaactgacaaggtatttaacaacattttaaaacaatgaagaaaggatgattctgcagaggctgctgggttacagaggagggcagagcttttgtcagactctcttgatgttttgctcttcctggtaagtttttatctatcatggttcccagtggaatattctccatacacattctgtgggaggatattgacatggctctagactctgccttttattttctaattctccttggagaattagaacaggcattccagaacttgtaatatagaggggaagaaagaaaaaatggcagatgcctcattgatggatccacaagttttgtacaaaagcacacaccattctgattgtctctatattaacattgtactcaccaaacagctttctaaaggtgactggaacaagataaatatcaactggataattacctaaggaaaaagaataaaaaagaaatcaaaccaaaaaaaaagcaaaaaattggtcagtttagcaagcgtgttttccaggatcataggctcataaactatacagtcaagagagtgaaacaattttaaaatcaaaagttagagccttttatatttcttcagatgtacaatttcataaatcaagcatttattttgtgcaaagtattatattaggtaccctaaatggtatataaagaattcaaaacagagtaatttaagaaaattaacactagtctttgatttagtcaggaagagtccacttatggcattctaattaaattaaccttccattttggtctacattttatcaatttgagattgcttaatggggccattttgaaacctatcaagaaactttcctctaacagaaatagaaatattaattttcttaatttcacattctgtcttccactaataagataaatggattcagacccaacacacacatccagagattaccatgagccaagacctgtgtaagtttgatatagggtcttttattcaacatttcaagttgggaaaatcttattacaaagatcatttgcctcaccattgctgaattcttttactaggtgttgatgctaattcatcactggattttcttaactctgcctgttgctcttttggactttgaggcatgtggttctatttcagtgagttacaactccagctctcatcttttaacagcaaactagagaacatctcactcttcatctctgaggacacagtgttctcttcattttaacatcaaaaagtcaccagagagaagacccaaaggcttttctctttggaaaaggaatctttaattgtttcagagggtgaggaatcttcagctctctctggacttgattgtcctcatcattaaatgggaagactttacctttagcttgattttccagaacacatcaagccccgtatggtcagtgtttccctgttatcatccacttatgtgtatgggttgaaggtactttaagttgtgagccagctgctgcccatattgggtcaccaatgcacttgtcaagcccatgtaaccacatgaagtttgatagaaatataaacatttattttgaaataattccatgtgcacggttggaaaaacagtctcccttccctgagaggaatgagtaatttctcccttttcaagaagtgtacagtagaaaatgtaatgagattggaatggattccaaatcagtgacctttttaaggctgaaaccactattttaaatgaaaactttaagttcatacagtttcttatagtaattctacttttattttttagtcagtgtgcttaatcttttaggaaaaaaaactaaccagttattttttactaaagtatgtgaattacaaacaggatgtgcaatgaccaggcagaaagatatttaaaggtgtaattattctaaaggaagatgagaaaaaattcatctgctacagattcaactgtcttttaaatgcctcccttgtcatggagtaaatgactactcaaaaggatttcacaaaagacttaaatctcacccttagcaatcaaccggtcggccacagctcagatgcctcattagcaaaatgaaattgcacaacagacgaaacatagcaaaagaatgtagacatttccatggggtggaagaaaagaagaaagaaaaagcaaccatagtgaactctgcttgcataaacaaagaatgttttagtggaataaatgtaagctttctcttgaaggaatcccagttagaatgtcattggaaacggcaaaactatttcagcttcatagcagtaatatattccaactttattaccactgaggcacaaagctaaatttgtcagggggaaaggtaagcaaaaattactgacattgcaaccgataaaatgatcttgtgagactcaatattgagaaagaaaattaaaatagctaatatttctgttataattccagtgattactaagacttctgccaagggataaaattacttttccttctctcattataaatttctatatagagctattttaatgcagtaaggactgtattttcatattttaataaatccctcacgttgaatttgccccccatttcagatttgattaggaaatactaaattgagaaggcaggtttttccatctttttaaaaacaagtatgcaccataagcattttcagcggatgtctgccttaagcaatcttggtagagctgtcaatcagtggcaggtgcttgtttaaggaagagaacctgtgaatagatttagcctttcttcctcacagacagctgctcattcacacacgctcatctcgtcttcctcaacttcttgcaccaatcccgcctcttggattgacccacatccacctagcagttgaacaaactgcagattctaattacatgtcccgacagttgctcaacttaatttttcaccaactgaatttcatgcattgccccttgatgttccttccctctgttcactcttttctataagtccttgcatttgatatactttaaaatggatttgactaggaaaaaaaaaaaaaccaagtcagcaaacccttgtgttcattcaagaaattgtgaacaaatttagctgttatggtaataatcctgaggtgagagagaaaatatcacctaggtgacaagagatcattttaacgctattactaaaatagtattctatgaatagaggccatagaattttctacaaatagacttgtagggactcacattttgaatcatattttacttataggtttgctgtatatactgattaaacttctgaacctaaagattctctataattaaactagcacaaatataatctgtcccttacccacattgtaagaatgtctggtgggggaaatccaatattgaccttcacattccacatggaaaatctttgtccccagagtgcaattagggtgattaaaaataagccgcttttgtgagtctcaagtttgttccccaaacaagcagcatcagcaactggaaatttgttagacatgcaaattatccagtcccacctgagacttcagcccagatctatgaatcaaaaattttggagtgaccctggcaatatggactttaataagcccctaggatggttctgatgcatgctcaaatttgagaatcattgatctatgacacagcattctgagtggccaagaatgaacaatgtcacccactgcttaattatgctttcccttaagaaaaggtttaaatgcttaaaaggtaggttctttataaagataatgcattcagatatatgggagatatgtccaccattcagacttaaaatataattttaagggacattaatccttatgtctttttctggcataactgagtctgaggcagcctctccagtcagagatttctaatcagcttatctagttcttttaaaaccccacagctgatctactttgcctgacttccccggggcctagaaaatgaccctggacacctttctctaactgattagctctggctgatttgtcttaatgctaaaccactgtgtaacagtactaaattatacttaatgacacagtctactgttttgaagagtgctgtgtatgactgactgagctaaaaggattgctggctatgagtgagttttagttttagaattcattttcaaagactcacaaggctcaagaagcttgaaaaccacagatgatgtatacagtagctggagttccctggaggctcctttctagggtctctcatttgaattggtgcagaactgaaagcagagagtcagaaagtaactctgcttgtaaaaatggcttaggaaaaggaacttaagattgtgggttatatgtgtgtatgtgtgcacacacatgtatgtttcctgaattctaacctgaaaatatcacatttgtggatacttaaaatactcatatgcattttgatacacaaaagcaattcaaagtatgtaaaaggaggctggaaatgtaagcttaacagtgatattctggagaaaaatgttgtaactgtcactccaggcctcccttaggagaaaccaaacttgtcagatattttggaatggtagctctttttcaggaattagaataactgaagtatgatactgtgttccgtgtgctttaaaatctgtgaccctcccctgttgctggtcatagcttcagcatttgagtgtccattgtctgtcgctgaggacattttctcatcggctcttttccccattgtcccattcctctcactcacacctgattaccaaatagctctaacgaaatcacagtcactccttcctgtgtttccaccattgtgtacatcttcatttgcacaccctattttttaatcaaagttaaagcctcaccaacaaggtacttagaacaatcacccacttctggccacttcgtgacgggaaatacatctttgcaggggaaggagctggatcagactgacagggtttcactcagactatttcaaacaatgaggagccttgacctcattcccaacttttgccgtccatagtggttgatttcttgttttctctttctctctttttttaacagaaactcttaagctcaaggctaaattacagtggggacttgcctttgtctacagtccatggtttctgtattggctcaagccttgaaatcttgaaacaagcctaaattaaaattttctcttagcttaagaaaaaaagttacatattgtcaagacccttatgtgtgtggtccattaaaaaggtcttgatattagaagataacagcaaattgtttcttatcccacaacagctttgcctttcagtgtcctttgtggtggttttcgtaggtcagtggtacaattcaacactcttccaataagccataataataattgttggcacaactgttattacaacaggacttgcctgggttccatctattaatttttacagacagtaggaagctcacaccgaggagacattggtaacttcctggacaagggcaaagaaaggaactagcatattgtacatactgtgtacgtgcacagaacactggtctgtgcctttggagtgttctcagaggggcaggccagaagggaggattcaggtaggaaatgaatctaggacttctcttgcctttgatggttactgatggcaattgtgtttcccactgaataacttggtggacaattttgatagtaaactgaactcataccgagcaagcacaatagtcaatccataaagaaaagggtggcatatcataatgccagaaaccttgtctccctaagaggtgatcatgaatttcctatacagggcaaaaaagggaagaatagcctattcatattctgtattcacagtttgaaggacccatcacaaatgaccttcaaagactgacagggggcaggtagaagggaggcaaaaatgcagagaaaaagatgttaccttgaaaaatgaagtaagaaatcctaatattcccgtagttgatcctaaagtttgttcccatgtctacggttatttctaaataacttcactacactttgaaattccttagtggtggtttatcagtaatacttaactgaatttttccgtttctattctttgctgccaatgaatgtaatctccacgacttgccgttcgagtgcacgcacagacacacacacataatggtatatgcatcatatattactcattttgtgggaaacacaatgtattataatgaaaaagattccagcacattctttcagtgtgtttcagtgataaaattttgtgggggaatagaggtatacatactctctttgctgaccatattgttgaaattatgatcttaagcaacactgttagaaatgcttgcataaagtatcttctctagtattaatgagttgattcactctgaattgaaggttcaaaaaaatgcactaaacaaatatttttatatctgtggtattttcctattaactactcttagtgaacacgtgaccatatacctgatatcattaaaaaggaaaatggcctaaacgaaacgttaaaagtggaggtatttataaagtcttctgccaaagaccattgtttaatgatctgtaaaatgtagattatcttcttttattatgaatgtgattgtaagaaacaccctaacattctctaacttttgaaaatgaatattttgtatttctaaggaccaaggaaaatattttttaagccaatgtagtacacagaagccttgtaaatgagaggtacaatgacttggatcaactgcataatgctagattagaattccagcatttgatgataaatttatcaatctttcctataattcttatactgcactaaattacattttggaaattttagctaatcttttcaaattaaaggcaccaacattaatgacagatcttctctaatatgaaaagcatcaaaacattccctttcaagcactttgaatggatgaaaattgccatataattttcccacctacctaaccattccatgtaagttaactgagcagtctaacaatgttgtacagaaggttgacagactatgtgcaccaagaatatttaagttgtgcagttagcaagaactagccatttcaaatatactcaaatgttttgtaaataaaaattttgactcctataattttgttcaaactgatgtcttttaaaataattagattttatttgaattttaaaagtaatctgttgtaaattagatgttactttgttgactctgtgattcaatgtacactcagccatattcctgtggggaaatatcaatcttactgactttcatggcatgagccagagattcatagtttcctttaggactataagtatgaagacaaaacacaccaaaataaaatgctagtgaagaaattagaaacctattgtataaaatgtatttttaaaatcttaagatatatgtgatttacactgcctgttaatctagtctctttgtgattaaaaaaaaacataatatttgttaagactcagacaccaaatatttgtgatgtttgtatagcaccatcgttatatgtgatttcaaagggtaagcatctctgtcgtaatcatgtaagcccacagaagaataaattcctgaggttatgtacaaccaactctcagaattcagacttcctgcagctgccatatcaccaataaatgagaattgtgaaaaacaatttttaaagaattgagtttatgatcactgtgcattttgttaatgaatgatttcagagttttatttttaccagaaatgctctcagccagtaaacacaactgctgatttcaaccatactatcatttcaatggtttctatattcttgatctaactaccaaaaactggaagcttgttgcaaggtgtgtcctaacaaacatacaataaatgactcttcctgcatgctgcctgagatatgttgtaatttgaaatgtcttatcaaaaaattatacatgttataacccaaagttgaactggcaatatttttcatgtgtaaaattgatggtatgttaatatcaaaagcagaagcattgtttgtcatacatgtatgttatatgtgatgtttaatcgtgttaaactgtaatctgtgaagttttcattgcctgaactagtcaattctgtataaatcattgtcttaattgttttcctaatcttaccatatttcctaacactgaaatataaatgtttgtcaattagcca

SEQ ID NO: 19724 - DNA, 3434 bp, Homo sapiens
  source 1..3434: mol_type = unassigned DNA
atgcggcgattaagtctttcacccaccttttcaatgggatttcatctgttagttactgtgagtctcttattttcccatgtggaccatgtaattgctgagacagaaatggaaggagaaggaaatgaaactggtgaatgtactggatcatattactgtaagaaaggggtgattttgcccatttgggaaccccaagacccttcttttggggacaaaattgctagagctactgtgtattttgtggccatggtctacatgtttcttggagtctctatcatagctgatcggttcatgtcctctatagaagtcatcacatctcaagaaaaagaaataaccataaagaaacccaatggagagaccaccaagacaactgtgaggatctggaatgaaacagtttctaacctgaccttgatggccctgggatcttctgctcctgagattctcctttcagtaattgaagtgtgtggccataacttcactgcaggagacctcggtcctagcaccatcgtgggaagtgctgcattcaatatgttcatcattattgcactctgtgtttatgtggtgcctgacggagagacaaggaagattaagcatttgcgtgtcttctttgtgacagcagcctggagcatctttgcctacacctggctttacattattttgtctgtcatatctcctggtgttgtggaggtctgggaaggtttgcttactttcttcttctttcccatctgtgttgtgttcgcttgggtagcggataggagacttctgttttacaagtatgtctacaagaggtatcgagctggcaagcagagggggatgattattgaacatgaaggagacaggccatcttctaagactgaaattgaaatggacgggaaagtggtcaattctcatgttgaaaatttcttagatggtgctctggttctggaggtggatgagagggaccaagatgatgaagaagctaggcgagaaatggctaggattctgaaggaacttaagcagaagcatccagataaagaaatagagcaattaatagaattagctaactaccaagtcctaagtcagcagcaaaaaagtagagcattttatcgcattcaagctactcgcctcatgactggagctggcaacattttaaagaggcatgcagctgaccaagcaaggaaggctgtcagcatgcacgaggtcaacactgaagtgactgaaaatgaccctgttagtaagatcttctttgaacaagggacatatcagtgtctggagaactgtggtactgtggcccttaccattatccgcagaggtggtgatttgactaacactgtgtttgttgacttcagaacagaggatggcacagcaaatgctgggtctgattatgaatttactgaaggaactgtggtgtttaagcctggtgatacccagaaggaaatcagagtgggtatcatagatgatgatatctttgaggaggatgaaaatttccttgtgcatctcagcaatgtcaaagtatcttctgaagcttcagaagatggcatactggaagccaatcatgtttctacacttgcttgcctcggatctccctccactgccactgtaactatttttgatgatgaccacgcaggcatttttacttttgaggaacctgtgactcatgtgagtgagagcattggcatcatggaggtgaaagtattgagaacatctggagctcgaggaaatgttatcgttccatataaaaccatcgaagggactgccagaggtggaggggaggattttgaggacacttgtggagagctcgaattccagaatgatgaaattgtcaaaacaatatcagtcaaggtaattgatgatgaggagtatgagaaaaacaagaccttcttccttgagattggagagccccgcctggtggagatgagtgagaagaaaggaagatcattaccattagaatatttgaccgtgaggaatatgagaaagagtgcagtttctcccttgtgcttgaggaaccaaaatggataagaagaggaatgaaaggtggcttcacaataacagacgaatatgatgacaagcagccactgaccagcaaagaggaagaggagaggcgcattgcagaaatggggcgccccatcctgggagagcacaccaagttggaagtgatcattgaagaatcctatgaattcaagagtactgtggacaaactcattaagaagacaaacctggcccttgtggttgggactaacagctggagagaacagttcattgaagctatcactgtcagtgctggggaagatgatgacgacgatgaatgtggggaagagaagctgccctcctgtttcgattacgtgatgcactttctgactgtgttctggaaggtcctgtttgccttcgtcccccctactgaatactggaatggctgggcgtgtttcattgtctccatcctcatgattggcctactgacagctttcattggagacctggcttcccactttggctgcaccattggcctgaaagattctgtgactgcagtcgtgttcgtcgcacttggaacatcagtgccagacacatttgccagcaaagtggcagccacccaggaccagtatgcagacgcctccataggtaacgtcacgggcagcaacgcggtgaatgtcttcctgggaatcggtgtggcctggtccatcgctgccatctaccacgcagccaatggggaacagttcaaagtgtcccctggcacactagctttctctgtcactctcttcaccatttttgctttcatcaatgtgggggtgctgctgtatcggcggaggccagaaatcggaggtgagctgggtgggccccggactgccaagctcctcacatcctgcctctttgtgctcctatggctcttgtacattttcttctcctccctggaggcctactgccacataaaaggcttctaaaggaactatcagatatagtaaatttatatatatacatatatatacataaaaattatgtataatggacagaggaaactgacatttgtcatgttcacttacctgctgatggaatccagcttcaagagcatactctgtactagggccgaagtaaaaaaccatcacctcccattcccaggggcatcatcatgttcaacaaggcatggaggcagggccatctttgcagctcagtctagaagggctgcactctctccaggttgataaatccttaaggctttgatttgttttgtttttggttttgttttcagtggagctggggaggtagttaatgtttggctttatttttgttattttgttttgttttgtttttttgggagagtcagggttgttgcttttctttgtggaaagtgaaaccatccaaatgtaaatgggttttggtaaaaatttaaatcattagtattccccctcacctcccccaatcactttaaaacttattttggattaagaaaaaatctgggcatggaa

SEQ ID NO: 19725 - DNA, 3178 bp, Homo sapiens
  source 1..3178: mol_type = unassigned DNA
aagcttgacagaggttgtgacagttggaagtgtcatgtacaacatgcggcgattaagtctttcacccaccttttcaatgggatttcatctgttagttactgtgagtctcttattttcccatgtggaccatgtaattgctgagacagaaatggaaggagaaggaaatgaaactggtgaatgtactggatcatattactgtaagaaaggggtgattttgcccatttgggaaccccaagacccttcttttggggacaaaattgctagagctactgtgtattttgtggccatggtctacatgtttcttggagtctctatcatagctgatcggttcatgtcctctatagaagtcatcacatctcaagaaaaagaaataaccataaagaaacccaatggagagaccaccaagacaactgtgaggatctggaatgaaacagtttctaacctgaccttgatggccctgggatcttctgctcctgagattctcctttcagtaattgaagtgtgtggccataacttcactgcaggagacctcggtcctagcaccatcgtgggaagtgctgcattcaatatgttcatcattattgcactctgtgtttatgtggtgcctgacggagagacaaggaagattaagcatttgcgtgtcttctttgtgacagcagcctggagcatctttgcctacacctggctttacattattttgtctgtcatatctcctggtgttgtggaggtctgggaaggtttgcttactttcttcttctttcccatctgtgttgtgttcgcttgggtagcggataggagacttctgttttacaagtatgtctacaagaggtatcgagctggcaagcagagggggatgattattgaacatgaaggagacaggccatcttctaagactgaaattgaaatggacgggaaagtggtcaattctcatgttgaaaatttcttagatggtgctctggttctggaggtggatgagagggaccaagatgatgaagaagctaggcgagaaatggctaggattctgaaggaacttaagcagaagcatccagataaagaaatagagcaattaatagaattagctaactaccaagtcctaagtcagcagcaaaaaagtagagcattttatcgcattcaagctactcgcctcatgactggagctggcaacattttaaagaggcatgcagctgaccaagcaaggaaggctgtcagcatgcacgaggtcaacactgaagtgactgaaaatgaccctgttagtaagatcttctttgaacaagggacatatcagtgtctggagaactgtggtactgtggcccttaccattatccgcagaggtggtgatttgactaacactgtgtttgttgacttcagaacagaggatggcacagcaaatgctgggtctgattatgaatttactgaaggaactgtggtgtttaagcctggtgatacccagaaggaaatcagagtgggtatcatagatgatgatatctttgaggaggatgaaaatttccttgtgcatctcagcaatgtcaaagtatcttctgaagcttcagaagatggcatactggaagccaatcatgtttctacacttgcttgcctcggatctccctccactgccactgtaactatttttgatgatgaccacgcaggcatttttacttttgaggaacctgtgactcatgtgagtgagagcattggcatcatggaggtgaaagtattgagaacatctggagctcgaggaaatgttatcgttccatataaaaccatcgaagggactgccagaggtggaggggaggattttgaggacacttgtggagagctcgaattccagaatgatgaaattgtcaaaacaatatcagtcaaggtaattgatgatgaggagtatgagaaaaacaagaccttcttccttgagattggagagccccgcctggtggagatgagtgagaagaaagccctgttattgaatgagcttggtggcttcacaataacaggaaaatacctgtttggccaacctgtcttcaggaaggttcatgctagagaacatccgattctctctactgtaatcaccattgcagacgaatatgatgacaagcagccactgaccagcaaagaggaagaggagaggcgcattgcagaaatggggcgccccatcctgggagagcacaccaagttggaagtgatcattgaagaatcctatgaattcaagagtactgtggacaaactcattaagaagacaaacctggcccttgtggttgggactaacagctggagagaacagttcattgaagctatcactgtcagtgctggggaagatgatgacgacgatgaatgtggggaagagaagctgccctcctgtttcgattacgtgatgcactttctgactgtgttctggaaggtcctgtttgccttcgtcccccctactgaatactggaatggctgggcgtgtttcattgtctccatcctcatgattggcctactgacagctttcattggagacctggcttcccactttggctgcaccattggcctgaaagattctgtgactgcagtcgtgttcgtcgcacttggaacatcagtgccagacacatttgccagcaaagtggcagccacccaggaccagtatgcagacgcctccataggtaacgtcacgggcagcaacgcggtgaatgtcttcctgggaatcggtgtggcctggtccatcgctgccatctaccacgcagccaatggggaacagttcaaagtgtcccctggcacactagctttctctgtcactctcttcaccatttttgctttcatcaatgtgggggtgctgctgtatcggcggaggccagaaatcggaggtgagctgggtgggccccggactgccaagctcctcacatcctgcctctttgtgctcctatggctcttgtacattttcttctcctccctggaggcctactgccacataaaaggcttctaaaggaactatcagatatagtaaatttatatatatacatatatatacataaaaattatgtataatggacagaggaaactgacatttgtcatgttcacttacctgctgatggaatccagcttcaagagcatactctgtactagggccgaagtaaaaaaccatcacctcccattcccaggggcatcatcatgttcaacaaggcatggaggcagggccatctttgca

SEQ ID NO: 19726 - DNA, 3139 bp, Homo sapiens
  source 1..3139: mol_type = unassigned DNA
taggttgtgacagttggaagtgtcatgtacaacatgcggcgattaagtctttcacccaccttttcaatgggatttcatctgttagttactgtgagtctcttattttcccatgtggaccatgtaattgctgagacagaaatggaaggagaaggaaatgaaactggtgaatgtactggatcatattactgtaagaaaggggtgattttgcccatttgggaaccccaagacccttcttttggggacaaaattgctagagctactgtgtattttgtggccatggtctacatgtttcttggagtctctatcatagctgatcggttcatgtcctctatagaagtcatcacatctcaagaaaaagaaataaccataaagaaacccaatggagagaccaccaagacaactgtgaggatctggaatgaaacagtttctaacctgaccttgatggccctgggatcttctgctcctgagattctcctttcagtaattgaagtgtgtggccataacttcactgcaggagacctcggtcctagcaccatcgtgggaagtgctgcattcaatatgttcatcattattgcactctgtgtttatgtggtgcctgacggagagacaaggaagattaagcatttgcgtgtcttctttgtgacagcagcctggagcatctttgcctacacctggctttacattattttgtctgtcatatctcctggtgttgtggaggtctgggaaggtttgcttactttcttcttctttcccatctgtgttgtgttcgcttgggtagcggataggagacttctgttttacaagtatgtctacaagaggtatcgagctggcaagcagagggggatgattattgaacatgaaggagacaggccatcttctaagactgaaattgaaatggacgggaaagtggtcaattctcatgttgaaaatttcttagatggtgctctggttctggaggtggatgagagggaccaagatgatgaagaagctaggcgagaaatggctaggattctgaaggaacttaagcagaagcatccagataaagaaatagagcaattaatagaattagctaactaccaagtcctaagtcagcagcaaaaaagtagagcattttatcgcattcaagctactcgcctcatgactggagctggcaacattttaaagaggcatgcagctgaccaagcaaggaaggctgtcagcatgcacgaggtcaacactgaagtgactgaaaatgaccctgttagtaagatcttctttgaacaagggacatatcagtgtctggagaactgtggtactgtggcccttaccattatccgcagaggtggtgatttgactaacactgtgtttgttgacttcagaacagaggatggcacagcaaatgctgggtctgattatgaatttactgaaggaactgtggtgtttaagcctggtgatacccagaaggaaatcagagtgggtatcatagatgatgatatctttgaggaggatgaaaatttccttgtgcatctcagcaatgtcaaagtatcttctgaagcttcagaagatggcatactggaagccaatcatgtttctacacttgcttgcctcggatctccctccactgccactgtaactatttttgatgatgaccacgcaggcatttttacttttgaggaacctgtgactcatgtgagtgagagcattggcatcatggaggtgaaagtattgagaacatctggagctcgaggaaatgttatcgttccatataaaaccatcgaagggactgccagaggtggaggggaggattttgaggacacttgtggagagctcgaattccagaatgatgaaattgtcaaaacaatatcagtcaaggtaattgatgatgaggagtatgagaaaaacaagaccttcttccttgagattggagagccccgcctggtggagatgagtgagaagaaagccctgttattgaatgagcttggtggcttcacaataacaggccaacctgtcttcaggaaggttcatgctagagaacatccgattctctctactgtaatcaccattgcagacgaatatgatgacaagcagccactgaccagcaaagaggaagaggagaggcgcattgcagaaatggggcgccccatcctgggagagcacaccaagttggaagtgatcattgaagaatcctatgaattcaagagtactgtggacaaactcattaagaagacaaacctggcccttgtggttgggactaacagctggagagaacagttcattgaagctatcactgtcagtgctggggaagatgatgacgacgatgaatgtggggaagagaagctgccctcctgtttcgattacgtgatgcactttctgactgtgttctggaaggtcctgtttgccttcgtcccccctactgaatactggaatggctgggcgtgtttcattgtctccatcctcatgattggcctactgacagctttcattggagacctggcttcccactttggctgcaccattggcctgaaagattctgtgactgcagtcgtgttcgtcgcacttggaacatcagtgccagacacatttgccagcaaagtggcagccacccaggaccagtatgcagacgcctccataggtaacgtcacgggcagcaacgcggtgaatgtcttcctgggaatcggtgtggcctggtccatcgctgccatctaccacgcagccaatggggaacagttcaaagtgtcccctggcacactagctttctctgtcactctcttcaccatttttgctttcatcaatgtgggggtgctgctgtatcggcggaggccagaaatcggaggtgagctgggtgggccccggactgccaagctcctcacatcctgcctctttgtgctcctatggctcttgtacattttcttctcctccctggaggcctactgccacataaaaggcttctaaaggaactatcagatatagtaaatttatatatatacatatatatacataaaaattatgtataatggacagaggaaactgacatttgtcatgttcacttacctgctgatggaatccagcttcaagagcatactctgtactagggccgaagtaaaaaaccatcacctcccattcccaggggcatcatcatgttcaacaaggcatggaggca

SEQ ID NO: 19727 - DNA, 3065 bp, Homo sapiens
  source 1..3065: mol_type = unassigned DNA
ctttctggtaaatttagagaaggcatcatactgggatcttttttcacatccagcccatgcggactgagcagccaaagcttgacagagtaggttgtgacagttggaagtgtcatgtacaacatgcggcgattaagtctttcacccaccttttcaatgggatttcatctgttagttactgtgagtctcttattttcccatgtggaccatgtaattgctgagacagaaatggaaggagaaggaaatgaaactggtgaatgtactggatcatattactgtaagaaaggggtgattttgcccatttgggaaccccaagacccttcttttggggacaaaattgctagagctactgtgtattttgtggccatggtctacatgtttcttggagtctctatcatagctgatcggttcatgtcctctatagaagtcatcacatctcaagaaaaagaaataaccataaagaaacccaatggagagaccaccaagacaactgtgaggatctggaatgaaacagtttctaacctgaccttgatggccctgggatcttctgctcctgagattctcctttcagtaattgaagtgtgtggccataacttcactgcaggagacctcggtcctagcaccatcgtgggaagtgctgcattcaatatgttcatcattattgcactctgtgtttatgtggtgcctgacggagagacaaggaagattaagcatttgcgtgtcttctttgtgacagcagcctggagcatctttgcctacacctggctttacattattttgtctgtcatatctcctggtgttgtggaggtctgggaaggtttgcttactttcttcttctttcccatctgtgttgtgttcgcttgggtagcggataggagacttctgttttacaagtatgtctacaagaggtatcgagctggcaagcagagggggatgattattgaacatgaaggagacaggccatcttctaagactgaaattgaaatggacgggaaagtggtcaattctcatgttgaaaatttcttagatggtgctctggttctggaggtggatgagagggaccaagatgatgaagaagctaggcgagaaatggctaggattctgaaggaacttaagcagaagcatccagataaagaaatagagcaattaatagaattagctaactaccaagtcctaagtcagcagcaaaaaagtagagcattttatcgcattcaagctactcgcctcatgactggagctggcaacattttaaagaggcatgcagctgaccaagcaaggaaggctgtcagcatgcacgaggtcaacactgaagtgactgaaaatgaccctgttagtaagatcttctttgaacaagggacatatcagtgtctggagaactgtggtactgtggcccttaccattatccgcagaggtggtgatttgactaacactgtgtttgttgacttcagaacagaggatggcacagcaaatgctgggtctgattatgaatttactgaaggaactgtggtgtttaagcctggtgatacccagaaggaaatcagagtgggtatcatagatgatgatatctttgaggaggatgaaaatttccttgtgcatctcagcaatgtcaaagtatcttctgaagcttcagaagatggcatactggaagccaatcatgtttctacacttgcttgcctcggatctccctccactgccactgtaactatttttgatgatgaccacgcaggcatttttacttttgaggaacctgtgactcatgtgagtgagagcattggcatcatggaggtgaaagtattgagaacatctggagctcgaggaaatgttatcgttccatataaaaccatcgaagggactgccagaggtggaggggaggattttgaggacacttgtggagagctcgaattccagaatgatgaaattgtgaagatcattaccattagaatatttgaccgtgaggaatatgagaaagagtgcagtttctcccttgtgcttgaggaaccaaaatggataagaagaggaatgaaaggtggcttcacaataacagacgaatatgatgacaagcagccactgaccagcaaagaggaagaggagaggcgcattgcagaaatggggcgccccatcctgggagagcacaccaagttggaagtgatcattgaagaatcctatgaattcaagagtactgtggacaaactcattaagaagacaaacctggcccttgtggttgggactaacagctggagagaacagttcattgaagctatcactgtcagtgctggggaagatgatgacgacgatgaatgtggggaagagaagctgccctcctgtttcgattacgtgatgcactttctgactgtgttctggaaggtcctgtttgccttcgtcccccctactgaatactggaatggctgggcgtgtttcattgtctccatcctcatgattggcctactgacagctttcattggagacctggcttcccactttggctgcaccattggcctgaaagattctgtgactgcagtcgtgttcgtcgcacttggaacatcagtgccagacacatttgccagcaaagtggcagccacccaggaccagtatgcagacgcctccataggtaacgtcacgggcagcaacgcggtgaatgtcttcctgggaatcggtgtggcctggtccatcgctgccatctaccacgcagccaatggggaacagttcaaagtgtcccctggcacactagctttctctgtcactctcttcaccatttttgctttcatcaatgtgggggtgctgctgtatcggcggaggccagaaatcggaggtgagctgggtgggccccggactgccaagctcctcacatcctgcctctttgtgctcctatggctcttgtacattttcttctcctccctggaggcctactgccacataaaaggcttctaaaggaactatcagatatagtaaatttatatatatacatatatatacataaaaattatgtataatggacagaggaaactgacatttgtcatgttcacttacctgctgatggaatccagcttcaagagcatactctgtactag

SEQ ID NO: 19728 - DNA, 2965 bp, Homo sapiens
  source 1..2965: mol_type = unassigned DNA
tcttggttgctctcaccatgtgatacaccagctccacctttgccttctgctgtgactgtaagtttcctgaggcctctccagaagcagattctagcaccatgctgctcgcacagccttcaaaacttaggttgtgacagttggaagtgtcatgtacaacatgcggcgattaagtctttcacccaccttttcaatgggatttcatctgttagttactgtgagtctcttattttcccatgtggaccatgtaattgctgagacagaaatggaaggagaaggaaatgaaactggtgaatgtactggatcatattactgtaagaaaggggtgattttgcccatttgggaaccccaagacccttcttttggggacaaaattgctagagctactgtgtattttgtggccatggtctacatgtttcttggagtctctatcatagctgatcggttcatgtcctctatagaagtcatcacatctcaagaaaaagaaataaccataaagaaacccaatggagagaccaccaagacaactgtgaggatctggaatgaaacagtttctaacctgaccttgatggccctgggatcttctgctcctgagattctcctttcagtaattgaagtgtgtggccataacttcactgcaggagacctcggtcctagcaccatcgtgggaagtgctgcattcaatatgttcatcattattgcactctgtgtttatgtggtgcctgacggagagacaaggaagattaagcatttgcgtgtcttctttgtgacagcagcctggagcatctttgcctacacctggctttacattattttgtctgtcatatctcctggtgttgtggaggtctgggaaggtttgcttactttcttcttctttcccatctgtgttgtgttcgcttgggtagcggataggagacttctgttttacaagtatgtctacaagaggtatcgagctggcaagcagagggggatgattattgaacatgaaggagacaggccatcttctaagactgaaattgaaatggacgggaaagtggtcaattctcatgttgaaaatttcttagatggtgctctggttctggaggtggatgagagggaccaagatgatgaagaagctaggcgagaaatggctaggattctgaaggaacttaagcagaagcatccagataaagaaatagagcaattaatagaattagctaactaccaagtcctaagtcagcagcaaaaaagtagagcattttatcgcattcaagctactcgcctcatgactggagctggcaacattttaaagaggcatgcagctgaccaagcaaggaaggctgtcagcatgcacgaggtcaacactgaagtgactgaaaatgaccctgttagtaagatcttctttgaacaagggacatatcagtgtctggagaactgtggtactgtggcccttaccattatccgcagaggtggtgatttgactaacactgtgtttgttgacttcagaacagaggatggcacagcaaatgctgggtctgattatgaatttactgaaggaactgtggtgtttaagcctggtgatacccagaaggaaatcagagtgggtatcatagatgatgatatctttgaggaggatgaaaatttccttgtgcatctcagcaatgtcaaagtatcttctgaagcttcagaagatggcatactggaagccaatcatgtttctacacttgcttgcctcggatctccctccactgccactgtaactatttttgatgatgaccacgcaggcatttttacttttgaggaacctgtgactcatgtgagtgagagcattggcatcatggaggtgaaagtattgagaacatctggagctcgaggaaatgttatcgttccatataaaaccatcgaagggactgccagaggtggaggggaggattttgaggacacttgtggagagctcgaattccagaatgatgaaattgtgaagatcattaccattagaatatttgaccgtgaggaatatgagaaagagtgcagtttctcccttgtgcttgaggaaccaaaatggataagaagaggaatgaaaggtggcttcacaataacagacgaatatgatgacaagcagccactgaccagcaaagaggaagaggagaggcgcattgcagaaatggggcgccccatcctgggagagcacaccaagttggaagtgatcattgaagaatcctatgaattcaagagtactgtggacaaactcattaagaagacaaacctggcccttgtggttgggactaacagctggagagaacagttcattgaagctatcactgtcagtgctggggaagatgatgacgacgatgaatgtggggaagagaagctgccctcctgtttcgattacgtgatgcactttctgactgtgttctggaaggtcctgtttgccttcgtcccccctactgaatactggaatggctgggcgtgtttcattgtctccatcctcatgattggcctactgacagctttcattggagacctggcttcccactttggctgcaccattggcctgaaagattctgtgactgcagtcgtgttcgtcgcacttggaacatcagtgccagacacatttgccagcaaagtggcagccacccaggaccagtatgcagacgcctccataggtaacgtcacgggcagcaacgcggtgaatgtcttcctgggaatcggtgtggcctggtccatcgctgccatctaccacgcagccaatggggaacagttcaaagtgtcccctggcacactagctttctctgtcactctcttcaccatttttgctttcatcaatgtgggggtgctgctgtatcggcggaggccagaaatcggaggtgagctgggtgggccccggactgccaagctcctcacatcctgcctctttgtgctcctatggctcttgtacattttcttctcctccctggaggcctactgccacataaaaggcttctaaagg

SEQ ID NO: 19729 - DNA, 2898 bp, Homo sapiens
  source 1..2898: mol_type = unassigned DNA
atgtacaacatgcggcgattaagtctttcacccaccttttcaatgggatttcatctgttagttactgtgagtctcttattttcccatgtggaccatgtaattgctgagacagaaatggaaggagaaggaaatgaaactggtgaatgtactggatcatattactgtaagaaaggggtgattttgcccatttgggaaccccaagacccttcttttggggacaaaattgctagagctactgtgtattttgtggccatggtctacatgtttcttggagtctctatcatagctgatcggttcatgtcctctatagaagtcatcacatctcaagaaaaagaaataaccataaagaaacccaatggagagaccaccaagacaactgtgaggatctggaatgaaacagtttctaacctgaccttgatggccctgggatcttctgctcctgagattctcctttcagtaattgaagtgtgtggccataacttcactgcaggagacctcggtcctagcaccatcgtgggaagtgctgcattcaatatgttcatcattattgcactctgtgtttatgtggtgcctgacggagagacaaggaagattaagcatttgcgtgtcttctttgtgacagcagcctggagcatctttgcctacacctggctttacattattttgtctgtcatatctcctggtgttgtggaggtctgggaaggtttgcttactttcttcttctttcccatctgtgttgtgttcgcttgggtagcggataggagacttctgttttacaagtatgtctacaagaggtatcgagctggcaagcagagggggatgattattgaacatgaaggagacaggccatcttctaagactgaaattgaaatggacgggaaagtggtcaattctcatgttgaaaatttcttagatggtgctctggttctggaggtggatgagagggaccaagatgatgaagaagctaggcgagaaatggctaggattctgaaggaacttaagcagaagcatccagataaagaaatagagcaattaatagaattagctaactaccaagtcctaagtcagcagcaaaaaagtagagcattttatcgcattcaagctactcgcctcatgactggagctggcaacattttaaagaggcatgcagctgaccaagcaaggaaggctgtcagcatgcacgaggtcaacactgaagtgactgaaaatgaccctgttagtaagatcttctttgaacaagggacatatcagtgtctggagaactgtggtactgtggcccttaccattatccgcagaggtggtgatttgactaacactgtgtttgttgacttcagaacagaggatggcacagcaaatgctgggtctgattatgaatttactgaaggaactgtggtgtttaagcctggtgatacccagaaggaaatcagagtgggtatcatagatgatgatatctttgaggaggatgaaaatttccttgtgcatctcagcaatgtcaaagtatcttctgaagcttcagaagatggcatactggaagccaatcatgtttctacacttgcttgcctcggatctccctccactgccactgtaactatttttgatgatgaccacgcaggcatttttacttttgaggaacctgtgactcatgtgagtgagagcattggcatcatggaggtgaaagtattgagaacatctggagctcgaggaaatgttatcgttccatataaaaccatcgaagggactgccagaggtggaggggaggattttgaggacacttgtggagagctcgaattccagaatgatgaaattgtgaagatcattaccattagaatatttgaccgtgaggaatatgagaaagagtgcagtttctcccttgtgcttgaggaaccaaaatggataagaagaggaatgaaaggtggcttcacaataacaggaaaatacctgtttggccaacctgtcttcaggaaggttcatgctagagaacatccgattctctctactgtaatcaccattgcagacgaatatgatgacaagcagccactgaccagcaaagaggaagaggagaggcgcattgcagaaatggggcgccccatcctgggagagcacaccaagttggaagtgatcattgaagaatcctatgaattcaagagtactgtggacaaactcattaagaagacaaacctggcccttgtggttgggactaacagctggagagaacagttcattgaagctatcactgtcagtgctggggaagatgatgacgacgatgaatgtggggaagagaagctgccctcctgtttcgattacgtgatgcactttctgactgtgttctggaaggtcctgtttgccttcgtcccccctactgaatactggaatggctgggcgtgtttcattgtctccatcctcatgattggcctactgacagctttcattggagacctggcttcccactttggctgcaccattggcctgaaagattctgtgactgcagtcgtgttcgtcgcacttggaacatcagtgccagacacatttgccagcaaagtggcagccacccaggaccagtatgcagacgcctccataggtaacgtcacgggcagcaacgcggtgaatgtcttcctgggaatcggtgtggcctggtccatcgctgccatctaccacgcagccaatggggaacagttcaaagtgtcccctggcacactagctttctctgtcactctcttcaccatttttgctttcatcaatgtgggggtgctgctgtatcggcggaggccagaaatcggaggtgagctgggtgggccccggactgccaagctcctcacatcctgcctctttgtgctcctatggctcttgtacattttcttctcctccctggaggcctactgccacataaaaggcttctaa

SEQ ID NO: 19730 - DNA, 563 bp, Homo sapiens
  source 1..563: mol_type = unassigned DNA
atcagtcgtggtgactgccctggttgcactgtaagtatggggggacgtctccacgaaaaaaaactaactttctgccttgtgctctgcaggtccctccttctcccaccttccccaagtagctgctcctgacccccccacacaccttggcaaacgacaccagtggccgatagcaactggtgttttaaaaatactaatttggagccccatttgagacctacaacgggagagtctgcatcagattcggcctcagattctacagcatctgactacattcccagtaggttgtgacagttggaagtgtcatgtacaacatgcggcgattaagtctttcacccaccttttcaatgggatttcatctgttagttactgtgagtctcttattttcccatgtggaccatgtaattgctgagacagaaatggaaggagaaggaaatgaaactggtgaatgtactggatcatattactgtaagaaaggggtgattttgcccatttgggaaccccaagacccttcttttggggacaaaattgctagagctactgtgtattttgtggccatggtctac

SEQ ID NO: 19731 - DNA, 561 bp, Homo sapiens
  source 1..561: mol_type = unassigned DNA
ctttctggtaaatttagagaaggcatcatactgggatcttttttcacatccagcccatgcggactgagcagccaaagcttgacagaggtccctccttctcccaccttccccaagtagctgctcctgacccccccacacaccttggcaaacgacaccagtggccgatagcaactggtgttttaaaaatactaatttggagccccatttgagacctacaacgggagagtctgcatcagattcggcctcagattctacagcatctgactacattcccagtaggttgtgacagttggaagtgtcatgtacaacatgcggcgattaagtctttcacccaccttttcaatgggatttcatctgttagttactgtgagtctcttattttcccatgtggaccatgtaattgctgagacagaaatggaaggagaaggaaatgaaactggtgaatgtactggatcatattactgtaagaaaggggtgattttgcccatttgggaaccccaagacccttcttttggggacaaaattgctagagctactgtgtattttgtggccatggtctac

SEQ ID NO: 19732 - DNA, 583 bp, Homo sapiens
  source 1..583: mol_type = unassigned DNA
agcgacctcttcctgatcgggagctgtttaaaaggagggagtgcgccgtattttctactagcgtggaggaacggaggaagaatccattcacactccccaaaccagggatgtcatggtctagaacacctatgctgaagtacaaggctgagcaagaaagatcactccactgcaactgagcaaagtgctgaaggagttgaaaggaagaagagaacattggacgtggtttcacggaggaggaagcattttaatttattcagaaagagtgaaaaggattttgaaagcaaataaggctagccacttttgaaacatgtcaaagagccccagcttatttacgacaagtaggttgtgacagttggaagtgtcatgtacaacatgcggcgattaagtctttcacccaccttttcaatgggatttcatctgttagttactgtgagtctcttattttcccatgtggaccatgtaattgctgagacagaaatggaaggagaaggaaatgaaactggtgaatgtactggatcatattactgtaagaaaggggtgattttgcccatttgggaaccccaagacccttcttttggggaca

SEQ ID NO: 19733 - DNA, 2922 bp, Homo sapiens
  source 1..2922: mol_type = unassigned DNA
atgtacaacatgcggcgattaagtctttcacccaccttttcaatgggatttcatctgttagttactgtgagtctcttattttcccatgtggaccatgtaattgctgagacagaaatggaaggagaaggaaatgaaactggtgaatgtactggatcatattactgtaagaaaggggtgattttgcccatttgggaaccccaagacccttcttttggggacaaaattgctagagctactgtgtattttgtggccatggtctacatgtttcttggagtctctatcatagctgatcggttcatgtcctctatagaagtcatcacatctcaagaaaaagaaataaccataaagaaacccaatggagagaccaccaagacaactgtgaggatctggaatgaaacagtttctaacctgaccttgatggccctgggatcttctgctcctgagattctcctttcagtaattgaagtgtgtggccataacttcactgcaggagacctcggtcctagcaccatcgtgggaagtgctgcattcaatatgttcatcattattgcactctgtgtttatgtggtgcctgacggagagacaaggaagattaagcatttgcgtgtcttctttgtgacagcagcctggagcatctttgcctacacctggctttacattattttgtctgtcatatctcctggtgttgtggaggtctgggaaggtttgcttactttcttcttctttcccatctgtgttgtgttcgcttgggtagcggataggagacttctgttttacaagtatgtctacaagaggtatcgagctggcaagcagagggggatgattattgaacatgaaggagacaggccatcttctaagactgaaattgaaatggacgggaaagtggtcaattctcatgttgaaaatttcttagatggtgctctggttctggaggtggatgagagggaccaagatgatgaagaagctaggcgagaaatggctaggattctgaaggaacttaagcagaagcatccagataaagaaatagagcaattaatagaattagctaactaccaagtcctaagtcagcagcaaaaaagtagagcattttatcgcattcaagctactcgcctcatgactggagctggcaacattttaaagaggcatgcagctgaccaagcaaggaaggctgtcagcatgcacgaggtcaacactgaagtgactgaaaatgaccctgttagtaagatcttctttgaacaagggacatatcagtgtctggagaactgtggtactgtggcccttaccattatccgcagaggtggtgatttgactaacactgtgtttgttgacttcagaacagaggatggcacagcaaatgctgggtctgattatgaatttactgaaggaactgtggtgtttaagcctggtgatacccagaaggaaatcagagtgggtatcatagatgatgatatctttgaggaggatgaaaatttccttgtgcatctcagcaatgtcaaagtatcttctgaagcttcagaagatggcatactggaagccaatcatgtttctacacttgcttgcctcggatctccctccactgccactgtaactatttttgatgatgaccacgcaggcatttttacttttgaggaacctgtgactcatgtgagtgagagcattggcatcatggaggtgaaagtattgagaacatctggagctcgaggaaatgttatcgttccatataaaaccatcgaagggactgccagaggtggaggggaggattttgaggacacttgtggagagctcgaattccagaatgatgaaattgtcaaaacaatatcagtcaaggtaattgatgatgaggagtatgagaaaaacaagaccttcttccttgagattggagagccccgcctggtggagatgagtgagaagaaagccctgttattgaatgagcttggtggcttcacaataacaggaaaatacctgtttggccaacctgtcttcaggaaggttcatgctagagaacatccgattctctctactgtaatcaccattgcagacgaatatgatgacaagcagccactgaccagcaaagaggaagaggagaggcgcattgcagaaatggggcgccccatcctgggagagcacaccaagttggaagtgatcattgaagaatcctatgaattcaagagtactgtggacaaactcattaagaagacaaacctggcccttgtggttgggactaacagctggagagaacagttcattgaagctatcactgtcagtgctggggaagatgatgacgacgatgaatgtggggaagagaagctgccctcctgtttcgattacgtgatgcactttctgactgtgttctggaaggtcctgtttgccttcgtcccccctactgaatactggaatggctgggcgtgtttcattgtctccatcctcatgattggcctactgacagctttcattggagacctggcttcccactttggctgcaccattggcctgaaagattctgtgactgcagtcgtgttcgtcgcacttggaacatcagtgccagacacatttgccagcaaagtggcagccacccaggaccagtatgcagacgcctccataggtaacgtcacgggcagcaacgcggtgaatgtcttcctgggaatcggtgtggcctggtccatcgctgccatctaccacgcagccaatggggaacagttcaaagtgtcccctggcacactagctttctctgtcactctcttcaccatttttgctttcatcaatgtgggggtgctgctgtatcggcggaggccagaaatcggaggtgagctgggtgggccccggactgccaagctcctcacatcctgcctctttgtgctcctatggctcttgtacattttcttctcctccctggaggcctactgccacataaaaggcttctaa

SEQ ID NO: 19734 - DNA, 2814 bp, Homo sapiens
  source 1..2814: mol_type = unassigned DNA
atgtacaacatgcggcgattaagtctttcacccaccttttcaatgggatttcatctgttagttactgtgagtctcttattttcccatgtggaccatgtaattgctgagacagaaatggaaggagaaggaaatgaaactggtgaatgtactggatcatattactgtaagaaaggggtgattttgcccatttgggaaccccaagacccttcttttggggacaaaattgctagagctactgtgtattttgtggccatggtctacatgtttcttggagtctctatcatagctgatcggttcatgtcctctatagaagtcatcacatctcaagaaaaagaaataaccataaagaaacccaatggagagaccaccaagacaactgtgaggatctggaatgaaacagtttctaacctgaccttgatggccctgggatcttctgctcctgagattctcctttcagtaattgaagtgtgtggccataacttcactgcaggagacctcggtcctagcaccatcgtgggaagtgctgcattcaatatgttcatcattattgcactctgtgtttatgtggtgcctgacggagagacaaggaagattaagcatttgcgtgtcttctttgtgacagcagcctggagcatctttgcctacacctggctttacattattttgtctgtcatatctcctggtgttgtggaggtctgggaaggtttgcttactttcttcttctttcccatctgtgttgtgttcgcttgggtagcggataggagacttctgttttacaagtatgtctacaagaggtatcgagctggcaagcagagggggatgattattgaacatgaaggagacaggccatcttctaagactgaaattgaaatggacgggaaagtggtcaattctcatgttgaaaatttcttagatggtgctctggttctggaggtggatgagagggaccaagatgatgaagaagctaggcgagaaatggctaggattctgaaggaacttaagcagaagcatccagataaagaaatagagcaattaatagaattagctaactaccaagtcctaagtcagcagcaaaaaagtagagcattttatcgcattcaagctactcgcctcatgactggagctggcaacattttaaagaggcatgcagctgaccaagcaaggaaggctgtcagcatgcacgaggtcaacactgaagtgactgaaaatgaccctgttagtaagatcttctttgaacaagggacatatcagtgtctggagaactgtggtactgtggcccttaccattatccgcagaggtggtgatttgactaacactgtgtttgttgacttcagaacagaggatggcacagcaaatgctgggtctgattatgaatttactgaaggaactgtggtgtttaagcctggtgatacccagaaggaaatcagagtgggtatcatagatgatgatatctttgaggaggatgaaaatttccttgtgcatctcagcaatgtcaaagtatcttctgaagcttcagaagatggcatactggaagccaatcatgtttctacacttgcttgcctcggatctccctccactgccactgtaactatttttgatgatgaccacgcaggcatttttacttttgaggaacctgtgactcatgtgagtgagagcattggcatcatggaggtgaaagtattgagaacatctggagctcgaggaaatgttatcgttccatataaaaccatcgaagggactgccagaggtggaggggaggattttgaggacacttgtggagagctcgaattccagaatgatgaaattgtgaagatcattaccattagaatatttgaccgtgaggaatatgagaaagagtgcagtttctcccttgtgcttgaggaaccaaaatggataagaagaggaatgaaaggtggcttcacaataacagacgaatatgatgacaagcagccactgaccagcaaagaggaagaggagaggcgcattgcagaaatggggcgccccatcctgggagagcacaccaagttggaagtgatcattgaagaatcctatgaattcaagagtactgtggacaaactcattaagaagacaaacctggcccttgtggttgggactaacagctggagagaacagttcattgaagctatcactgtcagtgctggggaagatgatgacgacgatgaatgtggggaagagaagctgccctcctgtttcgattacgtgatgcactttctgactgtgttctggaaggtcctgtttgccttcgtcccccctactgaatactggaatggctgggcgtgtttcattgtctccatcctcatgattggcctactgacagctttcattggagacctggcttcccactttggctgcaccattggcctgaaagattctgtgactgcagtcgtgttcgtcgcacttggaacatcagtgccagacacatttgccagcaaagtggcagccacccaggaccagtatgcagacgcctccataggtaacgtcacgggcagcaacgcggtgaatgtcttcctgggaatcggtgtggcctggtccatcgctgccatctaccacgcagccaatggggaacagttcaaagtgtcccctggcacactagctttctctgtcactctcttcaccatttttgctttcatcaatgtgggggtgctgctgtatcggcggaggccagaaatcggaggtgagctgggtgggccccggactgccaagctcctcacatcctgcctctttgtgctcctatggctcttgtacattttcttctcctccctggaggcctactgccacataaaaggcttctaa

SEQ ID NO: 19735 - DNA, 137 bp, Homo sapiens
  source 1..137: mol_type = unassigned DNA
gttttccagcactttgggaggctgaggcgtgtggatcacctgaggtcaggagttcgagactagcctggccaacgcaagggcagtgactggaagctgggagagagggtcaacagctgaatctcagcctgatggaggcc

SEQ ID NO: 19736 - DNA, 621 bp, Homo sapiens
  source 1..621: mol_type = unassigned DNA
tgctggattttctggaaaactttttgcttttcttctaaaaggaacagatgtcaggaaacccagtgttgcatcacctgcttcttttctgtcttgagtgcaggtatgaagccttatgcagtggtagccatcttgcaaccatgaggcacttgactaagcaaaaagaaaaaaaaagaaaaaaaaatccaacaaggtcttgctctgtggcccaggctggtgtgcagtagcaagattacagctgactgcagccttgacctcccaggctcaagtgatcctcccatctcagcacccccttcacgctaccctgagtagttggactacagggaaagtaagcttattgcagcaagttgtgttggtgccacaagatgccacccttcccttgaaaagaagagactaaaggtaattatccagttgatatttatcttgttccagtcacctttagaaagctgtttggttttggaaatcactagtgggtaaaaaagaccaatttgcaactaggctctcatgctctgttgaaaactatgtcacaatatcacaatactagatgctgggctcaagacagcaaacagaaagcagcaagggcagtgactggaagctgggagagagggtcaacagctgaatctc

SEQ ID NO: 19737 - DNA, 623 bp, Homo sapiens
  source 1..623: mol_type = unassigned DNA
gcagataatgcgcgtctgccatactcgggggcatgatttcagtatgaagaaaaaatgccgacctttgtcttgtatgtctgacaagaagaaaaaaatgccactcccctccaagctggatgttctgtgaagccaaagatttacagtctaatgaaacctccaccacagttattacggtgtcagaattcttgcctttgtttgggaaagtaagcttattgcagcaagttgtgttggtgccacaagatgccacccttcccttgaaaagaagagactaaaggtcttgtagcttgttctactcatctagagcttgtgtacatctgctaagtcacctggggattgctctcggaaaccatttaagcaacagacatgaaggtgtttggtcataaacaacacattctacaagagtaattatccagttgatatttatcttgttccagtcacctttagaaagctgtttggttttggaaatcactagtgggtaaaaaagaccaatttgcaactaggctctcatgctctgttgaaaactatgtcacaatatcacaatactagatgctgggctcaagacagcaaacagaaagcagcaagggcagtgactggaagctgggagagagggtcaacagctgaat

SEQ ID NO: 19738 - DNA, 225 bp, Homo sapiens
  source 1..225: mol_type = unassigned DNA
gtgctcactctgaccttcctccctacaaagttgtgtgcttctccttttccttatgccatgattgttaagtttcctgaggcctccccagcaatgcagaactggagcgttccacttggctgggagcagataatgtgtgcatcccgagagcagacagaaccaagagcaggcaaacttagaagacactcagctaagcacttgctgacttcttacaggttcaccgatcag

SEQ ID NO: 19739 - DNA, 200 bp, Homo sapiens
  source 1..200: mol_type = unassigned DNA
ctcactctgaccttcctccctacaaagttgtgtgcttctccttttccttatgccatgattgttaagtttcctgaggcctccccagcaatgcagaactgtaattatccagttgatatttatcttgttccagtcacctttagaaagctgtttggcaagggcagtgactggaagctgggagagagggtcaacagctgaatctc

SEQ ID NO: 19740 - DNA, 212 bp, Homo sapiens
  source 1..212: mol_type = unassigned DNA
gccatgattgttaagtttcctgaggcctccccagcaatgcagaactaagtttacgaagacaaaagaggaatgacgactcagcatattggagcgttccacttggctgggagcagataatgtgtgcatcccgagagcagacagaaccaagagcaggcaaacttagaagacactcagctaagcacttgctgacttcttacaggttcaccgatcag

SEQ ID NO: 19741 - DNA, 327 bp, Homo sapiens
  source 1..327: mol_type = unassigned DNA
actcaatatcatgtttactgtgggtttgtcatatacagcctttgttatgttgagaagtttacgaagacaaaagaggaatgacgactcagcatattgtaatgtatattcaatatgtgctttgctaaatatatttgaaaagtatataggtatattgaaaaagaccatgtccaactgaaaatgcccagctaatgaaaataacatttttcttcctactgaaaactaaggtaattatccagttgatatttatcttgttccagtcacctttagaaagctgtttggcaagggcagtgactggaagctgggagagagggtcaacagctgaatctc

SEQ ID NO: 19742 - DNA, 233 bp, Homo sapiens
  source 1..233: mol_type = unassigned DNA
gtttactgtgggtttgtcatatacagcctttgttatgttgagaagtttacgaagacaaaagaggaatgacgactcagcatattgtaattatccagttgatatttatcttgttccagtcacctttagaaagctgtttgctctcaaatctccaggcagcctctattgattgatctgagttggcagatgagttggcaggcaagggcagtgactggaagctgggagagagggtcaac

SEQ ID NO: 19743 - DNA, 181 bp, Homo sapiens
  source 1..181: mol_type = unassigned DNA
actgtgggtttgtcatatacagcctttgttatgttgagaagtttacgaagacaaaagaggaatgacgactcagcatattgtaattatccagttgatatttatcttgttccagtcacctttagaaagctgtttggcaagggcagtgactggaagctgggagagagggtcaacagctgaatct

SEQ ID NO: 19744 - DNA, 545 bp, Homo sapiens
  source 1..545: mol_type = unassigned DNA
agtcctcatctgcagtgatgacagtagtaggtggaacatgcctgtccttgggcaacagggcagtgcacgtgccagcaccaagtggttccagaagtttacgaagacaaaagaggaatgacgactcagcatattgtaattatccagttgatatttatcttgttccagtcacctttagaaagctgtttggtgagtacaatgttaatatagagacaatcagaatggtgtgtgcttttgtacaaaacttgtggatccatcaatgaggcatctgccattttttctttcttcccctctatattacaagttctggaatgcctgttctaattctccaaggagaattagaaaataaaaggcagagtctagagccatgtcaatatcctcccacagaatgtgtatggagaatattccactgggaaccatgatagataaaaacttaccaggaagagcaaaacatcaagagagtctgacaaaagctctgccctcctctgtaacccagcagcctctgcagaatcatcctttcttcattgttttaaaatgttgttaaatac

SEQ ID NO: 19745 - DNA, 565 bp, Homo sapiens
  source 1..565: mol_type = unassigned DNA
ctttggagtcttgctcttgctgccaggctggagtgcagtggcgggatctcggctcactgcaacctccaccttgtgggttcaagcaattctcctgcctcagcctcccgagtagctgggattacagggagcgttccacttggctgggagcagataatgtgtgcatcccgagagcagacagaaccaagagcaggcaaacttagaagacactcagctaagcacttgctgacttcttacaggttcaccgatcaggtaattatccagttgatatttatcttgttccagtcacctttagaaagctgtttgaatgtgtatggagaatattccactgggaaccatgatagataaaaacttaccaggaagagcaaaacatcaagagagtctgacaaaagctctgccctcctctgtaacccagcagcctctgcagaatcatcctttcttcattgttttaaaatgttgttaaataccttgtcagttgctttaaagggacccagacccattctgatatttttacaaaataaatccagtctttgggtaaaggtatagtaatactatccatggatctgat

SEQ ID NO: 19746 - DNA, 342 bp, Homo sapiens
  source 1..342: mol_type = unassigned DNA
atgaaagtctatatcctactttgacttcactctggggttgcttgctggctgaaaggaaggagaatcaaatttagaaatatctgaaaggaaatccagatataggctattaatagatgagaggtgaagctaggctatatcagctgctgagttctgcaccaattcaaatgagagaccctagaaaggagcctccagggaactccagctactgtatacatcatctgtggttttcaagcttcttgagccttgtaattatccagttgatatttatcttgttccagtcacctttagaaagctgtttggcaagggcagtgactggaagctgggagagagggtcaacagctg

SEQ ID NO: 19747 - DNA, 637 bp, Homo sapiens
  source 1..637: mol_type = unassigned DNA
gacttcactctggggttgcttgctggctgaaaggaaggagaatcaaatttagaaatatctgaaaggaaatccagatataggctattaatagatgagaggtgaagctaggctatatcagctgctgaggtactaccaattatacttagattaaggagaggattttaaataagagcatgaacctaaggccatgagagtgggaggaatagtgagctttcaaaacttctaattttcagaggcaagacctcaaccatggcttatgtatataacaaaggtgattttacataataagagaaatgaaaatttattttcaggaaagtttaggaaactaagaaaaaaataaggttaattgtgtttgagggactatcttaaagtttcaatagtgccataagaggaaaaaaatagaagaatatagaataatgaaattgtgaagactctctggcttaggaggcatccatcgtttactgctgcccaaacttctctaccaggcatttaaaatcttccattcgcaggtaattatccagttgatatttatcttgttccagtcacctttagaaagctgtttggcaagggcagtgactggaagctgggagagagggtcaacagctgaatctcagcctgatggaggccaccatttaat

SEQ ID NO: 19748 - DNA, 472 bp, Homo sapiens
  source 1..472: mol_type = unassigned DNA
actctggggttgcttgctggctgaaaggaaggagaatcaaatttagaaatatctgaaaggaaatccagatataggctattaatagatgagaggtgaagctaggctatatcagctgctgaggtaattatccagttgatatttatcttgttccagtcacctttagaaagctgtttgtaattaatcaaactcaataacagcacaaaagtaacaactcaggtgaaaagaaaactcacttatgtcttcaatgtccaatcaacattgccaaatgggagaacagttttggaaatcactagtgggtaaaaaagaccaatttgcaactaggctctcatgctctgttgaaaactatgtcacaatatcacaatactagatgctgggctcaagacagcaaacagaaagcagcaagggcagtgactggaagctgggagagagggtcaacagctgaatctcagcctgatggaggccaccatttaat

SEQ ID NO: 19749 - DNA, 700 bp, Homo sapiens
  source 1..700: mol_type = unassigned DNA
ggggttgcttgctggctgaaaggaaggagaatcaaatttagaaatatctgaaaggaaatccagatataggctattaatagatgagaggtgaagctaggctatatcagctgctgaggtactaccaattatacttagattaaggagaggattttaaataagagcatgaacctaaggccatgagagtgggaggaatagtgagctttcaaaacttctaattttcagaggcaagacctcaaccatggcttatgtatataacaaaggtgattttacataataagagaaatgaaaatttattttcaggaaagtttaggaaactaagaaaaaaataaggttaattgtgtttgagggactatcttaaagtttcaatagtgccataagaggaaaaaaatagaagaatatagaataatgaaattgtgaagactctctggcttaggaggcatccatcgtttactgctgcccaaacttctctaccaggcatttaaaatcttccattcgcaggtaattatccagttgatatttatcttgttccagtcacctttagaaagctgtttgtaattaatcaaactcaataacagcacaaaagtaacaactcaggtgaaaagaaaactcacttatgtcttcaatgtccaatcaacattgccaaatgggagaacagcaagggcagtgactggaagctgggagagagggtcaacagctgaat

SEQ ID NO: 19750 - DNA, 340 bp, Homo sapiens
  source 1..340: mol_type = unassigned DNA
ggggttgcttgctggctgaaaggaaggagaatcaaatttagaaatatctgaaaggaaatccagatataggctattaatagatgagaggtgaagctaggctatatcagctgctgaggtaattatccagttgatatttatcttgttccagtcacctttagaaagctgtttggttttggaaatcactagtgggtaaaaaagaccaatttgcaactaggctctcatgctctgttgaaaactatgtcacaatatcacaatactagatgctgggctcaagacagcaaacagaaagcagcaagggcagtgactggaagctgggagagagggtcaacagctgaatctc

SEQ ID NO: 19751 - DNA, 347 bp, Homo sapiens
  source 1..347: mol_type = unassigned DNA
gcttgctggctgaaaggaaggagaatcaaatttagaaatatctgaaaggaaatccagatataggctattaatagatgagaggtgaagctaggctatatcagctgctgaggtaattatccagttgatatttatcttgttccagtcacctttagaaagctgtttggaatcactaggtacttctaaatcactggagagtcaatctgaagtcagatgcatactccctgaatattagtctttcagctctcaaatctccaggcagcctctattgattgatctgagttggcagatgagttggcaggcaagggcagtgactggaagctgggagagagggtcaacagctgaatctc

SEQ ID NO: 19752 - DNA, 862 bp, Homo sapiens
  source 1..862: mol_type = unassigned DNA
ctccctccagggttccccagtgtctattgtttggatctttatgtccacgtgtatgcaatgtttagctcccattcatcataagtgagaacatgttgtatttggttttctatgttaatttgcttaagataatagcttctagctgcatccatgttgccgcaaaaagtatgatttatttatttttttaaacttttaagttcagggtacatgtgcaggtttgttacataggcacatttttgtcatgaggatttgttgtacagattatttcatcacccaggtattacgctgtattagtctgttctcatgctgctcataaagacatatccgagactgagcaatttgtaaaggaaaggggtttaattgactcacagttcagcatgggtggggaggcctcaggaaatttacaatcatggcagaaggggaagcaaacatgtccttcacatggtggcagcaagaagtgtggagtgaagtgggggcaaagccccttatgaaaccatcagatcttgtgagaactcactatcatgagaacagcatggaggtaattatccagttgatatttatcttgttccagtcacctttagaaagctgtttgtaattaatcaaactcaataacagcacaaaagtaacaactcaggtgaaaagaaaactcacttatgtcttcaatgtccaatcaacattgccaaatgggagaacagttttggaaatcactagtgggtaaaaaagaccaatttgcaactaggctctcatgctctgttgaaaactatgtcacaatatcacaatactagatgctgggctcaagacagcaaacagaaagcagcaagggcagtgactggaagctgggagagagggtcaacagctgaatctc

SEQ ID NO: 19753 - DNA, 238 bp, Homo sapiens
  source 1..238: mol_type = unassigned DNA
acaatcatggcagaaggggaagcaaacatgtccttcacatggtggcagcaagaagtgtggagtgaagtgggggcaaagccccttatgaaaccatcagatcttgtgagaactcactatcatgagaacagcatggaggtaattatccagttgatatttatcttgttccagtcacctttagaaagctgtttggcaagggcagtgactggaagctgggagagagggtcaacagctgaatctc

SEQ ID NO: 19754 - DNA, 592 bp, Homo sapiens
  source 1..592: mol_type = unassigned DNA
tcacttttgccatgaagcccagagcataaagctcctgggtctctgcacatgcccgagtggctactctgccaagattccatacagctctgtttgtcagactgaaggcgctggtgtagtgtattcatgaggggatctcctgaccagaggattgcaaagatccacgggagaagcatggcttcctggagtcacacattcactcactgctttccttggtagaggaggttccgttagctctgtgtttctcctgggtaattatccagttgatatttatcttgttccagtcacctttagaaagctgtttgtaattaatcaaactcaataacagcacaaaagtaacaactcaggtgaaaagaaaactcacttatgtcttcaatgtccaatcaacattgccaaatgggagaacagttttggaaatcactagtgggtaaaaaagaccaatttgcaactaggctctcatgctctgttgaaaactatgtcacaatatcacaatactagatgctgggctcaagacagcaaacagaaagcagcaagggcagtgactggaagctgggagagagggtcaacagctgaatctcagcctgatggaggccac

SEQ ID NO: 19755 - DNA, 442 bp, Homo sapiens
  source 1..442: mol_type = unassigned DNA
agaatcatcaggtggtgaagccagcctgacttgtgtccttcccttcatggtggtaattatccagttgatatttatcttgttccagtcacctttagaaagctgtttgtttaggatcagggaccttttgctgtggaatcaccaatgaatcaagacccctgtggaaaatgcaattaattaatcaaactcaataacagcacaaaagtaacaactcaggtgaaaagaaaactcacttatgtcttcaatgtccaatcaacattgccaaatgggagaacagttttggaaatcactagtgggtaaaaaagaccaatttgcaactaggctctcatgctctgttgaaaactatgtcacaatatcacaatactagatgctgggctcaagacagcaaacagaaagcagcaagggcagtgactggaagctgggagagagggtcaacagctgaatc

SEQ ID NO: 19756 - DNA, 770 bp, Homo sapiens
  source 1..770: mol_type = unassigned DNA
aatcatcaggtggtgaagccagcctgacttgtgtccttcccttcatggtggtaattatccagttgatatttatcttgttccagtcacctttagaaagctgtttgttcatttcaggtggccctgttcctttcactcagaaactttgaagcaggttcttaccaaatgctctttactgtatcaggagaacaaagattgaagaaggtatgggcagtttgtgaatccagactcctggatttgtgctgctttgtgcattcatgatcacacattcacacagcccaatcaactatcacagagactggaaaatctcaagacctgaagatactacctttgatcaaactgtgacaatatttatggaattaaactacatggcacagtcatttaccttttaaaattaggtgtccaagagagaatccaaggggtgctgacaaggtctagataactgatacatttgacaacggacagagtgtccaaggaaaatatcaagaagcttcatcatgttcaactccgactgtgactacacaatgctctcaaatctccaggcagcctctattgattgatctgagttggcagatgagttggcaggttttggaaatcactagtgggtaaaaaagaccaatttgcaactaggctctcatgctctgttgaaaactatgtcacaatatcacaatactagatgctgggctcaagacagcaaacagaaagcagcaagggcagtgactggaagctgggagagagggtcaacagctgaatctcagcctgatggaggccac

SEQ ID NO: 19757 - DNA, 737 bp, Homo sapiens
  source 1..737: mol_type = unassigned DNA
aatcatcaggtggtgaagccagcctgacttgtgtccttcccttcatggtgttctgcaccaattcaaatgagagaccctagaaaggagcctccagggaactccagctactgtatacatcatctgtggttttcaagcttcttgagccttgtaattatccagttgatatttatcttgttccagtcacctttagaaagctgtttgtaattaatcaaactcaataacagcacaaaagtaacaactcaggtgaaaagaaaactcacttatgtcttcaatgtccaatcaacattgccaaatgggagaacagagaacaaagattgaagaaggtatgggcagtttgtgaatccagactcctggatttgtgctgctttgtgcattcatgatcacacattcacacagcccaatcaactatcacagagactggtgtccaagagagaatccaaggggtgctgacaaggtctagataactgatacatttgacaacggacagagtgtccaaggaaaatatcaagaagcttcatcatgttcaactccgactgtgactacacaatggttttggaaatcactagtgggtaaaaaagaccaatttgcaactaggctctcatgctctgttgaaaactatgtcacaatatcacaatactagatgctgggctcaagacagcaaacagaaagcagcaagggcagtgactggaagctgggagagagggtcaacagctgaatctcagcctgatggaggccac

SEQ ID NO: 19758 - DNA, 394 bp, Homo sapiens
  source 1..394: mol_type = unassigned DNA
aatcatcaggtggtgaagccagcctgacttgtgtccttcccttcatggtggtaattatccagttgatatttatcttgttccagtcacctttagaaagctgtttgtaattaatcaaactcaataacagcacaaaagtaacaactcaggtgaaaagaaaactcacttatgtcttcaatgtccaatcaacattgccaaatgggagaacagttttggaaatcactagtgggtaaaaaagaccaatttgcaactaggctctcatgctctgttgaaaactatgtcacaatatcacaatactagatgctgggctcaagacagcaaacagaaagcagcaagggcagtgactggaagctgggagagagggtcaacagctgaatctcagcctgatggaggccac

SEQ ID NO: 19759 - DNA, 350 bp, Homo sapiens
  source 1..350: mol_type = unassigned DNA
aatcatcaggtggtgaagccagcctgacttgtgtccttcccttcatggtggtaattatccagttgatatttatcttgttccagtcacctttagaaagctgtttgctctcaaatctccaggcagcctctattgattgatctgagttggcagatgagttggcaggttttggaaatcactagtgggtaaaaaagaccaatttgcaactaggctctcatgctctgttgaaaactatgtcacaatatcacaatactagatgctgggctcaagacagcaaacagaaagcagcaagggcagtgactggaagctgggagagagggtcaacagctgaatctcagcctgatggaggccac

SEQ ID NO: 19760 - DNA, 418 bp, Homo sapiens
  source 1..418: mol_type = unassigned DNA
ggtgaagccagcctgacttgtgtccttcccttcatggtggtaattatccagttgatatttatcttgttccagtcacctttagaaagctgtttgctctcaaatctccaggcagcctctattgattgatctgagttggcagatgagttggcaggtctctactttgagttagatgacttcagaaatgatcacacatttcatgtcaaatttccaggcctcaaattcctgttcccagtgatatgagtacccacagataattcactggttttggaaatcactagtgggtaaaaaagaccaatttgcaactaggctctcatgctctgttgaaaactatgtcacaatatcacaatactagatgctgggctcaagacagcaaacagaaagcagcaagggcagtgactggaagctgggagagagggtc

SEQ ID NO: 19761 - DNA, 239 bp, Homo sapiens
  source 1..239: mol_type = unassigned DNA
ggtgaagccagcctgacttgtgtccttcccttcatggtggtaattatccagttgatatttatcttgttccagtcacctttagaaagctgtttgctctcaaatctccaggcagcctctattgattgatctgagttggcagatgagttggcaggcctcaaattcctgttcccagtgatatgagtacccacagataattcactggcaagggcagtgactggaagctgggagagagggtcaac

SEQ ID NO: 19762 - DNA, 309 bp, Homo sapiens
  source 1..309: mol_type = unassigned DNA
ggtgaagccagcctgacttgtgtccttcccttcatggtggtaattatccagttgatatttatcttgttccagtcacctttagaaagctgtttgtttaggatcagggaccttttgctgtggaatcaccaatgaatcaagacccctgtggaaaatgcaattaattaatcaaactcaataacagcacaaaagtaacaactcaggtgaaaagaaaactcacttatgtcttcaatgtccaatcaacattgccaaatgggagaacagcaagggcagtgactggaagctgggagagagggtcaacagctgaatctc

SEQ ID NO: 19763 - DNA, 697 bp, Homo sapiens
  source 1..697: mol_type = unassigned DNA
aaaagaattcagcaatggtgaggcaaatgatctttgtaataagattttcccaacttgaaatgttgaataaaagaccctatatcaaacttacacaggtcttggctcatggtaatctctggatgtgtgtgttgggtctgaatccatttatcttattagtggaagacagaatgtgaaattaagaaaattaatatttctatttctgttagaggaaagtttcttgataggtttcaaaatggccccattaagcaatctcaaattgataaaatgtagaccaaaatggaaggttaatttaattagaatgccataagtggactcttcctgactaaatcaaagactagtgttaattttcttaaattactctgttttgaattctttatataccatttagggtacctaatataatactttgcacaaaataaatgcttgatttatgaaattgtacatctgaagaaatataaaaggctctaacttttgattttaaaattgtttcactctcttgactgtatagtttatgagcctatgatcctggaaaacacgcttgctaaactgaccaattttttgctttttttttggtttgatttcttttttattctttttccttaggtaattatccagttgatatttatcttgttccagtcacctttagaaagctgtttggcaagggcagtgactggaagctgggagagagggtcaacag

SEQ ID NO: 19764 - DNA, 935 bp, Homo sapiens
  source 1..935: mol_type = unassigned DNA
gtaattatccagttgatatttatcttgttccagtcacctttagaaagctgtttggcaagggcagtgactggaagctgggagagagggtcaacagctgaatctcagcctgatggaggccaccatttaataagtaaatacatgcacggctatttagatcctgcatcagacaggtcatcagaaaacatgaagctaaatgcagtaaagaattactctcttgaactcttgaaaatatcaaaaacatgaagctaaatgcagtaaagaattagtctcttgaactcttgaaaatatcattttcttatagaaatggtttaaaaatttcttttttattatttctaattttccttcagaaaattgtgagttttaacctacaacacatacactccaaggtaatgccactctaatgctgtctagttgatctgaataactaactggtcaattatcagatccaccaaactgtctctctggagattaacttctgccagcatattggtttctgttcattttcacaagattgacaggctcattacagcaatattaacatcttcctttgagcactcacactgtgcaattgtaattttgcatatgttgatgagcaggcaattacatcaaagagtgaacactgggctgatgtgcaaggcactatttaattataaaaacagtataggattgagccctgtcactgagtcttccattccttctatctcgcctgtttctaatttatttctctatttcttcatttcttccttgactgtcttcattctttgctttttatttctttctccttaaatgacagaccttttcttagatgccatttctctatgtctgcgcttaagacaagaatttttttcctcctagttgttggttaatgtctgcaaatgtgagagcatgttaacatgacaaacaacaaggaatttgaaataaacttaaatgaaaca

SEQ ID NO: 19765 - DNA, 956 bp, Homo sapiens
  source 1..956: mol_type = unassigned DNA
gagataagaaagaaaggattttgcacgttcctgggaatctaggcacgttttccttgtacctgttaaacgagactgccaggtatcacatgtttaaatatcagactatttctagaaccatcggatttcctggctccattccacttttatgcttcttcttggaggcagcttcacctccactcacattccggagataagcatgaactttggtaatacgatgaagacatgcttctttcttcttccatgcccagattttttcttaatccaaaataagttttaaagtgattgggggaggtgagggggaatactaatgatttaaatttttaccaaaacccatttacatttggatggtttcactttccacaaagaaaagcaacaaccctgactctcccaaaaaaacaaaacaaaacaaaataacaaaaataaagccaaacattaactacctccccagctccactgaaaacaaaaccaaaaacaaaacaaatcaaagccttaaggatttatcaacctggagagagtgcagcccttctagactgagctgcaaagatggccctgcctccatgccttgttgaacatgatgatgcccctgggaatgggaggtgatggttttttacttcggccctagtacagagtatgctcttgaagctggattccatcagcaggaaaatcttggtccactacagaaggttgaacaacagtgacttaaacttcttgatgggtagaacacaggggtttagagcacatttgagctgggggacttcaaatcctgccttcgcagctgactgtgtgactctggaagattacttaacttctctgggcctcaatttcctaatctgttaaatggggatggtactgctcacttcagagtgctgttgttcatttcaggtggccctgttcctttcactcagaaactttgaagcaggttcttaccaaatgctctttactgtatcaggagaaca

SEQ ID NO: 19766 - DNA, 804 bp, Homo sapiens
  source 1..804: mol_type = unassigned DNA
cacgttttccttgtacctgttaaacgagactgccaggtatcacatgtttaaatatcagactatttctagaaccatcggatttcctggctccattccacttttatgcttcttcttggaggcagcttcacctccactcacattccggagataagcatgaactttggtaatacgatgaagacatgcttctttcttcttccatgcccagattttttcttaatccaaaataagttttaaagtgattgggggaggtgagggggaatactaatgatttaaatttttaccaaaacccatttacatttggatggtttcactttccacaaagaaaagcaacaaccctgactctcccaaaaaaacaaaacaaaacaaaataacaaaaataaagccaaacattaactacctccccagctccactgaaaacaaaaccaaaaacaaaacaaatcaaagccttaaggatttatcaacctggagagagtgcagcccttctagactgagctgcaaagatggccctgcctccatgccttgttgaacatgatgatgcccctgggaatgggaggtgatggttttttacttcggccctagtacagagtatgctcttgaagctggattccatcagcaggttttggaaatcactagtgggtaaaaaagaccaatttgcaactaggctctcatgctctgttgaaaactatgtcacaatatcacaatactagatgctgggctcaagacagcaaacagaaagcagcaagggcagtgactggaagctgggagagagggtcaacagctgaatctcagcctgatggaggccac

SEQ ID NO: 19767 - DNA, 853 bp, Homo sapiens
  source 1..853: mol_type = unassigned DNA
ctccccagctccactgaaaacaaaaccaaaaacaaaacaaatcaaagccttaaggatttatcaacctggagagagtgcagcccttctagactgagctgcaaagatggccctgcctccatgccttgttgaacatgatgatgcccctgggaatgggaggtgatggttttttacttcggccctagtacagagtatgctcttgaagctggattccatcagcaggaatcactaggtacttctaaatcactggagagtcaatctgaagtcagatgcatactccctgaatattagtctttcagctctcaaatctccaggcagcctctattgattgatctgagttggcagatgagttggcaggcctcaaattcctgttcccagtgatatgagtacccacagataattcactggtaagatcaccgagtgacccaggaatgaaacctaccattgaagatgtttatttagagctgtatccactgtccacagccaagggaaatagccttttctagactggatatatttgaccagtagatggagtaagtggatcccagaaccaccaactaaccacccagaacctgctgatcaatgctgttgtctttcaatattctatcaaaaagggacaatgccatcaccagcaactaaatcttgagcttaaggtgcatcttcggcaggttttggaaatcactagtgggtaaaaaagaccaatttgcaactaggctctcatgctctgttgaaaactatgtcacaatatcacaatactagatgctgggctcaagacagcaaacagaaagcagcaagggcagtgactggaagctgggagagagggtcaacagctgaatctcagcctgatggaggccac

SEQ ID NO: 19768 - DNA, 497 bp, Homo sapiens
  source 1..497: mol_type = unassigned DNA
gctgcaaagatggccctgcctccatgccttgttgaacatgatgatgcccctgggaatgggaggtgatggttttttacttcggccctagtacagagtatgctcttgaagctggattccatcagcaggttttggaaatcactagtgggtaaaaaagaccaatttgcaactaggctctcatgctctgttgaaaactatgtcacaatatcacaatactagatgctgggctcaagacagcaaacagaaagcagcaagggcagtgactggaagctgggagagagggtcaacagctgaatctcagcctgatggaggccaccatttaataagtaaatacatgcacggctatttagatcctgcatcagacaggtcatcagaaaacatgaagctaaatgcagtaaagaattactctcttgaactcttgaaaatatcaaaaacatgaagctaaatgcagtaaagaattagtctcttgaactcttgaaaatatcattttcttatagaaa

SEQ ID NO: 19769 - DNA, 852 bp, Homo sapiens
  source 1..852: mol_type = unassigned DNA
ccctgggaatgggaggtgatggttttttacttcggccctagtacagagtatgctcttgaagctggattccatcagcaggcaagggcagtgactggaagctgggagagagggtcaacagctgaatctcagcctgatggaggccaccatttaataagtaaatacatgcacggctatttagatcctgcatcagacaggtcatcagaaaacatgaagctaaatgcagtaaagaattactctcttgaactcttgaaaatatcaaaaacatgaagctaaatgcagtaaagaattagtctcttgaactcttgaaaatatcattttcttatagaaatggtttaaaaatttcttttttattatttctaattttccttcagaaaattgtgagttttaacctacaacacatacactccaaggtaatgccactctaatgctgtctagttgatctgaataactaactggtcaattatcagatccaccaaactgtctctctggagattaacttctgccagcatattggtttctgttcattttcacaagattgacaggctcattacagcaatattaacatcttcctttgagcactcacactgtgcaattgtaattttgcatatgttgatgagcaggcaattacatcaaagagtgaacactgggctgatgtgcaaggcactatttaattataaaaacagtataggattgagccctgtcactgagtcttccattccttctatctcgcctgtttctaatttatttctctatttcttcatttcttccttgactgtcttcattctttgctttttatttctttctccttaaatgacagaccttttcttagatgccatttctctatgtctgcgc

SEQ ID NO: 19770 - DNA, 842 bp, Homo sapiens
  source 1..842: mol_type = unassigned DNA
ggatgagctacttgggcttagctcttttagaggccaaagtttattttcccgacaatcctcctcacatgcttgggccccactctggactcttaatgtagaagtaaaaaccgatgctgataacagaaagaaatgcatgattttctttggtaactcagtaccatttcatcattgtccgtcacgctgagggatgccttataaattcaatggctcatgcaatgcaaacaaatacttcctttagtaaggatggctgtgttgaatcttggcctgaaagatctttgacctgaaacaaaactacaacatccacagaaacgctacataaagtgtacagatctggagtgaagacgaagtatctggatggcaagactctctgtatatttgtcatgcattctgaagtggtaattgaaggcactgatgtgagctaatagacttttttccaaaggagtgaccttaaaagaaaaatcaaagaaatgtgaaatccaatattgtaataatatcactgctctcaaatctccaggcagcctctattgattgatctgagttggcagatgagttggcagttttttatctacaagttgggaataatatatgcattacgaagagattacaagtactaactggagaaaacaatctgagaccttggcaaataatagattatccaacttaattccaatattattaaaattagtgatcattagctggcactttacaacagaaatgatctgaataaattttcaacatatacatgctctgataccatgacaggaaaatgcaagggcagtgactggaagctgggagagagggtcaacagctgaatctcagcctgatggaggccaccatttaat

SEQ ID NO: 19771 - DNA, 324 bp, Homo sapiens
  source 1..324: mol_type = unassigned DNA
acagatcagtgaaacaaaagaagaaaaaaaaaatccttgtcctgtccttgagatgagacaggtgcatgtaatatataataattaaagtatttagtatgctagatgtgctatggaaagagtacaggaaagctagggagatgaggagtaatgaggtgagagatggcagttgaaatctgaaataggatcatcaagctctcaaatctccaggcagcctctattgattgatctgagttggcagatgagttggcaggcaagggcagtgactggaagctgggagagagggtcaacagctgaatctcagcctgatggaggccaccatttaat

SEQ ID NO: 19772 - DNA, 790 bp, Homo sapiens
  source 1..790: mol_type = unassigned DNA
agctctcaaatctccaggcagcctctattgattgatctgagttggcagatgagttggcaggcaagggcagtgactggaagctgggagagagggtcaacagctgaatctcagcctgatggaggccaccatttaataagtaaatacatgcacggctatttagatcctgcatcagacaggtcatcagaaaacatgaagctaaatgcagtaaagaattactctcttgaactcttgaaaatatcaaaaacatgaagctaaatgcagtaaagaattagtctcttgaactcttgaaaatatcattttcttatagaaatggtttaaaaatttcttttttattatttctaattttccttcagaaaattgtgagttttaacctacaacacatacactccaaggtaatgccactctaatgctgtctagttgatctgaataactaactggtcaattatcagatccaccaaactgtctctctggagattaacttctgccagcatattggtttctgttcattttcacaagattgacaggctcattacagcaatattaacatcttcctttgagcactcacactgtgcaattgtaattttgcatatgttgatgagcaggcaattacatcaaagagtgaacactgggctgatgtgcaaggcactatttaattataaaaacagtataggattgagccctgtcactgagtcttccattccttctatctcgcctgtttctaatttatttctctatttcttcatttcttccttgactgtcttcattctttgctttttatttctttctcctt

SEQ ID NO: 19773 - DNA, 800 bp, Homo sapiens
  source 1..800: mol_type = unassigned DNA
ataggcttttttttttttttgaggaaaaagaagaaagagaaagagacaaaggaaaaggagaaagacaagagaggaagaagcaggaggaaaacagtggagagaagaagaaaaaagagaaaaaataaattacagctatctgggcttccatgggagtgccaactctgacagctgagacatctctgacttggctctttcacctcttgtgcaagggaagaacagcactatttttaaaggaggtcattagttttggaaatcactagtgggtaaaaaagaccaatttgcaactaggctctcatgctctgttgaaaactatgtcacaatatcacaatactagatgctgggctcaagacagcaaacagaaagcagcaagggcagtgactggaagctgggagagagggtcaacagctgaatctcagcctgatggaggccaccatttaataagtaaatacatgcacggctatttagatcctgcatcagacaggtcatcagaaaacatgaagctaaatgcagtaaagaattactctcttgaactcttgaaaatatcaaaaacatgaagctaaatgcagtaaagaattagtctcttgaactcttgaaaatatcattttcttatagaaatggtttaaaaatttcttttttattatttctaattttccttcagaaaattgtgagttttaacctacaacacatacactccaaggtaatgccactctaatgctgtctagttgatctgaataactaactggtcaattatcagatccaccaaactgtctctctggagattaacttctgccagcatattg

SEQ ID NO: 19774 - DNA, 245 bp, Homo sapiens
  source 1..245: mol_type = unassigned DNA
aaactcccaccagctatcaaatgaaggcgtcgggggagaatatatacagtctacagaactcgggagagttaaagagtagcaagttccaatcaagaagaaatgttttattcagtaattactttgaagaatttttttaagagcccctgaaaatactggatttctgcaggggatattgcgaaaatactaaaatactaaggcaagggcagtgactggaagctgggagagagggtcaacagctgaatctc

SEQ ID NO: 19775 - DNA, 344 bp, Homo sapiens
  source 1..344: mol_type = unassigned DNA
aggcagagagggagaaataacaagaatggaagagtcgttcttccaaaaagggccatctgtgaccctgagagataaacctggcagaccagggctcacatcttagtaaatcacctgtaaataaagcttgcaagggcagtgactggaagctgggagagagggtcaacagctgaatctcagcctgatggaggccaccatttaataagtaaatacatgcacggctatttagatcctgcatcagacaggtcatcagaaaacatgaagctaaatgcagtaaagaattactctcttgaactcttgaaaatatcaaaaacatgaagctaaatgcagtaaagaattagtctctt

SEQ ID NO: 19776 - DNA, 5234 bp, Homo sapiens
  source 1..5234: mol_type = unassigned DNA
acacaggagcgccctccggtgctgtcccctgcctctggtgctgaacccggaggctggggaggaggctcgggctccctgctcccccaggcccctccccgggcctccccccgcctcccgcaccgccttccctctgcccgcctccgcctcctccccctctctccggctcctccccctccctcgctccctcgccgcctccccctcccccgtgtccctcccctctcctcttctcctccctctatcccctctccctcccctcctccccggctctccctctcagtctcaggcttttctctctctcaatctctctctctctttcgggcggagtcgcccaccactgccagcccagcgctggggggacctgctccaggctgtagccgcaggaccccaccaccccccatggctcccctggccttggtgggggtcacactcctcctggcggctcccccatgctccggggcagccaccccaaccccctccctgccgcctcccccggccaatgacagcgacaccagcacagggggctgccaggggtcctaccgctgccagccgggggtgctgctgcccgtgtgggagcccgacgacccgtcgctgggtgacaaggcggcacgggcagtggtgtactttgtggccatggtctacatgtttctgggagtgtccatcatcgccgaccgtttcatggcggccatcgaggtcatcacgtcaaaagagaaggagatcaccatcaccaaggccaacggtgagaccagcgtgggcaccgttcgcatctggaatgagacggtgtccaacctcacgctcatggccctgggctcctccgcacctgagatcctgctgtcagtcatcgaagtctgcggccacaacttccaggcgggtgagctgggcccaggcaccatcgtgggcagcgctgccttcaacatgtttgtggtcatcgccgtgtgcatctacgtcatcccagccggcgagagccgcaagatcaagcacctgagagtcttctttgtcactgcctcttggagcatcttcgcctatgtctggctttatctcatccttgctgttttttcccccggtgtggtccaggtgtgggaggcgctgctgaccctggtcttcttcccggtgtgcgtggtattcgcctggatggccgacaagcggctgctcttctacaagtacgtgtacaagcgctaccgcaccgacccacgcagcggcatcatcataggcgccgagggcgaccccccgaagagcatcgagctggacggcacgttcgtgggcgccgaggccccaggtgagctgggcggcctgggcccgggccccgccgaggcgcgcgagctggacgccagccgccgcgaggtcatccagatcctcaaggacctcaagcagaagcacccggacaaggatctggagcagctggtgggcatcgccaactactacgcgctgctgcaccagcagaagagccgcgccttctaccgcatccaggccacgcggctgatgaccggcgccgggaacgtgctgcgcagacacgcggcggacgcctcgcgcagggcggcgccggccgagggcgcgggcgaggacgaagacgacggcgccagccgcatcttcttcgagcctagcctctaccactgcctggagaactgcggctccgtgctgctgtccgtcacgtgccagggcggcgagggcaacagcaccttctacgtggactaccgcactgaggacggctctgccaaggcgggctccgactacgagtacagcgagggcacgctggtgttcaaaccaggcgagacgcagaaggagctgcgcatcggcatcatcgacgacgacatcttcgaggaggacgagcatttcttcgtgcggctgctgaacctgcgcgtgggcgacgcgcagggcatgttcgagccggacggcggcgggcggcccaaggggcggctggtggcgccgctgctggccaccgtcaccatcctggacgacgaccacgcaggcatcttctccttccaggaccgcctgctgcacgtgagcgagtgcatgggcaccgtggacgtgcgcgtcgtgcgcagctcgggcgcgcgcggcaccgtgcgccttccctaccgcacggtggacggcacggcgcgcggcggcggcgtgcactacgaggacgcgtgcggagagctggagtttggcgacgacgagaccatgaaaactcttcaggtgaagatagttgatgacgaggaatatgagaaaaaggataatttcttcattgagctgggccagccccagtggcttaagcgagggatttcagctctgctactcaatcaaggggatggggacaggaagctaacagccgaggaggaggaggctcggaggatagcagagatgggcaagccagttcttggggagaactgccggctggaggtcatcatcgaggagtcatatgattttaagaacacggtggataaactcatcaagaaaacgaacttggccttggtaattgggacccattcatggagggagcagtttttagaggcaattacggtgagcgcaggggacgaggaggaggaggaggacgggtcccgggaggagcggctgccgtcgtgctttgactacgtgatgcacttcctgacggtgttctggaaggtgctcttcgcctgtgtgccccccaccgagtactgccacggctgggcctgctttggtgtctccatcctggtcatcggcctgctcaccgccctcattggggacctcgcctcccacttcggctgcaccgttggcctcaaggactctgtcaatgctgttgtcttcgttgccctgggcacctccatccctgacacgttcgccagcaaggtggcggcgctgcaggaccagtgcgccgacgcgtccatcggcaacgtgaccggctccaacgcggtgaacgtgttccttggcctgggcgtcgcctggtctgtggccgccgtgtactgggcggtgcagggccgccccttcgaggtgcgcactggcacgctggccttctccgtcacgctcttcaccgtcttcgccttcgtgggcattgccgtgctgctgtaccggcgccggccgcacatcggcggcgagctgggcggcccgcgcggacccaagctcgccaccaccgcgctcttcctgggcctctggctcctgtacatcctcttcgccagcctggaggcgtactgccacatccggggcttctagggcctcgcgcagagactcgtccccaccgcccgcccggggctagggactcggctgcacctgctcttggaccctggtctccttttccccccagactcggcctcctctcctgggactcggcctcccttctccgccccctcccctggctttgattgccctgttctgtgtccccagtagctcagccttccctcttcctctcgggagcctccccggttcctcccctgcggtgaccccaactccagcccatcctgttggtgaccgtctatatccctggggaaatttccaccccagtcccctccccagggaaccacccccagtaaccatcctggggagtttaaggtctctctccttggtcacccagcctggctttgcccccaaagtctcccttcccctagtgaccccccccccacttcaccccatgtcccagagcctcagaacccaccctccctgggggaccctcgaaggaggctgtcagaggccgtctcagctcccagcccttccccccagccctcagggagctccgctcagccccggcggggaggagcgggtgggtgtgcgcgcaaggaggccgcacaccgttccttccaatccctccactcgggttcttgggaggacactcattctccaggctcggagacgaggggagaagtttggggtttcagtcccagggcttagccggaggaagcacattttgaacctgcaacttcagacattccagctcccccactcgccctccactacctctgagagcccagccacgccttggagggaggggcttgtgtgtgtatatagtgtgtttgggggaggggggacgcgggagggtgcatgtcttgggaaaagggggtgacagacaacttttgagagggcagcagactccctcagccatgagaaccagctttggggaggaggccgggaatcaaagcgagtccagttgatctcccctgacaatctggaaggttccttttgccctcagtgccagccaatccgggcaggaccctcgaagaggagaccgagggtcccagaggaccaatgctacaagccagcaaatgctgccacatctctgcctgatggggggtggggatgggtggggggatgggactgggccaagggatctgggtgggcatttttaactttggaggccttccatctgtcggtaggccatctgcattttcttactgttgatgtttcctgcccaaaggacacatttgggcagtgccacccactccttgggcccctaggatgacccaactacccccataactttctgcttcccacaggttttcagcattctatcgtcctgttgtgctcagccccaacatcccagacccgttacccactacccttctctcccccagctcatcatcagtcgctgtctcttttctgtgatttctgtaaaagttgccataaaactttgaaattctgcctgaaaaacagtcccgtgggaagctgggattcaggaggagggggctaataaggtctctgactgagatttgggcaactgttaaaccaagtaatctgggtttttgcggcccgcggtcgtctgcgggacacacccacatatagcagcagcgccggggtccagccgccaagctcttccactcgccacgcccccatcagtaatgagcttccactagccacgcccccatccgtcagcctagctcttccactagccacacccccatccatcagtcatgggcttccacaagccacgcacctccactctccatgcccccattcgtcagtcgtgggtttccactaaccacgcccccattcatcagccaagctcctccacttgctacgcccgcatccgtcaattacgggtttccactaaccacgcccccattcatcagcctagctcttccactaatcacacccccacttatcagtcgtgcttcagccacgccttcctgcttcagtcaggggcttccactagccacgcccccatgcatgagccacaaactgtttctctttatgggcatcctgggaacacaaaagagagacgttcatttgcctgagccaaagagctggggttgatggggtttcctaaataaagcaagtaattttctcagatccta

SEQ ID NO: 19777 - DNA, 3603 bp, Homo sapiens
  source 1..3603: mol_type = unassigned DNA
tcaatctctctctctctttcgggcggagtcgcccaccactgccagcccagcgctggggggacctgctccaggctgtagccgcaggtgtgggaggcgctgctgaccctggtcttcttcccggtgtgcgtggtattcgcctggatggccgacaagcggctgctcttctacaagtacgtgtacaagcgctaccgcaccgacccacgcagcggcatcatcataggcgccgagggcgaccccccgaagagcatcgagctggacggcacgttcgtgggcgccgaggccccaggtgagctgggcggcctgggcccgggccccgccgaggcgcgcgagctggacgccagccgccgcgaggtcatccagatcctcaaggacctcaagcagaagcacccggacaaggatctggagcagctggtgggcatcgccaactactacgcgctgctgcaccagcagaagagccgcgccttctaccgcatccaggccacgcggctgatgaccggcgccgggaacgtgctgcgcagacacgcggcggacgcctcgcgcagggcggcgccggccgagggcgcgggcgaggacgaagacgacggcgccagccgcatcttcttcgagcctagcctctaccactgcctggagaactgcggctccgtgctgctgtccgtcacgtgccagggcggcgagggcaacagcaccttctacgtggactaccgcactgaggacggctctgccaaggcgggctccgactacgagtacagcgagggcacgctggtgttcaaaccaggcgagacgcagaaggagctgcgcatcggcatcatcgacgacgacatcttcgaggaggacgagcatttcttcgtgcggctgctgaacctgcgcgtgggcgacgcgcagggcatgttcgagccggacggcggcgggcggcccaaggggcggctggtggcgccgctgctggccaccgtcaccatcctggacgacgaccacgcaggcatcttctccttccaggaccgcctgctgcacgtgagcgagtgcatgggcaccgtggacgtgcgcgtcgtgcgcagctcgggcgcgcgcggcaccgtgcgccttccctaccgcacggtggacggcacggcgcgcggcggcggcgtgcactacgaggacgcgtgcggagagctggagtttggcgacgacgagaccatgaaaactcttcaggtgaagatagttgatgacgaggaatatgagaaaaaggataatttcttcattgagctgggccagccccagtggcttaagcgagggatttcagctctgctactcaatcaaggggatggggacaggaagctaacagccgaggaggaggaggctcggaggatagcagagatgggcaagccagttcttggggagaactgccggctggaggtcatcatcgaggagtcatatgattttaagaacacggtggataaactcatcaagaaaacgaacttggccttggtaattgggacccattcatggagggagcagtttttagaggcaattacggtgagcgcaggggacgaggaggaggaggaggacgggtcccgggaggagcggctgccgtcgtgctttgactacgtgatgcacttcctgacggtgttctggaaggtgctcttcgcctgtgtgccccccaccgagtactgccacggctgggcctgctttggtgtctccatcctggtcatcggcctgctcaccgccctcattggggacctcgcctcccacttcggctgcaccgttggcctcaaggactctgtcaatgctgttgtcttcgttgccctgggcacctccatccctgacacgttcgccagcaaggtggcggcgctgcaggaccagtgcgccgacgcgtccatcggcaacgtgaccggctccaacgcggtgaacgtgttccttggcctgggcgtcgcctggtctgtggccgccgtgtactgggcggtgcagggccgccccttcgaggtgcgcactggcacgctggccttctccgtcacgctcttcaccgtcttcgccttcgtgggcattgccgtgctgctgtaccggcgccggccgcacatcggcggcgagctgggcggcccgcgcggacccaagctcgccaccaccgcgctcttcctgggcctctggctcctgtacatcctcttcgccagcctggaggcgtactgccacatccggggcttctagggcctcgcgcagagactcgtccccaccgcccgcccggggctagggactcggctgcacctgctcttggaccctggtctccttttccccccagactcggcctcctctcctgggactcggcctcccttctccgccccctcccctggctttgattgccctgttctgtgtccccagtagctcagccttccctcttcctctcgggagcctccccggttcctcccctgcggtgaccccaactccagcccatcctgttggtgaccgtctatatccctggggaaatttccaccccagtcccctccccagggaaccacccccagtaaccatcctggggagtttaaggtctctctccttggtcacccagcctggctttgcccccaaagtctcccttcccctagtgaccccccccccacttcaccccatgtcccagagcctcagaacccaccctccctgggggaccctcgaaggaggctgtcagaggccgtctcagctcccagcccttccccccagccctcagggagctccgctcagccccggcggggaggagcgggtgggtgtgcgcgcaaggaggccgcacaccgttccttccaatccctccactcgggttcttgggaggacactcattctccaggctcggagacgaggggagaagtttggggtttcagtcccagggcttagccggaggaagcacattttgaacctgcaacttcagacattccagctcccccactcgccctccactacctctgagagcccagccacgccttggagggaggggcttgtgtgtgtatatagtgtgtttgggggaggggggacgcgggagggtgcatgtcttgggaaaagggggtgacagacaacttttgagagggcagcagactccctcagccatgagaaccagctttggggaggaggccgggaatcaaagcgagtccagttgatctcccctgacaatctggaaggttccttttgccctcagtgccagccaatccgggcaggaccctcgaagaggagaccgagggtcccagaggaccaatgctacaagccagcaaatgctgccacatctctgcctgatggggggtggggatgggtggggggatgggactgggccaagggatctgggtgggcatttttaactttggaggccttccatctgtcggtaggccatctgcattttcttactgttgatgtttcctgcccaaaggacacatttgggcagtgccacccactccttgggcccctaggatgacccaactacccccataactttctgcttcccacaggttttcagcattctatcgtcctgttgtgctcagccccaacatcccagacccgttacccactacccttctctcccccagctcatcatcagtcgctgtctcttttctgtgatttctgtaaaagttgccataaaactttgaaattctgcctgaaaaa

SEQ ID NO: 19778 - DNA, 1606 bp, Homo sapiens
  source 1..1606: mol_type = unassigned DNA
ctctctctttcgggcggagtcgcccaccactgccagcccagcgctggggggacctgctccaggctgtagccgcaggaccgcctgctgcacgtgagcgagtgcatgggcaccgtggacgtgcgcgtcgtgcgcagctcgggcgcgcgcggcaccgtgcgccttccctaccgcacggtggacggcacggcgcgcggcggcggcgtgcactacgaggacgcgtgcggagagctggagtttggcgacgacgagaccatgaaaactcttcaggtgaagatagttgatgacgaggaatatgagaaaaaggataatttcttcattgagctgggccagccccagtggcttaagcgagggatttcagctctgctactcaatcaaggggatggggacaggaagctaacagccgaggaggaggaggctcggaggatagcagagatgggcaagccagttcttggggagaactgccggctggaggtcatcatcgaggagtcatatgattttaagaacacggtggataaactcatcaagaaaacgaacttggccttggtaattgggacccattcatggagggagcagtttttagaggcaattacggtgagcgcaggggacgaggaggaggaggaggacgggtcccgggaggagcggctgccgtcgtgctttgactacgtgatgcacttcctgacggtgttctggaaggtgctcttcgcctgtgtgccccccaccgagtactgccacggctgggcctgctttggtgtctccatcctggtcatcggcctgctcaccgccctcattggggacctcgcctcccacttcggctgcaccgttggcctcaaggactctgtcaatgctgttgtcttcgttgccctgggcacctccatccctgacacgttcgccagcaaggtggcggcgctgcaggaccagtgcgccgacgcgtccatcggcaacgtgaccggctccaacgcggtgaacgtgttccttggcctgggcgtcgcctggtctgtggccgccgtgtactgggcggtgcagggccgccccttcgaggtgcgcactggcacgctggccttctccgtcacgctcttcaccgtcttcgccttcgtgggcattgccgtgctgctgtaccggcgccggccgcacatcggcggcgagctgggcggcccgcgcggacccaagctcgccaccaccgcgctcttcctgggcctctggctcctgtacatcctcttcgccagcctggaggcgtactgccacatccggggcttctagggcctcgcgcagagactcgtccccaccgcccgcccggggctagggactcggctgcacctgctcttggaccctggtctccttttccccccagactcggcctcctctcctgggactcggcctcccttctccgccccctcccctggctttgattgccctgttctgtgtccccagtagctcagccttccctcttcctctcgggagcctccccggttcctcccctgcggtgaccccaactccagcccatcctgttggtgaccgtctatatccctggggaaatttccaccccagtcccctccccagggaaccacccccagtaaccatcctggggagtttaaggtctctctccttg

SEQ ID NO: 19779 - DNA, 633 bp, Homo sapiens
  source 1..633: mol_type = unassigned DNA
aagggattctgggaaagaagttcattcaatgggacttgctgtcaggaagttagacaaaatggggcctctgtaggcaaggaaggaagtctgagtgtatgccccagctgggtcgtgtgcccacaggggacgaggaggaggaggaggacgggtcccgggaggagcggctgccgtcgtgctttgactacgtgatgcacttcctgacggtgttctggaaggtgctcttcgcctgtgtgccccccaccgagtactgccacggctgggcctgctttggtgtctccatcctggtcatcggcctgctcaccgccctcattggggacctcgcctcccacttcggctgcaccgttggcctcaaggactctgtcaatgctgttgtcttcgttgccctgggcacctccatccctgacacgttcgccagcaaggtggcggcgctgcaggaccagtgcgccgacgcgtccatcggcaacgtgaccggctccaacgcggtgaacgtgttccttggcctgggcgtcgcctggtctgtggccgccgtgtactgggcggtgcagggccgccccttcgaggtgcgcactggcacgctggccttctccgtcacgctcttcaccgtcttcgccttcgtgggcattgccgtgctgc

SEQ ID NO: 19780 - DNA, 575 bp, Homo sapiens
  source 1..575: mol_type = unassigned DNA
gacgtgggcggggcttcactgaacagctgggccctcaggaggagaggggcctgagtgaatcgttctccaaagtgggcttggcctcgggaggggcggggcctaggtgtgctgtgtctaccacgtgggcggggcctggtggggttgtgactgtgaaatgaagaggcgaggcctagaagggtggccggacaggaaaactcttcaggtgaagatagttgatgacgaggaatatgagaaaaaggataatttcttcattgagctgggccagccccagtggcttaagcgagggatttcagctctgctactcaatcaaggggatggggacaggaagctaacagccgaggaggaggaggctcggaggatagcagagatgggcaagccagttcttggggagaactgccggctggaggtcatcatcgaggagtcatatgattttaagaacacggtggataaactcatcaagaaaacgaacttggccttggtaattgggacccattcatggagggagcagtttttagaggcaattacggtgagcgcaggggacgaggaggaggaggaggacgggtcccgggaggagc

SEQ ID NO: 19781 - DNA, 581 bp, Homo sapiens
  source 1..581: mol_type = unassigned DNA
tctctctctctctttcgggcggagtcgcccaccactgccagcccagcgctggggggacctgctccaggctgtagccgcagtgtccatcatcgccgaccgtttcatggcggccatcgaggtcatcacgtcaaaagagaaggagatcaccatcaccaaggccaacggtgagaccagcgtgggcaccgttcgcatctggaatgagacggtgtccaacctcacgctcatggccctgggctcctccgcacctgagatcctgctgtcagtcatcgaagtctgcggccacaacttccaggcgggtgagctgggcccaggcaccatcgtgggcagcgctgccttcaacatgtttgtggtcatcgccgtgtgcatctacgtcatcccagccggcgagagccgcaagatcaagcacctgagagtcttctttgtcactgcctcttggagcatcttcgcctatgtctggctttatctcatccttgctgttttttcccccggtgtggtccaggtgtgggaggcgctgctgaccctggtcttcttcccggtgtgcgtggtattcgcctggatggccgacaagcggctgctcttct

SEQ ID NO: 19782 - DNA, 570 bp, Homo sapiens
  source 1..570: mol_type = unassigned DNA
agtctcaggcttttctctctctcaatctctctctctctttcgggcggagtcgcccaccactgccagcccagcgctggggggacctgctccaggctgtagccgcaggcggcacgggcagtggtgtactttgtggccatggtctacatgtttctgggagtgtccatcatcgccgaccgtttcatggcggccatcgaggtcatcacgtcaaaagagaaggagatcaccatcaccaaggccaacggtgagaccagcgtgggcaccgttcgcatctggaatgagacggtgtccaacctcacgctcatggccctgggctcctccgcacctgagatcctgctgtcagtcatcgaagtctgcggccacaacttccaggcgggtgagctgggcccaggcaccatcgtgggcagcgctgccttcaacatgtttgtggtcatcgccgtgtgcatctacgtcatcccagccggcgagagccgcaagatcaagcacctgagagtcttctttgtcactgcctcttggagcatcttcgcctatgtctggctttatctcatccttgctgttttttcccccggtgtg

SEQ ID NO: 19783 - DNA, 5250 bp, Homo sapiens
  source 1..5250: mol_type = unassigned DNA
cggcgctgtctcccagctgatagggtgacgttccgtttggaggcttggagattggctttttgatttggcttcttccggcagcttaatgggcaaagctctccgctcgcccagaaaccagcctctccgcgcgtcccctctgcgcgcggcgaggccgagacgtctcccgcggtgacagcgtgcaaggcggagacccggcgcgctcccagcccagggaaagcccaggcgacgcgaccgcaagcccgagcccaggtccctcggagccgccagggcgcgccgggctgcttgccttcctgccccttcctgcaggaatcccccgccgcccgcggccgggactccgggcctctcccgggcgtagattccagtcaccgctctgggtcggggtttccctctttctgaaatccgtgcggaaggacccctcccggggcccctcgccctggccccagacaccctccctcccagaccccgcgctccagatgcgctgccccgcagctccctgacagctgcgagcccacgaaccccggcgggagggcggcggcggcggactgacatgccccggacgcggctgcggccggcgggcagcccgcgggggcgatgagccgctgcgaccggtgaggcgccgggcggcgggggcatcgcgtaccttcctcacccccctcccttgcccactccgctcgggaggccgagaggaaacggtctctggcctatcaggaggacaactggtgctgcaatagaagccagtggctaagtctcgtgtatggcgtggttaaggttgcagcctctcacctctgccttcctccattttgggctggttacctttgtgctcttcctgaatggtcttcgagcagaggctggtggctcaggggacgtgccaagcacagggcagaacaatgagtcctgttcagggtcatcggactgcaaggagggtgtcatcctgccaatctggtacccggagaacccttcccttggggacaagattgccagggtcattgtctattttgtggccctgatatacatgttccttggggtgtccatcattgctgaccgcttcatggcatctattgaagtcatcacctctcaagagagggaggtgacaattaagaaacccaatggagaaaccagcacaaccactattcgggtctggaatgaaactgtctccaacctgacccttatggccctgggttcctctgctcctgagatactcctctctttaattgaggtgtgtggtcatgggttcattgctggtgatctgggaccttctaccattgtagggagtgcagccttcaacatgttcatcatcattggcatctgtgtctacgtgatcccagacggagagactcgcaagatcaagcatctacgagtcttcttcatcaccgctgcttggagtatctttgcctacatctggctctatatgattctggcagtcttctcccctggtgtggtccaggtttgggaaggcctcctcactctcttcttctttccagtgtgtgtccttctggcctgggtggcagataaacgactgctcttctacaaatacatgcacaaaaagtaccgcacagacaaacaccgaggaattatcatagagacagagggtgaccaccctaagggcattgagatggatgggaaaatgatgaattcccattttctagatgggaacctggtgcccctggaagggaaggaagtggatgagtcccgcagagagatgatccggattctcaaggatctgaagcaaaaacacccagagaaggacttagatcagctggtggagatggccaattactatgctctttcccaccaacagaagagccgtgccttctaccgtatccaagccactcgtatgatgactggtgcaggcaatatcctgaagaaacatgcagcagaacaagccaagaaggcctccagcatgagcgaggtgcacaccgatgagcctgaggactttatttccaaggtcttctttgacccatgttcttaccagtgcctggagaactgtggggctgtactcctgacagtggtgaggaaagggggagacatgtcaaagaccatgtatgtggactacaaaacagaggatggttctgccaatgcaggggctgactatgagttcacagagggcacggtggttctgaagccaggagagacccagaaggagttctccgtgggcataattgatgacgacatttttgaggaggatgaacacttctttgtaaggttgagcaatgtccgcatagaggaggagcagccagaggaggggatgcctccagcaatattcaacagtcttcccttgcctcgggctgtcctagcctccccttgtgtggccacagttaccatcttggatgatgaccatgcaggcatcttcacttttgaatgtgatactattcatgtcagtgagagtattggtgttatggaggtcaaggttctgcggacatcaggtgcccggggtacagtcatcgtcccctttaggacagtagaagggacagccaagggtggcggtgaggactttgaagacacatatggggagttggaattcaagaatgatgaaactgtgaaaaccataagggttaaaatagtagatgaggaggaatacgaaaggcaagagaatttcttcattgcccttggtgaaccgaaatggatggaacgtggaatatcagatgtgacagacaggaagctgactatggaagaagaggaggccaagaggatagcagagatgggaaagccagtattgggtgaacaccccaaactagaagtcatcattgaagagtcctatgagttcaagactacggtggacaaactgatcaagaagacaaacctggccttggttgtggggacccattcctggagggaccagttcatggaggccatcaccgtcagtgcagcaggggatgaggatgaggatgaatccggggaggagaggctgccctcctgctttgactacgtcatgcacttcctgactgtcttctggaaggtgctgtttgcctgtgtgccccccacagagtactgccacggctgggcctgcttcgccgtctccatcctcatcattggcatgctcaccgccatcattggggacctggcctcgcacttcggctgcaccattggtctcaaagattcagtcacagctgttgttttcgtggcatttggcacctctgtcccagatacgtttgccagcaaagctgctgccctccaggatgtatatgcagacgcctccattggcaacgtgacgggcagcaacgccgtcaatgtcttcctgggcatcggcctggcctggtccgtggccgccatctactgggctctgcagggacaggagttccacgtgtcggccggcacactggccttctccgtcaccctcttcaccatctttgcatttgtctgcatcagcgtgctcttgtaccgaaggcggccgcacctgggaggggagcttggtggcccccgtggctgcaagctcgccacaacatggctctttgtgagcctgtggctcctctacatactctttgccacactagaggcctattgctacatcaaggggttctaagccacacaacagagcctccagcagggcaggcctaggacttctcctaagagaagggcacttccccaccagtgatctctcccgactgcactgccctggagaggcagcatcaggacctaagccccaggaacttcacccaacttaggccctggcaattaactgaaagggcaaagtcttaatcaatcaaacaatggaggaatcaccgactttacacagtatttaattgaatacaaacaagcaacagcaacaaatccacctccaccccatctccccctcatatccctgacccaaagcaaaggtcagagcctttcgcctccttctattccatcttttgattattcctttgcctctcatttctttggaagcagggtttctcctctctgcccaattccatatgtccctattatctcactcagctgacaagacgtgaaaatgagtcacattcatgtggctggggtggggttcttttttcattgtaatcattattgtggttgctttcgttttgccattaggttttgcttattattttgttttgtcttttttttctgaagtgagtgaaaaaggtgccacaaaggaattccaggtccgagccaacagagagaaacatgaatttttagacacatgctctcctgccacctcttggctccatcaagatccagttccccatctcactgttttctctgagttcttgggaggagtgatggtgttggggtagaaataagctcactcacccacgcagggtactaaagatcttacaggagcttcaactggagcaggaggagctttttatgcttatgttgaatcaagtcagatacaaaaagcaattgtccctctttgcccaagcctttccaattctgtgtgtcttgttgtgtcagtgtccacttgtgtatccttctgcaggaagacccgccaaatagaagagatgggacaaaaataggaatggtgtgtgacgacaaagggctactggaagaacaaaagggatacaggccttcttgattatctttggctttgtacctgaggcaggagagaagagatgtccaaccagtgagatctttaagagaaaagtttgtattttaaatgtcaatgtgcctgagaaatgtcagcttcaccacgctcttgcttcctaatgctctatacaaagagggctgactatatttcttgaagtggtgtaaaaacttagagattttataagagaaccaggggctcccttcacctctcctggtccctcaggtcacatatgaaagcatttttacaagataggaactggaattcctcatttctcccatgttcctgcttgttcttaaacttcatgaagctatttttccagcctatggggtagttcttgctccagtaagaggaatcttagttgtcataatcccttggagcctgggtttttggagaaagagatctccgtgccctacagaccttttctcaacgaatgtgggaaggacctggctttaaaacacgcacacaaacacacaaataaacagacataagatgtcatcacgaaactgcccacggatctttaggctttctgcattgacataaatacattttctaagggggggggggaagaaattaaaaaacacctgttaattttaaacacattttttaagaaaaaaataattaaaaaagaaacagtgctcatgtcataagctatgttgacagttgccagtggaaatgttgggttggttcaaaaaaaaaataaaagctatactatatctctctacata

SEQ ID NO: 19784 - DNA, 5146 bp, Homo sapiens
  source 1..5146: mol_type = unassigned DNA
cggcgctgtctcccagctgatagggtgacgttccgtttggaggcttggagattggctttttgatttggcttcttccggcagcttaatgggcaaagctctccgctcgcccagaaaccagcctctccgcgcgtcccctctgcgcgcggcgaggccgagacgtctcccgcggtgacagcgtgcaaggcggagacccggcgcgctcccagcccagggaaagcccaggcgacgcgaccgcaagcccgagcccaggtccctcggagccgccagggcgcgccgggctgcttgccttcctgccccttcctgcaggaatcccccgccgcccgcggccgggactccgggcctctcccgggcgtagattccagtcaccgctctgggtcggggtttccctctttctgaaatccgtgcggaaggacccctcccggggcccctcgccctggccccagacaccctccctcccagaccccgcgctccagatgcgctgccccgcagctccctgacagctgcgagcccacgaaccccggcgggagggcggcggcggcggactgacatgccccggacgcggctgcggccggcgggcagcccgcgggggcgatgagccgctgcgaccggtgaggcgccgggcggcgggggcatcgcgtaccttcctcacccccctcccttgcccactccgctcgggaggccgagaggaaacggtctctggcctatcaggaggacaactggtgctgcaatagaagccagtggctaagtctcgtgtatggcgtggttaaggttgcagcctctcacctctgccttcctccattttgggctggttacctttgtgctcttcctgaatggtcttcgagcagaggctggtggctcaggggacgtgccaagcacagggcagaacaatgagtcctgttcagggtcatcggactgcaaggagggtgtcatcctgccaatctggtacccggagaacccttcccttggggacaagattgccagggtcattgtctattttgtggccctgatatacatgttccttggggtgtccatcattgctgaccgcttcatggcatctattgaagtcatcacctctcaagagagggaggtgacaattaagaaacccaatggagaaaccagcacaaccactattcgggtctggaatgaaactgtctccaacctgacccttatggccctgggttcctctgctcctgagatactcctctctttaattgaggtgtgtggtcatgggttcattgctggtgatctgggaccttctaccattgtagggagtgcagccttcaacatgttcatcatcattggcatctgtgtctacgtgatcccagacggagagactcgcaagatcaagcatctacgagtcttcttcatcaccgctgcttggagtatctttgcctacatctggctctatatgattctggcagtcttctcccctggtgtggtccaggtttgggaaggcctcctcactctcttcttctttccagtgtgtgtccttctggcctgggtggcagataaacgactgctcttctacaaatacatgcacaaaaagtaccgcacagacaaacaccgaggaattatcatagagacagagggtgaccaccctaagggcattgagatggatgggaaaatgatgaattcccattttctagatgggaacctggtgcccctggaagggaaggaagtggatgagtcccgcagagagatgatccggattctcaaggatctgaagcaaaaacacccagagaaggacttagatcagctggtggagatggccaattactatgctctttcccaccaacagaagagccgtgccttctaccgtatccaagccactcgtatgatgactggtgcaggcaatatcctgaagaaacatgcagcagaacaagccaagaaggcctccagcatgagcgaggtgcacaccgatgagcctgaggactttatttccaaggtcttctttgacccatgttcttaccagtgcctggagaactgtggggctgtactcctgacagtggtgaggaaagggggagacatgtcaaagaccatgtatgtggactacaaaacagaggatggttctgccaatgcaggggctgactatgagttcacagagggcacggtggttctgaagccaggagagacccagaaggagttctccgtgggcataattgatgacgacatttttgaggaggatgaacacttctttgtaaggttgagcaatgtccgcatagaggaggagcagccagaggaggggatgcctccagcaatattcaacagtcttcccttgcctcgggctgtcctagcctccccttgtgtggccacagttaccatcttggatgatgaccatgcaggcatcttcacttttgaatgtgatactattcatgtcagtgagagtattggtgttatggaggtcaaggttctgcggacatcaggtgcccggggtacagtcatcgtcccctttaggacagtagaagggacagccaagggtggcggtgaggactttgaagacacatatggggagttggaattcaagaatgatgaaactgtatgtgacagacaggaagctgactatggaagaagaggaggccaagaggatagcagagatgggaaagccagtattgggtgaacaccccaaactagaagtcatcattgaagagtcctatgagttcaagactacggtggacaaactgatcaagaagacaaacctggccttggttgtggggacccattcctggagggaccagttcatggaggccatcaccgtcagtgcagcaggggatgaggatgaggatgaatccggggaggagaggctgccctcctgctttgactacgtcatgcacttcctgactgtcttctggaaggtgctgtttgcctgtgtgccccccacagagtactgccacggctgggcctgcttcgccgtctccatcctcatcattggcatgctcaccgccatcattggggacctggcctcgcacttcggctgcaccattggtctcaaagattcagtcacagctgttgttttcgtggcatttggcacctctgtcccagatacgtttgccagcaaagctgctgccctccaggatgtatatgcagacgcctccattggcaacgtgacgggcagcaacgccgtcaatgtcttcctgggcatcggcctggcctggtccgtggccgccatctactgggctctgcagggacaggagttccacgtgtcggccggcacactggccttctccgtcaccctcttcaccatctttgcatttgtctgcatcagcgtgctcttgtaccgaaggcggccgcacctgggaggggagcttggtggcccccgtggctgcaagctcgccacaacatggctctttgtgagcctgtggctcctctacatactctttgccacactagaggcctattgctacatcaaggggttctaagccacacaacagagcctccagcagggcaggcctaggacttctcctaagagaagggcacttccccaccagtgatctctcccgactgcactgccctggagaggcagcatcaggacctaagccccaggaacttcacccaacttaggccctggcaattaactgaaagggcaaagtcttaatcaatcaaacaatggaggaatcaccgactttacacagtatttaattgaatacaaacaagcaacagcaacaaatccacctccaccccatctccccctcatatccctgacccaaagcaaaggtcagagcctttcgcctccttctattccatcttttgattattcctttgcctctcatttctttggaagcagggtttctcctctctgcccaattccatatgtccctattatctcactcagctgacaagacgtgaaaatgagtcacattcatgtggctggggtggggttcttttttcattgtaatcattattgtggttgctttcgttttgccattaggttttgcttattattttgttttgtcttttttttctgaagtgagtgaaaaaggtgccacaaaggaattccaggtccgagccaacagagagaaacatgaatttttagacacatgctctcctgccacctcttggctccatcaagatccagttccccatctcactgttttctctgagttcttgggaggagtgatggtgttggggtagaaataagctcactcacccacgcagggtactaaagatcttacaggagcttcaactggagcaggaggagctttttatgcttatgttgaatcaagtcagatacaaaaagcaattgtccctctttgcccaagcctttccaattctgtgtgtcttgttgtgtcagtgtccacttgtgtatccttctgcaggaagacccgccaaatagaagagatgggacaaaaataggaatggtgtgtgacgacaaagggctactggaagaacaaaagggatacaggccttcttgattatctttggctttgtacctgaggcaggagagaagagatgtccaaccagtgagatctttaagagaaaagtttgtattttaaatgtcaatgtgcctgagaaatgtcagcttcaccacgctcttgcttcctaatgctctatacaaagagggctgactatatttcttgaagtggtgtaaaaacttagagattttataagagaaccaggggctcccttcacctctcctggtccctcaggtcacatatgaaagcatttttacaagataggaactggaattcctcatttctcccatgttcctgcttgttcttaaacttcatgaagctatttttccagcctatggggtagttcttgctccagtaagaggaatcttagttgtcataatcccttggagcctgggtttttggagaaagagatctccgtgccctacagaccttttctcaacgaatgtgggaaggacctggctttaaaacacgcacacaaacacacaaataaacagacataagatgtcatcacgaaactgcccacggatctttaggctttctgcattgacataaatacattttctaagggggggggggaagaaattaaaaaacacctgttaattttaaacacattttttaagaaaaaaataattaaaaaagaaacagtgctcatgtcataagctatgttgacagttgccagtggaaatgttgggttggttcaaaaaaaaaataaaagctatactatatctctctacata

SEQ ID NO: 19785 - DNA, 5268 bp, Homo sapiens
  source 1..5268: mol_type = unassigned DNA
cggcgctgtctcccagctgatagggtgacgttccgtttggaggcttggagattggctttttgatttggcttcttccggcagcttaatgggcaaagctctccgctcgcccagaaaccagcctctccgcgcgtcccctctgcgcgcggcgaggccgagacgtctcccgcggtgacagcgtgcaaggcggagacccggcgcgctcccagcccagggaaagcccaggcgacgcgaccgcaagcccgagcccaggtccctcggagccgccagggcgcgccgggctgcttgccttcctgccccttcctgcaggaatcccccgccgcccgcggccgggactccgggcctctcccgggcgtagattccagtcaccgctctgggtcggggtttccctctttctgaaatccgtgcggaaggacccctcccggggcccctcgccctggccccagacaccctccctcccagaccccgcgctccagatgcgctgccccgcagctccctgacagctgcgagcccacgaaccccggcgggagggcggcggcggcggactgacatgccccggacgcggctgcggccggcgggcagcccgcgggggcgatgagccgctgcgaccggtgaggcgccgggcggcgggggcatcgcgtaccttcctcacccccctcccttgcccactccgctcgggaggccgagaggaaacggtctctggcctatcaggaggacaactggtgctgcaatagaagccagtggctaagtctcgtgtatggcgtggttaaggttgcagcctctcacctctgccttcctccattttgggctggttacctttgtgctcttcctgaatggtcttcgagcagaggctggtggctcaggggacgtgccaagcacagggcagaacaatgagtcctgttcagggtcatcggactgcaaggagggtgtcatcctgccaatctggtacccggagaacccttcccttggggacaagattgccagggtcattgtctattttgtggccctgatatacatgttccttggggtgtccatcattgctgaccgcttcatggcatctattgaagtcatcacctctcaagagagggaggtgacaattaagaaacccaatggagaaaccagcacaaccactattcgggtctggaatgaaactgtctccaacctgacccttatggccctgggttcctctgctcctgagatactcctctctttaattgaggtgtgtggtcatgggttcattgctggtgatctgggaccttctaccattgtagggagtgcagccttcaacatgttcatcatcattggcatctgtgtctacgtgatcccagacggagagactcgcaagatcaagcatctacgagtcttcttcatcaccgctgcttggagtatctttgcctacatctggctctatatgattctggcagtcttctcccctggtgtggtccaggtttgggaaggcctcctcactctcttcttctttccagtgtgtgtccttctggcctgggtggcagataaacgactgctcttctacaaatacatgcacaaaaagtaccgcacagacaaacaccgaggaattatcatagagacagagggtgaccaccctaagggcattgagatggatgggaaaatgatgaattcccattttctagatgggaacctggtgcccctggaagggaaggaagtggatgagtcccgcagagagatgatccggattctcaaggatctgaagcaaaaacacccagagaaggacttagatcagctggtggagatggccaattactatgctctttcccaccaacagaagagccgtgccttctaccgtatccaagccactcgtatgatgactggtgcaggcaatatcctgaagaaacatgcagcagaacaagccaagaaggcctccagcatgagcgaggtgcacaccgatgagcctgaggactttatttccaaggtcttctttgacccatgttcttaccagtgcctggagaactgtggggctgtactcctgacagtggtgaggaaagggggagacatgtcaaagaccatgtatgtggactacaaaacagaggatggttctgccaatgcaggggctgactatgagttcacagagggcacggtggttctgaagccaggagagacccagaaggagttctccgtgggcataattgatgacgacatttttgaggaggatgaacacttctttgtaaggttgagcaatgtccgcatagaggaggagcagccagaggaggggatgcctccagcaatattcaacagtcttcccttgcctcgggctgtcctagcctccccttgtgtggccacagttaccatcttggatgatgaccatgcaggcatcttcacttttgaatgtgatactattcatgtcagtgagagtattggtgttatggaggtcaaggttctgcggacatcaggtgcccggggtacagtcatcgtcccctttaggacagtagaagggacagccaagggtggcggtgaggactttgaagacacatatggggagttggaattcaagaatgatgaaactgtgaaaaccataagggttaaaatagtagatgaggaggaatacgaaaggcaagagaatttcttcattgcccttggtgaaccgaaatggatggaacgtggaatatcagcgctcctgttatctccagatgtgacagacaggaagctgactatggaagaagaggaggccaagaggatagcagagatgggaaagccagtattgggtgaacaccccaaactagaagtcatcattgaagagtcctatgagttcaagactacggtggacaaactgatcaagaagacaaacctggccttggttgtggggacccattcctggagggaccagttcatggaggccatcaccgtcagtgcagcaggggatgaggatgaggatgaatccggggaggagaggctgccctcctgctttgactacgtcatgcacttcctgactgtcttctggaaggtgctgtttgcctgtgtgccccccacagagtactgccacggctgggcctgcttcgccgtctccatcctcatcattggcatgctcaccgccatcattggggacctggcctcgcacttcggctgcaccattggtctcaaagattcagtcacagctgttgttttcgtggcatttggcacctctgtcccagatacgtttgccagcaaagctgctgccctccaggatgtatatgcagacgcctccattggcaacgtgacgggcagcaacgccgtcaatgtcttcctgggcatcggcctggcctggtccgtggccgccatctactgggctctgcagggacaggagttccacgtgtcggccggcacactggccttctccgtcaccctcttcaccatctttgcatttgtctgcatcagcgtgctcttgtaccgaaggcggccgcacctgggaggggagcttggtggcccccgtggctgcaagctcgccacaacatggctctttgtgagcctgtggctcctctacatactctttgccacactagaggcctattgctacatcaaggggttctaagccacacaacagagcctccagcagggcaggcctaggacttctcctaagagaagggcacttccccaccagtgatctctcccgactgcactgccctggagaggcagcatcaggacctaagccccaggaacttcacccaacttaggccctggcaattaactgaaagggcaaagtcttaatcaatcaaacaatggaggaatcaccgactttacacagtatttaattgaatacaaacaagcaacagcaacaaatccacctccaccccatctccccctcatatccctgacccaaagcaaaggtcagagcctttcgcctccttctattccatcttttgattattcctttgcctctcatttctttggaagcagggtttctcctctctgcccaattccatatgtccctattatctcactcagctgacaagacgtgaaaatgagtcacattcatgtggctggggtggggttcttttttcattgtaatcattattgtggttgctttcgttttgccattaggttttgcttattattttgttttgtcttttttttctgaagtgagtgaaaaaggtgccacaaaggaattccaggtccgagccaacagagagaaacatgaatttttagacacatgctctcctgccacctcttggctccatcaagatccagttccccatctcactgttttctctgagttcttgggaggagtgatggtgttggggtagaaataagctcactcacccacgcagggtactaaagatcttacaggagcttcaactggagcaggaggagctttttatgcttatgttgaatcaagtcagatacaaaaagcaattgtccctctttgcccaagcctttccaattctgtgtgtcttgttgtgtcagtgtccacttgtgtatccttctgcaggaagacccgccaaatagaagagatgggacaaaaataggaatggtgtgtgacgacaaagggctactggaagaacaaaagggatacaggccttcttgattatctttggctttgtacctgaggcaggagagaagagatgtccaaccagtgagatctttaagagaaaagtttgtattttaaatgtcaatgtgcctgagaaatgtcagcttcaccacgctcttgcttcctaatgctctatacaaagagggctgactatatttcttgaagtggtgtaaaaacttagagattttataagagaaccaggggctcccttcacctctcctggtccctcaggtcacatatgaaagcatttttacaagataggaactggaattcctcatttctcccatgttcctgcttgttcttaaacttcatgaagctatttttccagcctatggggtagttcttgctccagtaagaggaatcttagttgtcataatcccttggagcctgggtttttggagaaagagatctccgtgccctacagaccttttctcaacgaatgtgggaaggacctggctttaaaacacgcacacaaacacacaaataaacagacataagatgtcatcacgaaactgcccacggatctttaggctttctgcattgacataaatacattttctaagggggggggggaagaaattaaaaaacacctgttaattttaaacacattttttaagaaaaaaataattaaaaaagaaacagtgctcatgtcataagctatgttgacagttgccagtggaaatgttgggttggttcaaaaaaaaaataaaagctatactatatctctctacata

SEQ ID NO: 19786 - DNA, 2916 bp, Homo sapiens
  source 1..2916: mol_type = unassigned DNA
gagtatcaactcttccagcatggagccgaaaacctagggaatgacagctagaggcatccagacgataactggcagccaggagggtggataagtcaaaggaaggggtcaaggaaagaggggaaggaaagggaaccatcacttgctgagcctgctgcctgtgctttctcatgtcacccgcacgacaacccaatgtgaatgttatcatctccaggtaactgctgaagaaacggaagctcaaagaggaaaaccataagggttaaaatagtagatgaggaggaatacgaaaggcaagagaatttcttcattgcccttggtgaaccgaaatggatggaacgtggaatatcagatgtgacagacaggaagctgactatggaagaagaggaggccaagaggatagcagagatgggaaagccagtattgggtgaacaccccaaactagaagtcatcattgaagagtcctatgagttcaagactacggtggacaaactgatcaagaagacaaacctggccttggttgtggggacccattcctggagggaccagttcatggaggccatcaccgtcagtgcagcaggggatgaggatgaggatgaatccggggaggagaggctgccctcctgctttgactacgtcatgcacttcctgactgtcttctggaaggtgctgtttgcctgtgtgccccccacagagtactgccacggctgggcctgcttcgccgtctccatcctcatcattggcatgctcaccgccatcattggggacctggcctcgcacttcggctgcaccattggtctcaaagattcagtcacagctgttgttttcgtggcatttggcacctctgtcccagatacgtttgccagcaaagctgctgccctccaggatgtatatgcagacgcctccattggcaacgtgacgggcagcaacgccgtcaatgtcttcctgggcatcggcctggcctggtccgtggccgccatctactgggctctgcagggacaggagttccacgtgtcggccggcacactggccttctccgtcaccctcttcaccatctttgcatttgtctgcatcagcgtgctcttgtaccgaaggcggccgcacctgggaggggagcttggtggcccccgtggctgcaagctcgccacaacatggctctttgtgagcctgtggctcctctacatactctttgccacactagaggcctattgctacatcaaggggttctaagccacacaacagagcctccagcagggcaggcctaggacttctcctaagagaagggcacttccccaccagtgatctctcccgactgcactgccctggagaggcagcatcaggacctaagccccaggaacttcacccaacttaggccctggcaattaactgaaagggcaaagtcttaatcaatcaaacaatggaggaatcaccgactttacacagtatttaattgaatacaaacaagcaacagcaacaaatccacctccaccccatctccccctcatatccctgacccaaagcaaaggtcagagcctttcgcctccttctattccatcttttgattattcctttgcctctcatttctttggaagcagggtttctcctctctgcccaattccatatgtccctattatctcactcagctgacaagacgtgaaaatgagtcacattcatgtggctggggtggggttcttttttcattgtaatcattattgtggttgctttcgttttgccattaggttttgcttattattttgttttgtcttttttttctgaagtgagtgaaaaaggtgccacaaaggaattccaggtccgagccaacagagagaaacatgaatttttagacacatgctctcctgccacctcttggctccatcaagatccagttccccatctcactgttttctctgagttcttgggaggagtgatggtgttggggtagaaataagctcactcacccacgcagggtactaaagatcttacaggagcttcaactggagcaggaggagctttttatgcttatgttgaatcaagtcagatacaaaaagcaattgtccctctttgcccaagcctttccaattctgtgtgtcttgttgtgtcagtgtccacttgtgtatccttctgcaggaagacccgccaaatagaagagatgggacaaaaataggaatggtgtgtgacgacaaagggctactggaagaacaaaagggatacaggccttcttgattatctttggctttgtacctgaggcaggagagaagagatgtccaaccagtgagatctttaagagaaaagtttgtattttaaatgtcaatgtgcctgagaaatgtcagcttcaccacgctcttgcttcctaatgctctatacaaagagggctgactatatttcttgaagtggtgtaaaaacttagagattttataagagaaccaggggctcccttcacctctcctggtccctcaggtcacatatgaaagcatttttacaagataggaactggaattcctcatttctcccatgttcctgcttgttcttaaacttcatgaagctatttttccagcctatggggtagttcttgctccagtaagaggaatcttagttgtcataatcccttggagcctgggtttttggagaaagagatctccgtgccctacagaccttttctcaacgaatgtgggaaggacctggctttaaaacacgcacacaaacacacaaataaacagacataagatgtcatcacgaaactgcccacggatctttaggctttctgcattgacataaatacattttctaagggggggggggaagaaattaaaaaacacctgttaattttaaacacattttttaagaaaaaaataattaaaaaagaaacagtgctcatgtcataagctatgttgacagttgccagtggaaatgttgggttggttc

SEQ ID NO: 19787 - DNA, 2622 bp, Homo sapiens
  source 1..2622: mol_type = unassigned DNA
cgaaaacctagggaatgacagctagaggcatccagacgataactggcagccaggagggtggataagtcaaaggaaggggtcaaggaaagaggggaaggaaagggaaccatcacttgctgagcctgctgcctgtgctttctcatgtcacccgcacgacaacccaatgtgaatgttatcatctccaggtaactgctgaagaaacggaagctcaaagagatgtgacagacaggaagctgactatggaagaagaggaggccaagaggatagcagagatgggaaagccagtattgggtgaacaccccaaactagaagtcatcattgaagagtcctatgagttcaagactacggtggacaaactgatcaagaagacaaacctggccttggttgtggggacccattcctggagggaccagttcatggaggccatcaccgtcagtgcagcaggggatgaggatgaggatgaatccggggaggagaggctgccctcctgctttgactacgtcatgcacttcctgactgtcttctggaaggtgctgtttgcctgtgtgccccccacagagtactgccacggctgggcctgcttcgccgtctccatcctcatcattggcatgctcaccgccatcattggggacctggcctcgcacttcggctgcaccattggtctcaaagattcagtcacagctgttgttttcgtggcatttggcacctctgtcccagatacgtttgccagcaaagctgctgccctccaggatgtatatgcagacgcctccattggcaacgtgacgggcagcaacgccgtcaatgtcttcctgggcatcggcctggcctggtccgtggccgccatctactgggctctgcagggacaggagttccacgtgtcggccggcacactggccttctccgtcaccctcttcaccatctttgcatttgtctgcatcagcgtgctcttgtaccgaaggcggccgcacctgggaggggagcttggtggcccccgtggctgcaagctcgccacaacatggctctttgtgagcctgtggctcctctacatactctttgccacactagaggcctattgctacatcaaggggttctaagccacacaacagagcctccagcagggcaggcctaggacttctcctaagagaagggcacttccccaccagtgatctctcccgactgcactgccctggagaggcagcatcaggacctaagccccaggaacttcacccaacttaggccctggcaattaactgaaagggcaaagtcttaatcaatcaaacaatggaggaatcaccgactttacacagtatttaattgaatacaaacaagcaacagcaacaaatccacctccaccccatctccccctcatatccctgacccaaagcaaaggtcagagcctttcgcctccttctattccatcttttgattattcctttgcctctcatttctttggaagcagggtttctcctctctgcccaattccatatgtccctattatctcactcagctgacaagacgtgaaaatgagtcacattcatgtggctggggtggggttcttttttcattgtaatcattattgtggttgctttcgttttgccattaggttttgcttattattttgttttgtcttttttttctgaagtgagtgaaaaaggtgccacaaaggaattccaggtccgagccaacagagagaaacatgaatttttagacacatgctctcctgccacctcttggctccatcaagatccagttccccatctcactgttttctctgagttcttgggaggagtgatggtgttggggtagaaataagctcactcacccacgcagggtactaaagatcttacaggagcttcaactggagcaggaggagctttttatgcttatgttgaatcaagtcagatacaaaaagcaattgtccctctttgcccaagcctttccaattctgtgtgtcttgttgtgtcagtgtccacttgtgtatccttctgcaggaagacccgccaaatagaagagatgggacaaaaataggaatggtgtgtgacgacaaagggctactggaagaacaaaagggatacaggccttcttgattatctttggctttgtacctgaggcaggagagaagagatgtccaaccagtgagatctttaagagaaaagtttgtattttaaatgtcaatgtgcctgagaaatgtcagcttcaccacgctcttgcttcctaatgctctatacaaagagggctgactatatttcttgaagtggtgtaaaaacttagagattttataagagaaccaggggctcccttcacctctcctggtccctcaggtcacatatgaaagcatttttacaagataggaactggaattcctcatttctcccatgttcctgcttgttcttaaacttcatgaagctatttttccagcctatggggtagttcttgctccagtaagaggaatcttagttgtcataatcccttggagcctgggtttttggagaaagagatctccgtgccctacagaccttttctcaacgaatgtgggaaggacctggctttaaaacacgcacacaaacacacaaataaacagacataagatgtcatcacgaaactgcccacggatctttaggc

SEQ ID NO: 19788 - DNA, 2837 bp, Homo sapiens
  source 1..2837: mol_type = unassigned DNA
gtctctggcctatcaggaggacaactggtgctgcaatagaagccagtggctaagtctcgtgtatggcgtggttaaggttgcagcctctcacctctgccttcctccattttgggctggttacctttgtgctcttcctgaatggtcttcgagcagaggctggtggctcaggggacgtgccaagcacagggcagaacaatgagtcctgttcagggtcatcggactgcaaggagggtgtcatcctgccaatctggtacccggagaacccttcccttggggacaagattgccagggtcattgtctattttgtggccctgatatacatgttccttggggtgtccatcattgctgaccgcttcatggcatctattgaagtcatcacctctcaagagagggaggtgacaattaagaaacccaatggagaaaccagcacaaccactattcgggtctggaatgaaactgtctccaacctgacccttatggccctgggttcctctgctcctgagatactcctctctttaattgaggtgtgtggtcatgggttcattgctggtgatctgggaccttctaccattgtagggagtgcagccttcaacatgttcatcatcattggcatctgtgtctacgtgatcccagacggagagactcgcaagatcaagcatctacgagtcttcttcatcaccgctgcttggagtatctttgcctacatctggctctatatgattctggcagtcttctcccctggtgtggtccaggtttgggaaggcctcctcactctcttcttctttccagtgtgtgtccttctggcctgggtggcagataaacgactgctcttctacaaatacatgcacaaaaagtaccgcacagacaaacaccgaggaattatcatagagacagagggtgaccaccctaagggcattgagatggatgggaaaatgatgaattcccattttctagatgggaacctggtgcccctggaagggaaggaagtggatgagtcccgcagagagatgatccggattctcaaggatctgaagcaaaaacacccagagaaggacttagatcagctggtggagatggccaattactatgctctttcccaccaacagaagagccgtgccttctaccgtatccaagccactcgtatgatgactggtgcaggcaatatcctgaagaaacatgcagcagaacaagccaagaaggcctccagcatgagcgaggtgcacaccgatgagcctgaggactttatttccaaggtcttctttgacccatgttcttaccagtgcctggagaactgtggggctgtactcctgacagtggtgaggaaagggggagacatgtcaaagaccatgtatgtggactacaaaacagaggatggttctgccaatgcaggggctgactatgagttcacagagggcacggtggttctgaagccaggagagacccagaaggagttctccgtgggcataattgatgacgacatttttgaggaggatgaacacttctttgtaaggttgagcaatgtccgcatagaggaggagcagccagaggaggggatgcctccagcaatattcaacagtcttcccttgcctcgggctgtcctagcctccccttgtgtggccacagttaccatcttggatgatgaccatgcaggcatcttcacttttgaatgtgatactattcatgtcagtgagagtattggtgttatggaggtcaaggttctgcggacatcaggtgcccggggtacagtcatcgtcccctttaggacagtagaagggacagccaagggtggcggtgaggactttgaagacacatatggggagttggaattcaagaatgatgaaactgtgaaaaccataagggttaaaatagtagatgaggaggaatacgaaaggcaagagaatttcttcattgcccttggtgaaccgaaatggatggaacgtggaatatcagcgctcctgttatctccagacaggaagctgactatggaagaagaggaggccaagaggatagcagagatgggaaagccagtattgggtgaacaccccaaactagaagtcatcattgaagagtcctatgagttcaagactacggtggacaaactgatcaagaagacaaacctggccttggttgtggggacccattcctggagggaccagttcatggaggccatcaccgtcagtgcagcaggggatgaggatgaggatgaatccggggaggagaggctgccctcctgctttgactacgtcatgcacttcctgactgtcttctggaaggtgctgtttgcctgtgtgccccccacagagtactgccacggctgggcctgcttcgccgtctccatcctcatcattggcatgctcaccgccatcattggggacctggcctcgcacttcggctgcaccattggtctcaaagattcagtcacagctgttgttttcgtggcatttggcacctctgtcccagatacgtttgccagcaaagctgctgccctccaggatgtatatgcagacgcctccattggcaacgtgacgggcagcaacgccgtcaatgtcttcctgggcatcggcctggcctggtccgtggccgccatctactgggctctgcagggacaggagttccacgtgtcggccggcacactggccttctccgtcaccctcttcaccatctttgcatttgtctgcatcagcgtgctcttgtaccgaaggcggccgcacctgggaggggagcttggtggcccccgtggctgcaagctcgccacaacatggctctttgtgagcctgtggctcctctacatactctttgccacactagaggcctattgctacatcaaggggttctaa

SEQ ID NO: 19789 - DNA, 2840 bp, Homo sapiens
  source 1..2840: mol_type = unassigned DNA
gtctctggcctatcaggaggacaactggtgctgcaatagaagccagtggctaagtctcgtgtatggcgtggttaaggttgcagcctctcacctctgccttcctccattttgggctggttacctttgtgctcttcctgaatggtcttcgagcagaggctggtggctcaggggacgtgccaagcacagggcagaacaatgagtcctgttcagggtcatcggactgcaaggagggtgtcatcctgccaatctggtacccggagaacccttcccttggggacaagattgccagggtcattgtctattttgtggccctgatatacatgttccttggggtgtccatcattgctgaccgcttcatggcatctattgaagtcatcacctctcaagagagggaggtgacaattaagaaacccaatggagaaaccagcacaaccactattcgggtctggaatgaaactgtctccaacctgacccttatggccctgggttcctctgctcctgagatactcctctctttaattgaggtgtgtggtcatgggttcattgctggtgatctgggaccttctaccattgtagggagtgcagccttcaacatgttcatcatcattggcatctgtgtctacgtgatcccagacggagagactcgcaagatcaagcatctacgagtcttcttcatcaccgctgcttggagtatctttgcctacatctggctctatatgattctggcagtcttctcccctggtgtggtccaggtttgggaaggcctcctcactctcttcttctttccagtgtgtgtccttctggcctgggtggcagataaacgactgctcttctacaaatacatgcacaaaaagtaccgcacagacaaacaccgaggaattatcatagagacagagggtgaccaccctaagggcattgagatggatgggaaaatgatgaattcccattttctagatgggaacctggtgcccctggaagggaaggaagtggatgagtcccgcagagagatgatccggattctcaaggatctgaagcaaaaacacccagagaaggacttagatcagctggtggagatggccaattactatgctctttcccaccaacagaagagccgtgccttctaccgtatccaagccactcgtatgatgactggtgcaggcaatatcctgaagaaacatgcagcagaacaagccaagaaggcctccagcatgagcgaggtgcacaccgatgagcctgaggactttatttccaaggtcttctttgacccatgttcttaccagtgcctggagaactgtggggctgtactcctgacagtggtgaggaaagggggagacatgtcaaagaccatgtatgtggactacaaaacagaggatggttctgccaatgcaggggctgactatgagttcacagagggcacggtggttctgaagccaggagagacccagaaggagttctccgtgggcataattgatgacgacatttttgaggaggatgaacacttctttgtaaggttgagcaatgtccgcatagaggaggagcagccagaggaggggatgcctccagcaatattcaacagtcttcccttgcctcgggctgtcctagcctccccttgtgtggccacagttaccatcttggatgatgaccatgcaggcatcttcacttttgaatgtgatactattcatgtcagtgagagtattggtgttatggaggtcaaggttctgcggacatcaggtgcccggggtacagtcatcgtcccctttaggacagtagaagggacagccaagggtggcggtgaggactttgaagacacatatggggagttggaattcaagaatgatgaaactgtcaaaacaattcacatcaaggtaattgatgatgaggcatatgagaaaaacaagaattacttcattgagatgatgggcccccgcatggtggatatgagttttcagaaagcgctcctgttatctccagacaggaagctgactatggaagaagaggaggccaagaggatagcagagatgggaaagccagtattgggtgaacaccccaaactagaagtcatcattgaagagtcctatgagttcaagactacggtggacaaactgatcaagaagacaaacctggccttggttgtggggacccattcctggagggaccagttcatggaggccatcaccgtcagtgcagcaggggatgaggatgaggatgaatccggggaggagaggctgccctcctgctttgactacgtcatgcacttcctgactgtcttctggaaggtgctgtttgcctgtgtgccccccacagagtactgccacggctgggcctgcttcgccgtctccatcctcatcattggcatgctcaccgccatcattggggacctggcctcgcacttcggctgcaccattggtctcaaagattcagtcacagctgttgttttcgtggcatttggcacctctgtcccagatacgtttgccagcaaagctgctgccctccaggatgtatatgcagacgcctccattggcaacgtgacgggcagcaacgccgtcaatgtcttcctgggcatcggcctggcctggtccgtggccgccatctactgggctctgcagggacaggagttccacgtgtcggccggcacactggccttctccgtcaccctcttcaccatctttgcatttgtctgcatcagcgtgctcttgtaccgaaggcggccgcacctgggaggggagcttggtggcccccgtggctgcaagctcgccacaacatggctctttgtgagcctgtggctcctctacatactctttgccacactagaggcctattgctacatcaaggggttctaa

SEQ ID NO: 19790 - DNA, 3409 bp, Homo sapiens
  source 1..3409: mol_type = unassigned DNA
cgaaaacctagggaatgacagctagaggcatccagacgataactggcagccaggagggtggataagtcaaaggaaggggtcaaggaaagaggggaaggaaagggaaccatcacttgctgagcctgctgcctgtgctttctcatgtcacccgcacgacaacccaatgtgaatgttatcatctccaggtaactgctgaagaaacggaagctcaaagagatgtgacagacaggaagctgactatggaagaagaggaggccaagaggatagcagagatgggaaagccagtattgggtgaacaccccaaactagaagtcatcattgaagagtcctatgagttcaagactacggtggacaaactgatcaagaagacaaacctggccttggttgtggggacccattcctggagggaccagttcatggaggccatcaccgtcagtgcagcaggggatgaggatgaggatgaatccggggaggagaggctgccctcctgctttgactacgtcatgcacttcctgactgtcttctggaaggtgctgtttgcctgtgtgccccccacagagtactgccacggctgggcctgcttcgccgtctccatcctcatcattggcatgctcaccgccatcattggggacctggcctcgcacttcggctgcaccattggtctcaaagattcagtcacagctgttgttttcgtggcatttggcacctctgtcccaggtgagagtgagaggtgcttgaatttgcaaagaggattttacctggttcaaatgacccctggactccatctcattatcttccacaccatctcagatctgaacttaacagagcctctgcccttaaagtgcacaaaagtcaatcaaagagatgaataatgacattagtaatgacagctaatatttcttgagcactttcaatgtgacagacaccatgtgtgttcagcaatttacacatttacattttccccctgtaatgtttcccaaagccctattaaatagggtaagttattatccccacttcacagacaaagaaactgaggcccacagaggttaagctacatgcccaagtaagtggtccaatttcttaacctccacattatgtgagtagaccacaaacagtgaaattaaaagaatgtagatattgttctccttctatttacctctggcgatctctgagaggttaaagattagccagctcaaagatatcaaaggagaaatgcccacatacattcttggcctcctctacttggaaggacactgtgagtacaaagtatctcctagcaggacagccaaaggaagttccacagcttttatctttttataggatgaattacatactctttctttttcttaggaacactcagagacaaacagaaaggagcggacattcctttactcattgaacaaatatttactgagcacctattatgcctgttacagtattgtgctagtttttgggactatagtgaaaggcaagatacacatgcttccttctccacgtggagtttataatctactgaaggaggcaactctcaactactgtaattaaagttatcttgttaaatcctaggaagaaaaagaaaaggtactgcatacggaaggaagttgggcctgaatgtaggagttagcaggtagacaggggctgcactagcccaggttctttacttaattcagttaggggctttggggcctctgaactctgaacttctgccagggagctggcatcccagttgccccagaaagaaacagagcacatcctcctgcagggaagttaggctgaatctcatcagacaggacttttctggctgggccaagggaaatctttcctgtaccaagcaaacatatccttcaagagagtagctgaattcacatcaaattctaggaaaacctctttccaaaaccccagcgcaggccagcggtattatttgtccattagtgatgcaagagatttagctatcgtggaaatgcatcagaaggttggaaattagatggatgatcccaggaaggcctgtggatgagatgccctgtgatctctgttctccaagccttgggggacctgaactatcagaggggagggaggaaatatgggggaaagcatagaggtgggaagaaatatcagaggatcagaagcaaaaaacaacaataacaacagaaacaaaaacaaacaaacaaacaaaaaaacaaggccataggcaagaaagggtaagaggttttctctgggagatctaaaaaaaatggcaataatgaggtaagccaggcagatacctttgggcatctccaagtccttgcaattggccaagacaacagctaacaacatttgaggctttaagaaggttaccctgtgatccactcatctgatttagtggctttggctgaagctctttggatatagttgaaggtatggaaagggtccttacatgaggactttagggtcaagtctcttgctaacatcctatgtgaccttgggtaaattctttgacccttatttttcttacctgtaaaataaaagaattgggctagatgtctctgacagtcctccctgtatctacaatctgtgccaagatctaaagtcaaacaccctgcaaggccctgtgatacatatataaaccacaaagacagagccccgtcttccttgagtccacagttcaccctgcatgtccccatcatggttccccaacatgtcctctgtccccaaaatccagcacctcacccagtgctcaatcagtaggcattgctcaataactgttggtggttcgtgaataaatgccccatatgacagttaaaatcaggcatctactccaagcagcttcccagggtgtcaaggttccctggggagatattatgggatggcaaacttcccttactgaaaaagtagtcaaaggagaacaataagcccactcagtaaatatcagaactggaaagcccttcagaatctttcagatcactgcagatgaggaatgggaagcccagactagggatgtgacctacccagggccacacggcttgcttgcggcagaactaggagttaggagtggccccctagcccttgtctctcattcctgggttcagcccaccagctcaagctgctttttgggcatactggaagacaagccctgcacaccttagcctcctaccagttcccatgtgtctttgtccttttccagatacgtttgccagcaaagctgctgccctccaggatgtatatgcagacgcctccattggcaacgtgacgggcagcaacgccgtcaatgtcttcctgggcatcggcctggcctggtccgtggccgccatctactgggctctgcagggacaggagttccacgtgtcggccggcacactggccttctccgtcaccctcttcaccatctttgcatttgtctgcatcagcgtgctcttgtaccgaaggcggccgc

SEQ ID NO: 19791 - DNA, 488 bp, Homo sapiens
  source 1..488: mol_type = unassigned DNA
gaaaaccataagggttaaaatagtagatgaggaggaatacgaaaggcaagagaatttcttcattgcccttggtgaaccgaaatggatggaacgtggaatatcaggttattcacttgtggagtggcccataggcccctctgcccttcgaggaggagagatatgctgctgggagcctcctagcaaatgaagcagtgaaatccacctgtttgtcaaaaaggggtgatcatactgcaattagttcatattcatgtgacaaagagcagcataaaactttccacacgaggacagagctaagagattcagcaacaacattcccaaaggattctctacaggccttctcagtgtgattggtcatttctcattgtctgctggggactctcctgcagagctgaccacttctgtgcctgcgctggtttggacacacctgatgctctaggggcagaactcctctccttcttcactgctggttctcttcgtcaccactcaat

SEQ ID NO: 19792 - DNA, 5259 bp, Homo sapiens
  source 1..5259: mol_type = unassigned DNA
cggcgctgtctcccagctgatagggtgacgttccgtttggaggcttggagattggctttttgatttggcttcttccggcagcttaatgggcaaagctctccgctcgcccagaaaccagcctctccgcgcgtcccctctgcgcgcggcgaggccgagacgtctcccgcggtgacagcgtgcaaggcggagacccggcgcgctcccagcccagggaaagcccaggcgacgcgaccgcaagcccgagcccaggtccctcggagccgccagggcgcgccgggctgcttgccttcctgccccttcctgcaggaatcccccgccgcccgcggccgggactccgggcctctcccgggcgtagattccagtcaccgctctgggtcggggtttccctctttctgaaatccgtgcggaaggacccctcccggggcccctcgccctggccccagacaccctccctcccagaccccgcgctccagatgcgctgccccgcagctccctgacagctgcgagcccacgaaccccggcgggagggcggcggcggcggactgacatgccccggacgcggctgcggccggcgggcagcccgcgggggcgatgagccgctgcgaccggtgaggcgccgggcggcgggggcatcgcgtaccttcctcacccccctcccttgcccactccgctcgggaggccgagaggaaacggtctctggcctatcaggaggacaactggtgctgcaatagaagccagtggctaagtctcgtgtatggcgtggttaaggttgcagcctctcacctctgccttcctccattttgggctggttacctttgtgctcttcctgaatggtcttcgagcagaggctggtggctcaggggacgtgccaagcacagggcagaacaatgagtcctgttcagggtcatcggactgcaaggagggtgtcatcctgccaatctggtacccggagaacccttcccttggggacaagattgccagggtcattgtctattttgtggccctgatatacatgttccttggggtgtccatcattgctgaccgcttcatggcatctattgaagtcatcacctctcaagagagggaggtgacaattaagaaacccaatggagaaaccagcacaaccactattcgggtctggaatgaaactgtctccaacctgacccttatggccctgggttcctctgctcctgagatactcctctctttaattgaggtgtgtggtcatgggttcattgctggtgatctgggaccttctaccattgtagggagtgcagccttcaacatgttcatcatcattggcatctgtgtctacgtgatcccagacggagagactcgcaagatcaagcatctacgagtcttcttcatcaccgctgcttggagtatctttgcctacatctggctctatatgattctggcagtcttctcccctggtgtggtccaggtttgggaaggcctcctcactctcttcttctttccagtgtgtgtccttctggcctgggtggcagataaacgactgctcttctacaaatacatgcacaaaaagtaccgcacagacaaacaccgaggaattatcatagagacagagggtgaccaccctaagggcattgagatggatgggaaaatgatgaattcccattttctagatgggaacctggtgcccctggaagggaaggaagtggatgagtcccgcagagagatgatccggattctcaaggatctgaagcaaaaacacccagagaaggacttagatcagctggtggagatggccaattactatgctctttcccaccaacagaagagccgtgccttctaccgtatccaagccactcgtatgatgactggtgcaggcaatatcctgaagaaacatgcagcagaacaagccaagaaggcctccagcatgagcgaggtgcacaccgatgagcctgaggactttatttccaaggtcttctttgacccatgttcttaccagtgcctggagaactgtggggctgtactcctgacagtggtgaggaaagggggagacatgtcaaagaccatgtatgtggactacaaaacagaggatggttctgccaatgcaggggctgactatgagttcacagagggcacggtggttctgaagccaggagagacccagaaggagttctccgtgggcataattgatgacgacatttttgaggaggatgaacacttctttgtaaggttgagcaatgtccgcatagaggaggagcagccagaggaggggatgcctccagcaatattcaacagtcttcccttgcctcgggctgtcctagcctccccttgtgtggccacagttaccatcttggatgatgaccatgcaggcatcttcacttttgaatgtgatactattcatgtcagtgagagtattggtgttatggaggtcaaggttctgcggacatcaggtgcccggggtacagtcatcgtcccctttaggacagtagaagggacagccaagggtggcggtgaggactttgaagacacatatggggagttggaattcaagaatgatgaaactgtcaaaacaattcacatcaaggtaattgatgatgaggcatatgagaaaaacaagaattacttcattgagatgatgggcccccgcatggtggatatgagttttcagaaagcgctcctgttatctccagacaggaagctgactatggaagaagaggaggccaagaggatagcagagatgggaaagccagtattgggtgaacaccccaaactagaagtcatcattgaagagtcctatgagttcaagactacggtggacaaactgatcaagaagacaaacctggccttggttgtggggacccattcctggagggaccagttcatggaggccatcaccgtcagtgcagcaggggatgaggatgaggatgaatccggggaggagaggctgccctcctgctttgactacgtcatgcacttcctgactgtcttctggaaggtgctgtttgcctgtgtgccccccacagagtactgccacggctgggcctgcttcgccgtctccatcctcatcattggcatgctcaccgccatcattggggacctggcctcgcacttcggctgcaccattggtctcaaagattcagtcacagctgttgttttcgtggcatttggcacctctgtcccagatacgtttgccagcaaagctgctgccctccaggatgtatatgcagacgcctccattggcaacgtgacgggcagcaacgccgtcaatgtcttcctgggcatcggcctggcctggtccgtggccgccatctactgggctctgcagggacaggagttccacgtgtcggccggcacactggccttctccgtcaccctcttcaccatctttgcatttgtctgcatcagcgtgctcttgtaccgaaggcggccgcacctgggaggggagcttggtggcccccgtggctgcaagctcgccacaacatggctctttgtgagcctgtggctcctctacatactctttgccacactagaggcctattgctacatcaaggggttctaagccacacaacagagcctccagcagggcaggcctaggacttctcctaagagaagggcacttccccaccagtgatctctcccgactgcactgccctggagaggcagcatcaggacctaagccccaggaacttcacccaacttaggccctggcaattaactgaaagggcaaagtcttaatcaatcaaacaatggaggaatcaccgactttacacagtatttaattgaatacaaacaagcaacagcaacaaatccacctccaccccatctccccctcatatccctgacccaaagcaaaggtcagagcctttcgcctccttctattccatcttttgattattcctttgcctctcatttctttggaagcagggtttctcctctctgcccaattccatatgtccctattatctcactcagctgacaagacgtgaaaatgagtcacattcatgtggctggggtggggttcttttttcattgtaatcattattgtggttgctttcgttttgccattaggttttgcttattattttgttttgtcttttttttctgaagtgagtgaaaaaggtgccacaaaggaattccaggtccgagccaacagagagaaacatgaatttttagacacatgctctcctgccacctcttggctccatcaagatccagttccccatctcactgttttctctgagttcttgggaggagtgatggtgttggggtagaaataagctcactcacccacgcagggtactaaagatcttacaggagcttcaactggagcaggaggagctttttatgcttatgttgaatcaagtcagatacaaaaagcaattgtccctctttgcccaagcctttccaattctgtgtgtcttgttgtgtcagtgtccacttgtgtatccttctgcaggaagacccgccaaatagaagagatgggacaaaaataggaatggtgtgtgacgacaaagggctactggaagaacaaaagggatacaggccttcttgattatctttggctttgtacctgaggcaggagagaagagatgtccaaccagtgagatctttaagagaaaagtttgtattttaaatgtcaatgtgcctgagaaatgtcagcttcaccacgctcttgcttcctaatgctctatacaaagagggctgactatatttcttgaagtggtgtaaaaacttagagattttataagagaaccaggggctcccttcacctctcctggtccctcaggtcacatatgaaagcatttttacaagataggaactggaattcctcatttctcccatgttcctgcttgttcttaaacttcatgaagctatttttccagcctatggggtagttcttgctccagtaagaggaatcttagttgtcataatcccttggagcctgggtttttggagaaagagatctccgtgccctacagaccttttctcaacgaatgtgggaaggacctggctttaaaacacgcacacaaacacacaaataaacagacataagatgtcatcacgaaactgcccacggatctttaggctttctgcattgacataaatacattttctaagggggggggggaagaaattaaaaaacacctgttaattttaaacacattttttaagaaaaaaataattaaaaaagaaacagtgctcatgtcataagctatgttgacagttgccagtggaaatgttgggttggttcaaaaaaaaaataaaagctatactatatctctctac

SEQ ID NO: 19793 - DNA, 3289 bp, Homo sapiens
  source 1..3289: mol_type = unassigned DNA
cgaggttcggagtttgctggtcccaggcccggcccgagcaggtcggcgaccatccgagcgctgggcatcggcccacgcgtacagaaggcgctcaataaatgctcactagtgaatcagtaaaataaatcggcagcaaagagagacgagacgcatgctgatcttcaggtgttggggacatcagggacgcgaacatttattgagctcttattgtataccgcgtcggccagcatttgtgtccatttcacacatgaggaataagaggcccagagaggtgaagtgacttccttaaggccacacagatagtaagtggccgagacgaatttgaaaccaggggtgtcctgtttgaacttggtgccaaatagagtaactcggactccagttggaggggttcgggagaaccatagaagaggaagggccgtgtcttccgtggacaggccaccggagccgccagctgtttggaactgagctactgcagaaagggaagtggagagtaagggccaggccccgtgggggcagatggccggcagaaggctgaatctgcgctgggcactgagtgtgctttgtgtgctgctaatggcggagacagtgtctgggactaggggctcgtctacaggagctcacattagcccccagtttccagcttcaggtgtgaaccagacccccgtggtagactgccgcaaggtgtgtggcctgaatgtctctgaccgctgtgacttcatccggaccaaccctgactgccacagtgatggggggtacctggactacctggaaggcatcttctgccacttccctcccagcctcctccctctggctgtcactctctacgtttcctggctgctctacctgtttctgattctgggagtcaccgcagccaagtttttctgccccaacttgtcggccatttctaccacactgaagctctcccacaacgtggcaggcgtcaccttcctggcatttgggaatggtgcacctgacatcttcagtgccctggtggccttctctgacccgcacacagccggcctggcccttggggcactgtttggcgctggcgtgctggttaccacagtggtggccggaggcattaccatcctacaccccttcatggctgcctccaggcccttcttcagggacatcgttttctacatggtggctgtgttcctgaccttcctcatgctcttccgtggcagggtcaccctggcatgggctctgggttacctgggcttgtatgtgttctatgtggtcactgtgattctctgcacctggatctaccaacggcaacggagaggatctctgttctgccccatgccagttactccagagatcctctcagactccgaggaggaccgggtatcttctaataccaacagctatgactacggtgatgagtaccggccgctgttcttctaccaggagaccacggctcagatcctggtccgggccctcaatcccctggattacatgaagtggagaaggaaatcagcatactggaaagccctcaaggtgttcaagctgcctgtggagttcctgctgctcctcacagtccccgtcgtggacccggacaaggatgaccagaactggaaacggcccctcaactgtctgcatctggttatcagccccctggttgtggtcctgaccctgcagtcggggacctatggtgtctatgagataggcggcctcgttcccgtctgggtcgtggtggtgatcgcaggcacagccttggcttcagtgaccttttttgccacatctgacagccagccccccaggcttcactggctctttgctttcctgggctttctgaccagcgccctgtggatcaacgcggccgccacagaggtggtgaacatcttgcggtccctgggtgtggtcttccggctgagcaacactgtgctggggctcacgctgctggcctgggggaacagcattggagatgccttctcggatttcacactggctcgccagggctacccacggatggcgttctccgcctgctttggcggcatcatcttcaacatcctcgtgggtgtggggctgggctgcctgctccagatctcccgaagccacacagaagtgaagctggagccagacggactgctggtgtgggtcctggcaggcgccctggggctcagcctcgtcttctccctggtctcagtcccattgcagtgcttccagctcagcagagtctatggcttctgcctgctcctcttctacctgaacttccttgtcgtggccctcctcactgaatttggagtgattcacctgaaaagcatgtgactgaagccgcttagtgctgtggcctcactgcaggcaggagccccgcccctcctgccgggggaggcccagggaccggagcatttctgcaaggcccttgtgggcacgagagtgcggcccttgctgctggagatctgaggtcactgctgtgagctgggagaactgctgtgtacctcttgctgccagcacccaacagccttgccgtggggaccttggaaacctggctttgctctggacaaagggttccagagagaagctagaagtcccccttgaatgacccccagagcccctctgagaagggctggagtttgggggaaggggatggctggatgtgctccaggccatgctggaggtacccccgaggcacaggcactgcccgttccccttgcctgggcttcaggccttctggcaccttctcaggacacaagtggctgcccaaccctgactcagagaatgagggtggcttggacccctgggaatcaggccgccgagggctgagctccagagccgcaccatctgccacaaacagaattcgagacatacttaattttgaatttctccttgccacgttaataaagccaaaagcagcgggtgctattcgtggcaacacacttcactgaacccacttgcttccaaaacgatgccagcccgaggcactgctacgccagcagctgccacatgggatggtggctcaggcgctccctccaggattctgcccctgcctgtccacagactcctttgtgctggaacctgggctcctccagctgccaggcaggagtcggtaggactgtgcctgtgcctccctcagcggggccctgggcggggttccaaggcctgcgagctgggaaaggacagatgaggggacctcgtgccttcttgctgtcatgcaatgaccccgccttatgttgccgaaataagcaactcttaggtttgcctgactgccttatgctggtaaagaaaagggattcaactgtctcttttccaaataaaaaaaaagtcaaaatttcaagtgtagagaaaa

SEQ ID NO: 19794 - DNA, 2287 bp, Homo sapiens
  source 1..2287: mol_type = unassigned DNA
aatggggacctggaggtctctcgctgtgcttgggtattacctccttgattgcaagggagacaggaagggagatggtcctggaaggcaggaggaaggagtggggagctcaaggaaaaggccatttacccactggtacctggatgggctaacacagattgccaccgctaacacgcaccactgatagaactgccagctgttgttctctagacctgcaccaggacaccacttggtgacggcgtgcaccccgtctgcaggttacctgggcttgtatgtgttctatgtggtcactgtgattctctgcacctggatctaccaacggcaacggagaggatctctgttctgccccatgccagttactccagagatcctctcagactccgaggaggaccgggtatcttctaataccaacagctatgactacggagaccacggctcagatcctggtccgggccctcaatcccctggattacatgaagtggagaaggaaatcagcatactggaaagccctcaaggtgttcaagctgcctgtggagttcctgctgctcctcacagtccccgtcgtggacccggacaaggatgaccagaactggaaacggcccctcaactgtctgcatctggttatcagccccctggttgtggtcctgaccctgcagtcggggacctatggtgtctatgagataggcggcctcgttcccgtctgggtcgtggtggtgatcgcaggcacagccttggcttcagtgaccttttttgccacatctgacagccagccccccaggcttcactggctctttgctttcctgggctttctgaccagcgccctgtggatcaacgcggccgccacagaggtggtgaacatcttgcggtccctgggtgtggtcttccggctgagcaacactgtgctggggctcacgctgctggcctgggggaacagcattggagatgccttctcggatttcacactggctcgccagggctacccacggatggcgttctccgcctgctttggcggcatcatcttcaacatcctcgtgggtgtggggctgggctgcctgctccagatctcccgaagccacacagaagtgaagctggagccagacggactgctggtgtgggtcctggcaggcgccctggggctcagcctcgtcttctccctggtctcagtcccattgcagtgcttccagctcagcagagtctatggcttctgcctgctcctcttctacctgaacttccttgtcgtggccctcctcactgaatttggagtgattcacctgaaaagcatgtgactgaagccgcttagtgctgtggcctcactgcaggcaggagccccgcccctcctgccgggggaggcccagggaccggagcatttctgcaaggcccttgtgggcacgagagtgcggcccttgctgctggagatctgaggtcactgctgtgagctgggagaactgctgtgtacctcttgctgccagcacccaacagccttgccgtggggaccttggaaacctggctttgctctggacaaagggttccagagagaagctagaagtcccccttgaatgacccccagagcccctctgagaagggctggagtttgggggaaggggatggctggatgtgctccaggccatgctggaggtacccccgaggcacaggcactgcccgttccccttgcctgggcttcaggccttctggcaccttctcaggacacaagtggctgcccaaccctgactcagagaatgagggtggcttggacccctgggaatcaggccgccgagggctgagctccagagccgcaccatctgccacaaacagaattcgagacatacttaattttgaatttctccttgccacgttaataaagccaaaagcagcgggtgctattcgtggcaacacacttcactgaacccacttgcttccaaaacgatgccagcccgaggcactgctacgccagcagctgccacatgggatggtggctcaggcgctccctccaggattctgcccctgcctgtccacagactcctttgtgctggaacctgggctcctccagctgccaggcaggagtcggtaggactgtgcctgtgcctccctcagcggggccctgggcggggttccaaggcctgcgagctgggaaaggacagatgaggggacctcgtgccttcttgctgtcatgcaatgaccccgccttatgttgccgaaataagcaactcttaggtttgcctgactgccttatgctggtaaagaaaagggattcaactgtctcttttccaaataaaaaaaaagtcaaaatttc

SEQ ID NO: 19795 - DNA, 2925 bp, Homo sapiens
  source 1..2925: mol_type = unassigned DNA
ccacactgaagctctcccacaacgtggcaggcgtcaccttcctggcatttgggaatggtgcacctgacatcttcagtgccctggtggccttctctgacccgcacacagccggcctggcccttggggcactgtttggcgctggcgtgctggttaccacagtggtggccggaggcattaccatcctacaccccttcatggctgcctccaggcccttcttcagggacatcgttttctacatggtggctgtgttcctgaccttcctcatgctcttccgtggcagggtcaccctggcatgggctctgggttacctgggcttgtatgtgttctatgtggtcactgtgattctctgcacctggatctaccaacggcaacggagaggatctctgttctgccccatgccagttactccagagatcctctcagactccgaggaggaccgggtatcttctaataccaacagctatgactacggtgatgagtaccggccgctgttcttctaccaggagaccacggctcagatcctggtccgggccctcaatcccctggattacatgaagtggagaaggaaatcagcatactggaaagccctcaaggtgttcaagctgcctgtggagttcctgctgctcctcacagtccccgtcgtggacccggacaaggatgaccagaactggaaacggcccctcaactgtctgcatctggttatcagccccctggttgtggtcctgaccctgcagtcggggacctatggtgtctatgagataggcggcctcgttcccgtctgggtcgtggtggtgatcgcaggcacagccttggcttcagtgaccttttttgccacatctgacagccagccccccaggcttcactggctctttgctttcctgggctttctgaccagcgccctgtggatcaacgcggccgccacagaggtggtgaacatcttgcggtccctgggtgtggtcttccggctgagcaacactgtgctggggctcacgctgctggcctgggggaacagcattggagatgccttctcggatttcacactggctcgccagggctacccacggatggcgttctccgcctgctttggcggcatcatcttcaacatcctcgtgggtgtggggctgggctgcctgctccagatctcccgaagccacacagaagtgaagacgaggaggatgcaggtggctgggaagacgaaacgccacggtgcctagaaacagcccacacggtacctcatgtcttcactgcgtgttggatatacctgctaagtgtggaaggaagagaagcggggaggggacatttcagtcccttttactcttctgtactgcttgaaaatatgtcagcaaccatgtgtgacatgtataccatagatagtgttagttccctagtgctgccataactgaccacaaaccagggggctgacaacagcagaaattgagtctctcccagttctggaagccaaaagcctgcaatcagggcatcagccgggcagtgccacctccaagctccagaggaggatccttcctcacctcttccagctgctgttggctcctgacgttccttgcccagtgggcccatctctgcagtctctgcctctgtgttcccatggccatctctctcttcttcttacggagacatgagtcattggatttaggggccaccctaagtccaagatgattgtatcttgaaacccttagcttattatatttgcaaagaccctatttcagctggagccagacggactgctggtgtgggtcctggcaggcgccctggggctcagcctcgtcttctccctggtctcagtcccattgcagtgcttccagctcagcagagtctatggcttctgcctgctcctcttctacctgaacttccttgtcgtggccctcctcactgaatttggagtgattcacctgaaaagcatgtgactgaagccgcttagtgctgtggcctcactgcaggcaggagccccgcccctcctgccgggggaggcccagggaccggagcatttctgcaaggcccttgtgggcacgagagtgcggcccttgctgctggagatctgaggtcactgctgtgagctgggagaactgctgtgtacctcttgctgccagcacccaacagccttgccgtggggaccttggaaacctggctttgctctggacaaagggttccagagagaagctagaagtcccccttgaatgacccccagagcccctctgagaagggctggagtttgggggaaggggatggctggatgtgctccaggccatgctggaggtacccccgaggcacaggcactgcccgttccccttgcctgggcttcaggccttctggcaccttctcaggacacaagtggctgcccaaccctgactcagagaatgagggtggcttggacccctgggaatcaggccgccgagggctgagctccagagccgcaccatctgccacaaacagaattcgagacatacttaattttgaatttctccttgccacgttaataaagccaaaagcagcgggtgctattcgtggcaacacacttcactgaacccacttgcttccaaaacgatgccagcccgaggcactgctacgccagcagctgccacatgggatggtggctcaggcgctccctccaggattctgcccctgcctgtccacagactcctttgtgctggaacctgggctcctccagctgccaggcaggagtcggtaggactgtgcctgtgcctccctcagcggggccctgggcggggttccaaggcctgcgagctgggaaaggacagatgaggggacctcgtgccttcttgctgtcatgcaatgaccccgccttatgttgccgaaataagcaactcttaggtttgcctgactgccttatgctggtaaagaaaagggattcaactgtctcttttccaaataaaaaaaaagtcaaaa

SEQ ID NO: 19796 - DNA, 2493 bp, Homo sapiens
  source 1..2493: mol_type = unassigned DNA
tgtttagtgcttaatgattttttaaaattttagtttttacttttggaaactcaatgaatgtaccaaccgaagggtgttgaattttcagcaaatggatcatttagggaagttgccttttactacttagggaaaattgtctttcactgttttttcaagtaccgacgtgtgccacaacatggatcacccttgaaaacatgatgctgagtgagagaagactgtagcagaggatcacacactgtggcattccattgatgtgaaatgtccacgaggcacattcagagagacagagagcagagtagtggtcgagttgggctggtggggtggggctagggagtgaccgctaatgagtacagggatacttattgggatgatgggtggtatttggttcatagactggaaatctgatgaaagtgataaggaaccctttccagacaaaataatatttttttttagtatatgaaagggaggtttttttgtttttattttttttcttttttcgagacagagtctcactcagtcgcccaggctagagtacactggcatgatctaggctcactgcaacttctgcctcccgggttcaagcgattctcccacctcagcctctcgagtagctgggattacaggtgtgtgacaccagcctgactaatttttgtatttttagtagagacaaggtttcaccatgttggccaagttggtctcgaactcctgacctcaggtgatctgcccgcctcggcctcccaaagtgctgcgattacaggcggtgagccaccgtgcccggcctgaaagggagtttattaaggaaaaaagaaaataatattgaactcacgttttattgagcactaactttgcacaggcaccaatgcatatagtaacgtgttttatactcataataagctcatgaggtagatactgttatcatcccgtttcacaggtgaggaactgaggctgtgttcctgttggggctggccttggtcccacagcaaaccattccctccgcagctctttgctttcctgggctttctgaccagcgccctgtggatcaacgcggccgccacagaggtggtgaacatcttgcggtccctgggtgtggtcttccggctgagcaacactgtgctggggctcacgctgctggcctgggggaacagcattggagatgccttctcggatttcacactggctcgccagggctacccacggatggcgttctccgcctgctttggcggcatcatcttcaacatcctcgtgggtgtggggctgggctgcctgctccagatctcccgaagccacacagaagtgaagctggagccagacggactgctggtgtgggtcctggcaggcgccctggggctcagcctcgtcttctccctggtctcagtcccattgcagtgcttccagctcagcagagtctatggcttctgcctgctcctcttctacctgaacttccttgtcgtggccctcctcactgaatttggagtgattcacctgaaaagcatgtgactgaagccgcttagtgctgtggcctcactgcaggcaggagccccgcccctcctgccgggggaggcccagggaccggagcatttctgcaaggcccttgtgggcacgagagtgcggcccttgctgctggagatctgaggtcactgctgtgagctgggagaactgctgtgtacctcttgctgccagcacccaacagccttgccgtggggaccttggaaacctggctttgctctggacaaagggttccagagagaagctagaagtcccccttgaatgacccccagagcccctctgagaagggctggagtttgggggaaggggatggctggatgtgctccaggccatgctggaggtacccccgaggcacaggcactgcccgttccccttgcctgggcttcaggccttctggcaccttctcaggacacaagtggctgcccaaccctgactcagagaatgagggtggcttggacccctgggaatcaggccgccgagggctgagctccagagccgcaccatctgccacaaacagaattcgagacatacttaattttgaatttctccttgccacgttaataaagccaaaagcagcgggtgctattcgtggcaacacacttcactgaacccacttgcttccaaaacgatgccagcccgaggcactgctacgccagcagctgccacatgggatggtggctcaggcgctccctccaggattctgcccctgcctgtccacagactcctttgtgctggaacctgggctcctccagctgccaggcaggagtcggtaggactgtgcctgtgcctccctcagcggggccctgggcggggttccaaggcctgcgagctgggaaaggacagatgaggggacctcgtgccttcttgctgtcatgcaatgaccccgccttatgttgccgaaataagcaactcttaggtttgcctgactgccttatgctggtaaagaaaagggattcaactgtctcttttccaaataaaaaaaaagtc

SEQ ID NO: 19797 - DNA, 1058 bp, Homo sapiens
  source 1..1058: mol_type = unassigned DNA
gccactgtgcccagctggtagccgcgtttttcacacctgcaaagttgttcctggtgtgaaagagtggggtaaaggaattaaggagggaagtgtgtcttcccagatgctgtgccccctcacacagcaccccaccagctagtgcccaggcacacttgggcatccatctgtgtttgttgcctgaatgaccgtgggtgagaatgaaggcgtggatgaccagggagggtgggggaagcgactcaccactgcaggcccctcttgttcctgtgcagatgccttctcggatttcacactggctcgccagggctacccacggatggcgttctccgcctgctttggcggcatcatcttcaacatcctcgtgggtgtggggctgggctgcctgctccagatctcccgaagccacacagaagtgaagctggagccagacggactgctggtgtgggtcctggcaggcgccctggggctcagcctcgtcttctccctggtctcagtcccattgcagtgcttccagctcagcagagtctatggcttctgcctgctcctcttctacctgaacttccttgtcgtggccctcctcactgaatttggagtgattcacctgaaaagcatgtgactgaagccgcttagtgctgtggcctcactgcaggcaggagccccgcccctcctgccgggggaggcccagggaccggagcatttctgcaaggcccttgtgggcacgagagtgcggcccttgctgctggagatctgaggtcactgctgtgagctgggagaactgctgtgtacctcttgctgccagcacccaacagccttgccgtggggaccttggaaacctggctttgctctggacaaagggttccagagagaagctagaagtcccccttgaatgacccccagagcccctctgagaagggctggagtttgggggaaggggatggctggatgtgctccaggccatgctggaggtacccccgaggcacaggcactgcccgttccccttgcctgggcttcaggccttctggcaccttctcaggacacaagtggctgcccaaccctgactc

SEQ ID NO: 19798 - DNA, 1656 bp, Homo sapiens
  source 1..1656: mol_type = unassigned DNA
ccagctgtttggaactgagctactgcagaaagggaagtggagagtaagggccaggccccgtgggggcagatggccggcagaaggctgaatctgcgctgggcactgagtgtgctttgtgtgctgctaatggcggagacagtgtctgggactaggggctcgtctacaggagctcacattagcccccagtttccagcttcaggtgtgaaccagacccccgtggtagactgccgcaaggtgtgtggcctgaatgtctctgaccgctgtgacttcatccggaccaaccctgactgccacagtgatggggggtacctggactacctggaaggcatcttctgccacttccctcccagcctcctccctctggctgtcactctctacgtttcctggctgctctacctgtttctgattctgggagtcaccgcagccaagtttttctgccccaacttgtcggccatttctaccacactgaagctctcccacaacgtggcaggcgtcaccttcctggcatttgggaatggtgcacctgacatcttcagtgccctggtggccttctctgacccgcacacagccggcctggcccttggggcactgtttggttacctgggcttgtatgtgttctatgtggtcactgtgattctctgcacctggatctaccaacggcaacggagaggatctctgttctgccccatgccagttactccagagatcctctcagactccgaggaggaccgggtatcttctaataccaacagctatgactacggtgatgagtaccggccgctgttcttctaccaggagaccacggctcagatcctggtccgggccctcaatcccctggattacatgaagtggagaaggaaatcagcatactggaaagccctcaaggtgttcaagctgcctgtggagttcctgctgctcctcacagtccccgtcgtggacccggacaaggatgaccagaactggaaacggcccctcaactgtctgcatctggttatcagccccctggttgtggtcctgaccctgcagtcggggacctatggtgtctatgagataggcggcctcgttcccgtctgggtcgtggtggtgatcgcaggcacagccttggcttcagtgaccttttttgccacatctgacagccagccccccaggcttcactggctctttgctttcctgggctttctgaccagcgccctgtggatcaacgcggccgccacagaggtggtgaacatcttgcggtccctgggtgtggtcttccggctgagcaacactgtgctggggctcacgctgctggcctgggggaacagcattggagatgccttctcggatttcacactggctcgccagggctacccacggatggcgttctccgcctgctttggcggcatcatcttcaacatcctcgtgggtgtggggctgggctgcctgctccagatctcccgaagccacacagaagtgaagctggagccagacggactgctggtgtgggtcctggcaggcgccctggggctcagcctcgtcttctccctggtctcagtcccattgcagtgcttccagctcagcagagtctatggcttctgcctgctcctcttctacctgaacttccttgtcgtggccctcctcactgaatttggagtgattcacctgaaaagcatgtga

SEQ ID NO: 19799 - DNA, 1675 bp, Homo sapiens
  source 1..1675: mol_type = unassigned DNA
cggcgaccatccgagcgctgggcatcggcccacgcgtacagaaggcgctcaataaatgctcactagtgaatcagtaaaataaatcggcagcaaagagagacgagacgcatgctgatcttcaggtgttggggacatcagggacgcgaacatttattgagctcttattgtataccgcgtcggccagcatttgtgtccatttcacacatgaggaataagaggcccagagaggtgaagtgacttccttaaggccacacagatagtaagtggccgagacgaatttgaaaccaggggtgtcctgtttgaacttggtgccaaatagagtaactcggactccagttggaggggttcgggagaaccatagaagaggaagggccgtgtcttccgtggacaggccaccggagccgccagctgtttggaactgagctactgcagaaagggaagtggagagtaagggccaggccccgtgggggcagatggccggcagaaggctgaatctgcgctgggcactgagtgtgctttgtgtgctgctaatggcggagacagtgtctgggactaggggctcgtctacaggagctcacattagcccccagtttccagcttcaggtgtgaaccagacccccgtggtagactgccgcaaggtgtgtggcctgaatgtctctgaccgctgtgacttcatccggaccaaccctgactgccacagtgatggggggtacctggactacctggaaggcatcttctgccacttccctcccagcctcctccctctggctgtcactctctacgtttcctggctgctctacctgtttctgattctgggagtcaccgcagccaagtttttctgccccaacttgtcggccatttctaccacactgaagctctcccacaacgtggcaggcgtcaccttcctggcatttgggaatggtgcacctgacatcttcagtgccctggtggccttctctgacccgcacacagccggcctggcccttggggcactgtttggttacctgggcttgtatgtgttctatgtggtcactgtgattctctgcacctggatctaccaacggcaacggagaggatctctgttctgccccatgccagttactccagagatcctctcagactccgaggaggaccgggtatcttctaataccaacagctatgactacggtgatgagtaccggccgctgttcttctaccaggagaccacggctcagatcctggtccgggccctcaatcccctggattacatgaagtggagaaggaaatcagcatactggaaagccctcaaggtgttcaagctgcctgtggagttcctgctgctcctcacagtccccgtcgtggacccggacaaggatgaccagaactggaaacggcccctcaactgtctgcatctggttatcagccccctggttgtggtcctgaccctgcagtcggggacctatggtgtctatgagataggcggcctcgttcccgtctgggtcgtggtggtgatcgcaggcacagccttggcttcagtgaccttttttgccacatctgacagccagccccccaggcttcactgggtgaggaactgaggctgtgttcctgttggggctggccttggtcccacagcaaaccattccctccgcagctctttgctttcctgggctttctgaccagcgccctgtggatcaac

SEQ ID NO: 19800 - DNA, 549 bp, Homo sapiens
  source 1..549: mol_type = unassigned DNA
acccggactggcggcttcgctggcgcaaggtcggtccggcggccagggacctggaaggctgcgaggccctgcgaggtcgaggttcggagtttgctggtcccaggcccggcccgaggttacctgggcttgtatgtgttctatgtggtcactgtgattctctgcacctggatctaccaacggcaacggagaggatctctgttctgccccatgccagttactccagagatcctctcagactccgaggaggaccgggtatcttctaataccaacagctatgactacggtgatgagtaccggccgctgttcttctaccaggagaccacggctcagatcctggtccgggccctcaatcccctggattacatgaagtggagaaggaaatcagcatactggaaagccctcaaggtgttcaagctgcctgtggagttcctgctgctcctcacagtccccgtcgtggacccggacaaggatgaccagaactggaaacggcccctcaactgtctgcatctggttatcagccccctggttgtggtcctgaccctgcagtcg

SEQ ID NO: 19801 - DNA, 2053 bp, Homo sapiens
  source 1..2053: mol_type = unassigned DNA
gaagagtaggggcccggacgctgcagcaggcggggcacccggactggcggcttcgctggcgcaaggtcggtccggcggccagggacctggaaggctgcgaggccctgcgaggtcgaggttcggagtttgctggtcccaggcccggcccgaggtaagaaagagccgcctccccgcacggccggaggacccgggcgccccgagttcgacttctcagcctccgtccggacgggaaacggagcacggagatgttcctgaggtctctttcctgggaagcgcagccccgatttcccgcccctgtcccttagcaggtcggcgaccatccgagcgctgggcatcggcccacgcgtacagaaggcgctcaataaatgctcactagtgaatcagtaaaataaatcggcagcaaagagagacgagacgcatgctgatcttcaggtgttggggacatcagggacgcgaacatttattgagctcttattgtataccgcgtcggccagcatttgtgtccatttcacacatgaggaataagaggcccagagaggtgaagtgacttccttaaggccacacagatagtaagtggccgagacgaatttgaaaccaggggtgtcctgtttgaacttggtgccaaatagagtaactcggactccagttggaggggttcgggagaaccatagaagaggaagggccgtgtcttccgtggacaggccaccggagccgccagctgtttggaactgagctactgcagaaagggaagtggagagtaagggccaggccccgtgggggcagatggccggcagaaggctgaatctgcgctgggcactgagtgtgctttgtgtgctgctaatggcggagacagtgtctgggactaggggctcgtctacaggagctcacattagcccccagtttccagcttcagtgccgcaaggtgtgtggcctgaatgtctctgaccgctgtgacttcatccggaccaaccctgactgccacagtgatggggggtacctggactacctggaaggcatcttctgccacttccctcccagcctcctccctctggctgtcactctctacgtttcctggctgctctacctgtttctgattctgggagtcaccgcagccaagtttttctgccccaacttgtcggccatttctaccacactgaagctctcccacaacgtggcagtatccttttgtccagtgtcctgcaccctggagggagggcagttgtggggaggctgggagatagggtcatgtctatccccgtgtggggaagctgggggatagggtcgaaggcctgggtgggctgcagctgcgatcctggcccgccttgacatgctccccacatggcgtcaccttcctggcatttgggaatggtgcacctgacatcttcagtgccctggtggccttctctgacccgcacacagccggcctggcccttggggcactgtttggtgagagcagccccagtgaggggggcggggaaagcagcaggagagggtgcagggtggctgagctctggcctcctccccccaggcgctggcgtgctggttaccacagtggtggccggaggcattaccatcctacaccccttcatggctgcctccaggcccttcttcagggacatcgttttctacatggtggctgtgttcctgaccttcctcatgctcttccgtggcagggtcaccctggcatgggctctgggtgagcagctctggggctcaggcgtgagatcccagggctgatgggcaggaggtttaggaggtgcctgggacagagaggtgtgaggggtggtcagtgggggctttgatttgattacaagtgacagaaaccctcctcaagctggcttgagcaaaaatgggaacatgtgggtcacataaccaaagaggcctggcagagctgggggctggggagggagtattcaaaagtgtcacaattttttggccaagcgtgatggctcacacctatcatcccagcaatttgagaggctgaggcaggaggatcactttggttcaggagtttgagaccagcctgggcaacatagcgagactacatctctac

SEQ ID NO: 19802 - DNA, 925 bp, Homo sapiens
  source 1..925: mol_type = unassigned DNA
agagtaggggcccggacgctgcagcaggcggggcacccggactggcggcttcgctggcgcaaggtcggtccggcggccagggacctggaaggctgcgaggccctgcgaggtcgaggttcggagtttgctggtcccaggcccggcccgaggccaccggagccgccagctgtttggaactgagctactgcagaaagggaagtggagagtaagggccaggccccgtgggggcagatggccggcagaaggctgaatctgcgctgggcactgagtgtgctttgtgtgctgctaatggcggagacagtgtctgggactaggggctcgtctacaggagctcacattagcccccagtttccagcttcaggtgtgaaccagacccccgtggtagactgccgcaaggtgtgtggcctgaatgtctctgaccgctgtgacttcatccggaccaaccctgactgccacagtgatggggggtacctggactacctggaaggcatcttctgccacttccctcccagcctcctccctctggctgtcactctctacgtttcctggctgctctacctgtttctgattctgggagtcaccgcagccaagtttttctgccccaacttgtcggccatttctaccacactgaagctctcccacaacgtggcaggcgtcaccttcctggcatttgggaatggtgcacctgacatcttcagtgccctggtggccttctctgacccgcacacagccggcctggcccttggggcactgtttggcgctggcgtgctggttaccacagtggtggccggaggcattaccatcctacaccccttcatggctgcctccaggcccttcttcagggacatcgttttctacatggtggctgtgttcctgaccttcctcatgctcttccgtggcagggtcaccctggcatgggctctgg

SEQ ID NO: 19803 - DNA, 850 bp, Homo sapiens
  source 1..850: mol_type = unassigned DNA
tgcagcaggcggggcacccggactggcggcttcgctggcgcaaggtcggtccggcggccagggacctggaaggctgcgaggccctgcgaggtcgaggttcggagtttgctggtcccaggcccggcccgaggccaccggagccgccagctgtttggaactgagctactgcagaaagggaagtggagagtaagggccaggccccgtgggggcagatggccggcagaaggctgaatctgcgctgggcactgagtgtgctttgtgtgctgctaatggcggagacagtgtctgggactaggggctcgtctacaggagctcacattagcccccagtttccagcttcagtgccgcaaggtgtgtggcctgaatgtctctgaccgctgtgacttcatccggaccaaccctgactgccacagtgatggggggtacctggactacctggaaggcatcttctgccacttccctcccagcctcctccctctggctgtcactctctacgtttcctggctgctctacctgtttctgattctgggagtcaccgcagccaagtttttctgccccaacttgtcggccatttctaccacactgaagctctcccacaacgtggcaggcgtcaccttcctggcatttgggaatggtgcacctgacatcttcagtgccctggtggccttctctgacccgcacacagccggcctggcccttggggcactgtttggcgctggcgtgctggttaccacagtggtggccggaggcattaccatcctacaccccttcatggctgcctccaggcccttcttcagggacatcgttttctacatggtggctgtgttcctgaccttcctcatgctcttcc

SEQ ID NO: 19804 - DNA, 647 bp, Homo sapiens
  source 1..647: mol_type = unassigned DNA
ccagagaggtgaagtgacttccttaaggccacacagatagtaagtggccgagacgaatttgaaaccaggggtgtcctgtttgaacttggtgccaaatagagtaactcggactccagttggaggggttcgggagaaccatagaagaggaagggccgtgtcttccgtggacaggccaccggagccgccagctgtttggaactgagctactgcagaaagggaagtggagagtaagggccaggccccgtgggggcagatggccggcagaaggctgaatctgcgctgggcactgagtgtgctttgtgtgctgctaatggcggagacagtgtctgggactaggggctcgtctacaggagctcacattagcccccagtttccagcttcagtgccgcaaggtgtgtggcctgaatgtctctgaccgctgtgacttcatccggaccaaccctgactgccacagtgatggggggtacctggactacctggaaggcatcttctgccacttccctcccagcctcctccctctggctgtcactctctacgtttcctggctgctctacctgtttctgattctgggagtcaccgcagccaagtttttctgccccaacttgtcggccatttctaccacactgaagctctcccacaacgtggca

SEQ ID NO: 19805 - DNA, 996 bp, Homo sapiens
  source 1..996: mol_type = unassigned DNA
agcaggcggggcacccggactggcggcttcgctggcgcaaggtcggtccggcggccagggacctggaaggctgcgaggccctgcgaggtcgaggttcggagtttgctggtcccaggcccggcccgaggtcggcgaccatccgagcgctgggcatcggcccacgcgtacagaaggcgctcaataaatgctcactagtgaatcagtaaaataaatcggcagcaaagagagacgagacgcatgctgatcttcaggtgttggggacatcagggacgcgaacatttattgagctcttattgtataccgcgtcggccagcatttgtgtccatttcacacatgaggaataagaggcccagagaggtgaagtgacttccttaaggccacacagatagtaagtggccgagacgaatttgaaaccaggggtgtcctgtttgaacttggtgccaaatagagtaactcggactccagttggaggggttcgggagaaccatagaagaggaagggccgtgtcttccgtggacaggccaccggagccgccagctgtttggaactgagctactgcagaaagggaagtggagagtaagggccaggccccgtgggggcagatggccggcagaaggctgaatctgcgctgggcactgagtgtgctttgtgtgctgctaatggcggagacagtgtctgggactaggggctcgtctacaggagctcacattagcccccagtttccagcttcaggtgtgaaccagacccccgtggtagactgccgcaaggtgtgtggcctgaatgtctctgaccgctgtgacttcatccggaccaaccctgactgccacagtgatggggggtacctggactacctggaaggcatcttctgccacttccctcccagcctcctccctctggctgtcactctctacgtttcctggctgctctacctgtttctgattctgggagtcaccgcagccaagtttttctgccccaacttgtcggccatttctacca

SEQ ID NO: 19806 - DNA, 555 bp, Homo sapiens
  source 1..555: mol_type = unassigned DNA
aagacaagggaggagcagagccctagcaggatactaaatgggtctatgtgactttagggaccctctgcttttggactagcctggaacccaggttcagtcctgctgacctggcactggaagggaggcagggtgctggcacccacgagcaagccacagccaagcaggccaccggagccgccagctgtttggaactgagctactgcagaaagggaagtggagagtaagggccaggccccgtgggggcagatggccggcagaaggctgaatctgcgctgggcactgagtgtgctttgtgtgctgctaatggcggagacagtgtctgggactaggggctcgtctacaggagctcacattagcccccagtttccagcttcaggtgtgaaccagacccccgtggtagactgccgcaaggtgtgtggcctgaatgtctctgaccgctgtgacttcatccggaccaaccctgactgccacagtgatggggggtacctggactacctggaaggcatcttctgccacttccctcccagcctcctccctctggctgtcactctctac

SEQ ID NO: 19807 - DNA, 664 bp, Homo sapiens
  source 1..664: mol_type = unassigned DNA
aggatactaaatgggtctatgtgactttagggaccctctgcttttggactagcctggaacccaggttcagtcctgctgacctggcactggaagggaggcagggtgctggcacccacgagcaagccacagccaagcagactgatctcggctgggattacaggtgtgagccactgcgtctggccccaagtaactttttaacacagttcttcaactgcataccttcaatctaagaatggtgatatctaagcctcaccctagctaccagggtcaggccccttggggaaggaggacttcaaactcagcaattctggagttacttctcaagcagcagatgacctggggaaaagctgaccccggagtaggatgaccccggagcaggcttggagattgtgacacacagacactactgtgaacgcccctgtgctggcagcctggacatggggatgaacctggcctggtgctgcttcgaggtgctcccagcctgtgggggacatggaaaggtcggcgaccatccgagcgctgggcatcggcccacgcgtacagaaggcgctcaataaatgctcactagtgaatcagtaaaataaatcggcagcaaagagagacgagacgcatgctgatcttcaggtgttggggacatcagggacgcgaacatttattgagctct

SEQ ID NO: 19808 - DNA, 2975 bp, Homo sapiens
  source 1..2975: mol_type = unassigned DNA
cagcaggcggggcacccggactggcggcttcgctggcgcaaggtcggtccggcggccagggacctggaaggctgcgaggccctgcgaggtcgaggttcggagtttgctggtcccaggcccggcccgaggccaccggagccgccagctgtttggaactgagctactgcagaaagggaagtggagagtaagggccaggccccgtgggggcagatggccggcagaaggctgaatctgcgctgggcactgagtgtgctttgtgtgctgctaatggcggagacagtgtctgggactaggggctcgtctacaggagctcacattagcccccagtttccagcttcaggtgtgaaccagacccccgtggtagactgccgcaaggtgtgtggcctgaatgtctctgaccgctgtgacttcatccggaccaaccctgactgccacagtgatggggggtacctggactacctggaaggcatcttctgccacttccctcccagcctcctccctctggctgtcactctctacgtttcctggctgctctacctgtttctgattctgggagtcaccgcagccaagtttttctgccccaacttgtcggccatttctaccacactgaagctctcccacaacgtggcaggcgtcaccttcctggcatttgggaatggtgcacctgacatcttcagtgccctggtggccttctctgacccgcacacagccggcctggcccttggggcactgtttggcgctggcgtgctggttaccacagtggtggccggaggcattaccatcctacaccccttcatggctgcctccaggcccttcttcagggacatcgttttctacatggtggctgtgttcctgaccttcctcatgctcttccgtggcagggtcaccctggcatgggctctgggttacctgggcttgtatgtgttctatgtggtcactgtgattctctgcacctggatctaccaacggcaacggagaggatctctgttctgccccatgccagttactccagagatcctctcagactccgaggaggaccgggtatcttctaataccaacagctatgactacggtgatgagtaccggccgctgttcttctaccaggagaccacggctcagatcctggtccgggccctcaatcccctggattacatgaagtggagaaggaaatcagcatactggaaagccctcaaggtgttcaagctgcctgtggagttcctgctgctcctcacagtccccgtcgtggacccggacaaggatgaccagaactggaaacggcccctcaactgtctgcatctggttatcagccccctggttgtggtcctgaccctgcagtcggggacctatggtgtctatgagataggcggcctcgttcccgtctgggtcgtggtggtgatcgcaggcacagccttggcttcagtgaccttttttgccacatctgacagccagccccccaggcttcactggctctttgctttcctgggctttctgaccagcgccctgtggatcaacgcggccgccacagaggtggtgaacatcttgcggtccctgggtgtggtcttccggctgagcaacactgtgctggggctcacgctgctggcctgggggaacagcattggagatgccttctcggatttcacactggctcgccagggctacccacggatggcgttctccgcctgctttggcggcatcatcttcaacatcctcgtgggtgtggggctgggctgcctgctccagatctcccgaagccacacagaagtgaagctggagccagacggactgctggtgtgggtcctggcaggcgccctggggctcagcctcgtcttctccctggtctcagtcccattgcagtgcttccagctcagcagagtctatggcttctgcctgctcctcttctacctgaacttccttgtcgtggccctcctcactgaatttggagtgattcacctgaaaagcatgtgactgaagccgcttagtgctgtggcctcactgcaggcaggagccccgcccctcctgccgggggaggcccagggaccggagcatttctgcaaggcccttgtgggcacgagagtgcggcccttgctgctggagatctgaggtcactgctgtgagctgggagaactgctgtgtacctcttgctgccagcacccaacagccttgccgtggggaccttggaaacctggctttgctctggacaaagggttccagagagaagctagaagtcccccttgaatgacccccagagcccctctgagaagggctggagtttgggggaaggggatggctggatgtgctccaggccatgctggaggtacccccgaggcacaggcactgcccgttccccttgcctgggcttcaggccttctggcaccttctcaggacacaagtggctgcccaaccctgactcagagaatgagggtggcttggacccctgggaatcaggccgccgagggctgagctccagagccgcaccatctgccacaaacagaattcgagacatacttaattttgaatttctccttgccacgttaataaagccaaaagcagcgggtgctattcgtggcaacacacttcactgaacccacttgcttccaaaacgatgccagcccgaggcactgctacgccagcagctgccacatgggatggtggctcaggcgctccctccaggattctgcccctgcctgtccacagactcctttgtgctggaacctgggctcctccagctgccaggcaggagtcggtaggactgtgcctgtgcctccctcagcggggccctgggcggggttccaaggcctgcgagctgggaaaggacagatgaggggacctcgtgccttcttgctgtcatgcaatgaccccgccttatgttgccgaaataagcaactcttaggtttgcctgactgccttatgctggtaaagaaaagggattcaactgtctcttttccaaataaaaaaaaagtcaaaatttcaagtgt

SEQ ID NO: 19809 - DNA, 2584 bp, Homo sapiens
  source 1..2584: mol_type = unassigned DNA
gcaggcggcaatgtggggactcggggcccggggccccgaccgggggctgctgctggcgctggcgctgggcgggctggcgcgggccgggggcgtcgaggtggagcccggcggcgcgcacggcgagagcgggggcttccaggtggtcaccttcgagtgggcccacgtgcaggatccctacgtcatcgcgctctggatcctcgtggccagcttggccaagatcgggttccacctgtcccacaaggtcaccagcgtggttcccgagagcgccctgctcatcgtgctgggcctggtgctgggcggcatcgtctgggcggccgaccacatcgcgtccttcacactgacgcccaccgtcttcttcttctacctgctgccccccatcgtgctggacgccggctacttcatgcccaaccgcctcttcttcggcaacctggggaccatcctgttgtacgccgtcgtgggtaccgtgtggaacgcggccaccaccgggctgtccctctacggcgtcttcctcagtgggctcatgggcgacctgcagattgggctgctggacttcctcctgtttggcagcctcatggcggctgtggacccggtggccgtcctggccgtgtttgaggaggtccatgtcaacgaggtcctgttcatcatcgtcttcggggagtcgctgctgaacgacgcagtcaccgtggttctgtacaatgtgtttgaatctttcgtggcgctgggaggtgacaacgtgactggcgtggactgcgtgaagggcatagtgtccttcttcgtggtgagcctggggggcacgctggtgggggtggtcttcgccttcctgctgtcgctggtgacgcgcttcaccaagcatgtgcgtatcatcgagcccggcttcgtgttcatcatctcctacctgtcctacctgacgtccgagatgctgtcgctgtcggccatcctcgccatcaccttctgtggcatctgctgtcagaagtatgtgaaggccaacatctcggagcagtcggccaccaccgtgcgctacaccatgaagatgctggccagcagcgccgagaccatcatcttcatgttcctgggtatctcggccgtgaacccgttcatctggacctggaacacggccttcgtgctcctgacgctggtcttcatctccgtgtaccgggccatcggtgtggtcctgcagacctggcttctgaaccgctaccgcatggtgcagctggagcccattgaccaggtggtcctgtcctacgggggcctgcgcggggccgtggcctttgccctggtggtgcttctggatggagacaaggtcaaggagaagaacctgttcgtcagcaccaccatcatcgtagtgttcttcaccgtcatcttccagggcctgaccatcaagcctctggtgcagtggctgaaggtgaagaggagcgagcaccgggaacctcggctcaacgagaagctgcacgggcgcgctttcgaccacatcctctcggccatcgaggacatatccggacagatcgggcacaattatctcagagacaagtggtcccacttcgacaggaagttcctcagcagggtcctcatgagacggtcggcccagaagtctcgagaccggatcctgaatgtcttccacgagctgaacctgaaggatgccatcagctacgtggctgagggagagcgccgcgggtccctggccttcatccgctcccccagcaccgacaacgtggtcaacgtggacttcacgccacgatcgtccaccgtggaggcctctgtctcctacctcctgagagaaaatgtcagcgctgtctgcctggacatgcagtctctggagcagcgacggcggagcatccgggacgcggaggacatggtcacgcaccacacgctacagcagtacctgtacaagccgcggcaggagtacaagcatctgtacagccgacacgagctcacgcccacggaggacgagaaacaggaccgggaaatcttccacaggaccatgcggaagcgcctggagtccttcaagtcgaccaagctggggctcaaccagaacaagaaggcggccaagctgtacaagcgggagcgtgcccagaagcggagaaacagcagcatccccaatgggaagctgcccatggagagccctgcgcagaatttcaccatcaaggagaaagacttggaactttcagacaccgaggagccccccaactatgatgaggagatgagtggggggatcgagttcctggctagtgtcaccaaggacacagcgtccgactcccctgcaggaattgacaaccctgtgttttctccggacgaggccctggaccgcagcctcctggccaggctgccgccctggctgtctcccggggagacggtggtcccctcgcagagggcccgcacgcagattccctactctcccggcaccttctgccgcctgatgcccttccgcctcagcagcaagtccgtggactccttcctgcaggcagacggccccgaggagcggccccccgccgccctccccgagtccacacacatgtgacaccggctccgacacgccgctaaccggccgctcgtccccgcgccacggtccgcccaccgccgccgccgc

SEQ ID NO: 19810 - DNA, 2504 bp, Homo sapiens
  source 1..2504: mol_type = unassigned DNA
aggcggcaatgtggggactcggggcccggggccccgaccgggggctgctgctggcgctggcgctgggcgggctggcgcgggccgggggcgtcgaggtggagcccggcggcgcgcacggcgagagcgggggcttccaggtggtcaccttcgagtgggcccacgtgcaggatccctacgtcatcgcgctctggatcctcgtggccagcttggccaagatcgggttccacctgtcccacaaggtcaccagcgtggttcccgagagcgccctgctcatcgtgctgggcctggtgctgggcggcatcgtctgggcggccgaccacatcgcgtccttcacactgacgcccaccgtcttcttcttctacctgctgccccccatcgtgctggacgccggctacttcatgcccaaccgcctcttcttcggcaacctggggaccatcctgttgtacgccgtcgtgggtaccgtgtggaacgcggccaccaccgggctgtccctctacggcgtcttcctcagtgggctcatgggcgacctgcagattgggctgctggacttcctcctgtttggcagcctcatggcggctgtggacccggtggccgtcctggccgtgtttgaggaggtccatgtcaacgaggtcctgttcatcatcgtcttcggggagtcgctgctgaacgacgcagtcaccgtggttctgtacaatgtgtttgaatctttcgtggcgctgggaggtgacaacgtgactggcgtggactgcgtgaagggcatagtgtccttcttcgtggtgagcctggggggcacgctggtgggggtggtcttcgccttcctgctgtcgctggtgacgcgcttcaccaagcatgtgcgtatcatcgagcccggcttcgtgttcatcatctcctacctgtcctacctgacgtccgagatgctgtcgctgtcggccatcctcgccatcaccttctgtggcatctgctgtcagaagtatgtgaaggccaacatctcggagcagtcggccaccaccgtgcgctacaccatgaagatgctggccagcagcgccgagaccatcatcttcatgttcctgggtatctcggccgtgaacccgttcatctggacctggaacacggccttcgtgctcctgacgctggtcttcatctccgtgtaccgggccatcggtgtggtcctgcagacctggcttctgaaccgctaccgcatggtgcagctggagcccattgaccaggtggtcctgtcctacgggggcctgcgcggggccgtggcctttgccctggtggtgcttctggatggagacaaggtcaaggagaagaacctgttcgtcagcaccaccatcatcgtagtgttcttcaccgtcatcttccagtggctgaaggtgaagaggagcgagcaccgggaacctcggctcaacgagaagctgcacgggcgcgctttcgaccacatcctctcggccatcgaggacatatccggacagatcgggcacaattatctcagagacaagtggtcccacttcgacaggaagttcctcagcagggtcctcatgagacggtcggcccagaagtctcgagaccggatcctgaatgtcttccacgagctgaacctgaaggatgccatcagctacgtggctgagggagagcgccgcgggtccctggccttcatccgctcccccagcaccgacaacgtggtcaacgtggacttcacgccacgatcgtccaccgtggaggcctctgtctcctacctcctgagagaaaatgtcagcgctgtctgcctggacatgcagtctctggagcagcgacggcggagcatccgggacgcggaggacatggtcacgcaccacacgctacagcagtacctgtacaagccgcggcaggagtacaagcatctgtacagccgacacgagctcacgcccacggaggacgagaaacaggaccgggaaatcttccacaggaccatgcggaagcgcctggagtccttcaagtcgaccaagctggggctcaaccagaacaagaaggcggccaagctgtacaagcgggagcgtgcccagaagcggagaaacagcagcatccccaatgggaagctgcccatggagagccctgcgcagaatttcaccatcaaggagaaagacttggaactttcagacaccgaggagccccccaactatgatgaggagatgagtggggggatcgagttcctggctagtgtcaccaaggacacagcgtccgactcccctgcaggaattgacaaccctgtgttttctccggacgaggccctggaccgcagcctcctggccaggctgccgccctggctgtctcccggggagacggtggtcccctcgcagagggcccgcacgcagattccctactctcccggcaccttctgccgcctgatgcccttccgcctcagcagcaagtccgtggactccttcctgcaggcagacggccccgaggagcggccccccgccgccctccccgagtccacacacatgtgacaccggctccgacacgcc

SEQ ID NO: 19811 - DNA, 587 bp, Homo sapiens
  source 1..587: mol_type = unassigned DNA
tgccctggtggtgcttctggatggagacaaggtcaaggagaagaacctgttcgtcagcaccaccatcatcgtagtgttcttcaccgtcatcttccagggcctgaccatcaagcctctggtgcagtggctgaaggtgaagaggagcgagcaccgggaacctcggctcaacgagaagctgcacgggcgcgctttcgaccacatcctctcggccatcgaggacatatccggacagatcgggcacaattatctcagagacaagtggtcccacttcgacaggaagttcctcagcagggtcctcatgagacggtcggcccagaagtctcgagaccggatcctgaatgtcttccacgagctgaacctgaaggatgccatcagctacgtggctgaggtagcagagccgcttgctctgccgggtcggggctgcagcaggctctggcactggctgtgggtgccatggggcagtgaggagaggcccctgcacccgcgtcccaaggccaggcccaccccagcagttcacgggaggctgatgggccttctgatgccctgggaatcccaggggctctcgtggggtaaactgagtcacagag

SEQ ID NO: 19812 - DNA, 221 bp, Homo sapiens
  source 1..221: mol_type = unassigned DNA
gcaggcggcaatgtggggactcggggcccggggccccgaccgggggctgctgctggcgctggcgctgggcgggctggcgcgggccgggggcgtcgaggtggagcccggcggcgcgcacggcgagagcgggggcttccaggtggtcaccttcgagtgggcccacgtgcaggatccctacgtcatcgcgctctggatcctcgtggccagcttggccaagatcg

SEQ ID NO: 19813 - DNA, 219 bp, Homo sapiens
  source 1..219: mol_type = unassigned DNA
aggcggcaatgtggggactcggggcccggggccccgaccgggggctgctgctggcgctggcgctgggcgggctggcgcgggccgggggcgtcgaggtggagcccggcggcgcgcacggcgagagcgggggcttccaggtggtcaccttcgagtgggcccacgtgcaggatccctacgtcatcgcgctctggatcctcgtggccagcttggccaagatcg

SEQ ID NO: 19814 - DNA, 3627 bp, Homo sapiens
  source 1..3627: mol_type = unassigned DNA
aaaagagacagggctgctttaagagagaaacaggaagttgtaactagaagccatctgaatactaagccagggcagaatgcttgtgaagtagcaactaaagtggcagtgtttcttctgaaattctcaggcagtcagactgtcttaggcaaatcttgataaaatagcctttatccaggtttttatctaaggaatcccaagaagactggggaatggagagacagtcaagggttatgtcagaaaaggatgagtatcagtttcaacatcagggagcggtggagctgcttgtcttcaattttttgctcatccttaccattttgacaatctggttatttaaaaatcatcgattccgcttcttgcatgaaactggaggagcaatggtgtatggccttataatgggactaattttacgatatgctacagcaccaactgatattgaaagtggaactgtctatgactgtgtaaaactaactttcagtccatcaactctgctggttaatatcactgaccaagtttatgaatataaatacaaaagagaaataagtcagcacaacatcaatcctcatcaaggaaatgctatacttgaaaagatgacatttgatccagaaatcttcttcaatgttttactgccaccaattatatttcatgcaggatatagtctaaagaagagacacttttttcaaaacttaggatctattttaacgtatgccttcttgggaactgccatctcctgcatcgtcatagggttaattatgtatggttttgtgaaggctatgatacatgctggccagctgaaaaatggagactttcatttcactgactgtttattttttggttcactgatgtctgctacagatccagtgacagtgctggccattttccatgaactgcacgtcgaccctgacctgtacacactcttgtttggagagagtgtgttgaatgatgcagtggccatagtccttacatattctatatccatttacagtcccaaggagaatccaaatgcatttgatgccgcagcattcttccagtctgtggggaatttcctgggaatcttcgctggctcatttgcaatggggtctgcgtatgccatcatcacagcactgttgaccaaatttaccaagctgtgtgagttcccgatgctggaaaccggcctgtttttcctgctttcttggagtgccttcctgtctgccgaggctgccggcctaacagggatagttgctgttctcttctgtggagtcacacaagcacattatacctacaacaatctgtcttcggattccaaaataagaactaaacagttgtttgaatttatgaactttttggcggagaacgtcatcttctgttacatgggcctggcactgttcacgttccagaatcatatctttaatgctctttttatacttggagcctttctagcaatttttgttgccagagcctgcaacatatatcccctctccttcctcctgaatctaggccgaaaacagaagatcccctggaactttcagcacatgatgatgttttcaggtttgcgaggagcgatcgcatttgccttagctattcggaacacagaatctcagcccaaacaaatgatgtttaccactacgctgctcctcgtgttcttcactgtctgggtatttggaggaggaacaacccccatgttgacttggcttcagatcagagttggcgtggacctggatgaaaatctgaaggaggacccctcctcacaacaccaggaagcaaataacttggataaaaacatgacgaaagcagagagtgctcggctcttcagaatgtggtatagctttgaccacaagtatctgaaaccaattttaacccactctggtcctccgctgactacaacattacctgaatggtgtggtccgatttccaggctgcttaccagtcctcaagcctatggggaacagctaaaagaggatgatgtggaatgcattgtaaaccaggatgaactagccataaattaccaggagcaagcctcctcaccctgcagtcctcctgcaaggctaggtctggaccagaaagcttcaccccagacgccaggcaaggaaaacatttatgagggagacctcggcctgggaggctatgaactcaagcttgagcaaactttgggtcaatcccagttgaattaattggcatgaagagtacagatgtaatcacaagtaatgcaagactcactgaggaatacaagccaagctgatgaggcagtacaggggagaggctggaaaacatattaagagcataaattggagagaatcaaagccttgtcacatggatcctctggtgcctgaagaaatgagattttattatccctctctattatgcaaatgaatttagttttttgacagcagccattctgattactggattggctggggtggggatggaggtatcaggagtctagctgctggaggatgggacagctgtgctgggtcttcagggcatttctgctgcgaatgcggctctccaggcccttcacttctattctggattttattccctccattaaggagagtttaaaaataaaagaaagcttctgagagtaaacattttgctcctaagctgaagggaatgcccagctatttagtaagtgataagtttcttattttgaggacttgactcccatttgctctcagtgaccccagggcagagcccagagaagtgttccgtacccactgctgatggtttcccagagcccacactgagttgaagaacctattgttcttcttggcatccttcttatgctacttctcccatcgctcaaaggggttgcctatggctgggtgtgccctgccctaaatgcagcaccactttcaagcttagtaggaccattccaagaaaaccaggtttcttctccccataccacgttgtgcctgaagaacaagccttcccgtccttgcctgcatgtgagtcacttcttggctgtgcagcaggtccccccctccccgcgatatgctggagggtaggattctgcagcctgtgttgctctctacctggcagcagactgtgcaggagccccaacctgtcctccaattccagcattcacagctgatgagcagtgcaggagcagggcgagaggaacagagccaatgatgtgtgggttacactgaggagccaaggacagggcctcaggtctcccccttacaaggcgtggctcatggcctgcattccagagaccaacatgatagcttttaattcagctgcatgacctgtgccttttaagccataaagatacctcaagcctagcacctcttgaaatccagatgttcatattagactcgaaaaaataggctccaggcctaggtgcccaggctatgatgagtctgcttttgaaggaggtagggaatgacatcttccttggacccaaagcttaaaagtaatgtatgctttgctgaccactgtttgttaggccttaaacaacattcactgtggtggtatcaggcacactgctatgtgcatcaattatttttttgctttccaaacagaatctctggggcacaagttttacactcaagctaagtataactttgtcatttcaggtaaatatgacaagtggtggagcatgaagttttctaatttgacttaatcctaataaatttttgttacaaagta

SEQ ID NO: 19815 - DNA, 569 bp, Homo sapiens
  source 1..569: mol_type = unassigned DNA
aaattgcgtctatcctgtcctgagtcatcgtgccttctatgaagtgatgacagaaagaatataccactctgttaattatgtatggttttgtgaaggctatgatacatgctggccagctgaaaaatggagactttcatttcactgactgtttattttttggttcactgatgtctgctacagatccagtgacagtgctggccattttccatgaactgcacgtcgaccctgacctgtacacactcttgtttggagagagtgtgttgaatgatgcagtggccatagtccttacatattctatatccatttacagtcccaaggagaatccaaatgcatttgatgccgcagcattcttccagtctgtggggaatttcctgggaatcttcgctggctcatttgcaatggggtctgcgtatgccatcatcacagcactgttgaccaaatttaccaagctgtgtgagttcccgatgctggaaaccggcctgtttttcctgctttcttggagtgccttcctgtctgccgaggctgccggcctaacagggatagttgctgttctcttctgtggagtcaca

SEQ ID NO: 19816 - DNA, 591 bp, Homo sapiens
  source 1..591: mol_type = unassigned DNA
gaagccatctgaatactaagccagggcagaatgcttgtgaagtagcaactaaagtggcagtgtttcttctgaaattctcaggcagtcagactgtcttaggcaaatcttgataaaatagcctttatccaggtttttatctaaggaatcccaagaagactggggaatggagagacagtcaagggttatgtcagaaaaggatgagtatcagtttcaacatcagggagcggtggagctgcttgtcttcaattttttgctcatccttaccattttgacaatctggttatttaaaaatcatcgattccgcttcttgcatgaaactggaggagcaatggtgtatgatgacatttgatccagaaatcttcttcaatgttttactgccaccaattatatttcatgcaggatatagtctaaagaagagacacttttttcaaaacttaggatctattttaacgtatgccttcttgggaactgccatctcctgcatcgtcatagggttaattatgtatggttttgtgaaggctatgatacatgctggccagctgaaaaatggagactttcatttcactgactgtttattttttggttcactga

SEQ ID NO: 19817 - DNA, 579 bp, Homo sapiens
  source 1..579: mol_type = unassigned DNA
agaatgcttgtgaagtagcaactaaagtggcagtgtttcttctgaaattctcaggcagtcagactgtcttaggcaaatcttgataaaatagcctttatccaggtttttatctaaggaatcccaagaagactggggaatggagagacagtcaagggttatgtcagaaaaggatgagtatcagtttcaacatcagggagcggtggagctgcttgtcttcaattttttgctcatccttaccattttgacaatctggttatttaaaaatcatcgattccgcttcttgcatgaaactggaggagcaatggtgtatggccttataatgggactaattttacgatatgctacagcaccaactgatattgaaagtggaactgtctatgactgtgtaaaactaactttcagtccatcaactctgctggttaatatcactgaccaagtttatgaatataaatacaaaagagaaataagtcagcacaacatcaatcctcatcaaggaaatgctatacttgaaaagagacacttttttcaaaacttaggatctattttaacgtatgccttcttgggaactgccatctcctg

SEQ ID NO: 19818 - DNA, 712 bp, Homo sapiens
  source 1..712: mol_type = unassigned DNA
taagccagggcagaatgcttgtgaagtagcaactaaagtggcagtgtttcttctgaaattctcaggcagtcagactgtcttaggcaaatcttgataaaatagcctttatccaggtttttatctaaggaatcccaagaagactggggaatggagagacagtcaagggttatgtcagaaaaggatgagtatcagtttcaacatcagggagcggtggagctgcttgtcttcaattttttgctcatccttaccattttgacaatctggttatttaaaaatcatcgattccgcttcttgcatgaaactggaggagcaatggtgtatgacaagccgccgaaatttgccatgtcacgagagcaaatgtcacagtcatgttctcacacggcacataatgcaagtctgttgacagatgcgggtccattgtcatgtggggagtcgagggcgagctgtttgtttttgtaatgatgttgggaagtgatggctctgcagtcacaaagagcagccttctctcactggctgcaccgatgaacattacgaagttctagaaaaaacatcacttcaaaatgcctggagtaattcctcttatatcaactaatttcaagaagaaaacttgcagaaactaaccccacccctcttaagagaatattgtgtccaagtcctttttatttatacgaacagtgtcttattttcttataataaaaagttataaataaac

SEQ ID NO: 19819 - DNA, 582 bp, Homo sapiens
  source 1..582: mol_type = unassigned DNA
attagacctctgcagactgtagactttcaactgcagactgggaggttactaagtccttagcagctgagtacagaacacgatggaaatgaaaacatggtacaacagaggttacagccctctcctgacctgataaacttcatgatggagctaaagatggtttgggaagtttctttgaatcacaagcagaactgtatgtgctgtctcctcctgtctggatctactcactacttgctaaagagaagaattttggtttgggataaatttatgtggatcttcgctttggtgccataaaggtggtatcagcctgaccataaaggacccccgatgggtgggtgcctggtggctgggtttcctcatcgctgccggtgcagtggccctggctgccatcccctacttcttcttccccaaggaaatgcccaaggaaaaacgtgagcttcagtttcggcgaaaggtcttagcagtcacagactcacctgccaggaagggcaaggactctccctctaagcagagccctggggagtccacgaagaagcaggatggcctagtccagattgcaccaaacctgactgtgatccagttcat

SEQ ID NO: 19820 - DNA, 578 bp, Homo sapiens
  source 1..578: mol_type = unassigned DNA
aactgcagactgggaggttactaagtccttagcagctgagtacagaacacgatggaaatgaaaacatggtacaacagaggttacagccctctcctgacctgataaacttcatgatggagctaaagatggtttgggaagtttctttgaatcacaagcagaactgtatgtgctgtctcctcctgtctggatctactcactacttgctaaagagaagaattttggtttgggataaatttatgtggatcttcgctttggtgccataaagggccagcgggtgaggtaccccaggtaccagacaaggaaaccaaagccacaatgggcacagaaaacacacctggaggcaaagccagcccagaccctcaggacgtgcggccaagtgtgttccataacatcaagctgttcgttctgtgccacagcctgctgcagctggcgcagctcatgatctccggctacctaaagagctccatctccacagtggagaagcgcttcggcctctccagccagacgtcggggctgctggcctccttcaacgaggtggggaacacagccttgattgtgtttgtgagctattttggcag

SEQ ID NO: 19821 - DNA, 4494 bp, Homo sapiens
  source 1..4494: mol_type = unassigned DNA
aaaaggacaggctgaggctgagcctcagggaggcggggtgcagcttcctcttcacagagaggctggacttgaacaaacccagccttctatacaaccgtggagccagggcaagggagagacagaaggagcaagtgacccagggagacaaacacttggagatacttggggctgagtttgagcaagactccctaacctgtgtctggacaagtctgatgtcctgtgtggcccaagaagaactgaccccgtgtctggagctcccaccgttattgcatccctgctgtggctcacctgctgctgtctccaggagcccctgagaagatttgcttcctctcccctgctaagctccaggtcctgagattaaattaggggctggagctcactgcactccagcagtcatgggacccaggatagggccagcgggtgaggtaccccaggtaccagacaaggaaaccaaagccacaatgggcacagaaaacacacctggaggcaaagccagcccagaccctcaggacgtgcggccaagtgtgttccataacatcaagctgttcgttctgtgccacagcctgctgcagctggcgcagctcatgatctccggctacctaaagagctccatctccacagtggagaagcgcttcggcctctccagccagacgtcggggctgctggcctccttcaacgaggtggggaacacagccttgattgtgtttgtgagctattttggcagccgggtgcaccgaccccgaatgattggctatggggctatccttgtggccctggcgggcctgctcatgactctcccgcacttcatctcggagccataccgctacgacaacaccagccctgaggatatgccacaggacttcaaggcttccctgtgcctgcccacaacctcggccccagcctcggccccctccaatggcaactgctcaagctacacagaaacccagcatctgagtgtggtggggatcatgttcgtggcacagaccctgctgggcgtgggcggggtgcccattcagccctttggcatctcctacatcgatgactttgcccacaacagcaactcgcccctctacctcgggatcctgtttgcagtgaccatgatggggccaggcctggcctttgggctgggcagcctcatgctgcgcctttatgtggacattaaccagatgccagaaggtggtatcagcctgaccataaaggacccccgatgggtgggtgcctggtggctgggtttcctcatcgctgccggtgcagtggccctggctgccatcccctacttcttcttccccaaggaaatgcccaaggaaaaacgtgagcttcagtttcggcgaaaggtcttagcagtcacagactcacctgccaggaagggcaaggactctccctctaagcagagccctggggagtccacgaagaagcaggatggcctagtccagattgcaccaaacctgactgtgatccagttcattaaagtcttccccagggtgctgctgcagaccctacgccaccccatcttcctgctggtggtcctgtcccaggtatgcttgtcatccatggctgcgggcatggccaccttcctgcccaagttcctggagcgccagttttccatcacagcctcctacgccaacctgctcatcggctgcctctccttcccttcggtcatcgtgggcatcgtggtgggtggcgtcctggtcaagcggctccacctgggccctgtgggatgcggtgccctttgcctgctggggatgctgctgtgcctcttcttcagcctgccgctcttctttatcggctgctccagccaccagattgcgggcatcacacaccagaccagtgcccaccctgggctggagctgtctccaagctgcatggaggcctgctcctgcccattggacggctttaaccctgtctgcgaccccagcactcgtgtggaatacatcacaccctgccacgcaggctgctcaagctgggtggtccaggatgctctggacaacagccaggttttctacaccaactgcagctgcgtggtggagggcaaccccgtgctggcaggatcctgcgactcaacgtgcagccatctggtggtgcccttcctgctcctggtcagcctgggctcggccctggcctgtctcacccacacaccctccttcatgctcatcctaagaggagtgaagaaagaagacaagactttggctgtgggcatccagttcatgttcctgaggattttggcctggatgcccagccccgtgatccacggcagcgccatcgacaccacctgtgtgcactgggccctgagctgtgggcgtcgagctgtctgtcgctactacaataatgacctgctccgaaaccggttcatcggcctccagttcttcttcaaaacaggttctgtgatctgcttcgccttagttttggctgtcctgaggcagcaggacaaagaggcaaggaccaaagagagcagatccagccctgccgtagagcagcaattgctagtgtcggggccagggaagaagccagaggattcccgagtgtgagctgtcttggggccccacctggccaagagtagcagccacagcagtacctcctctgagtcctttgcccaagattgggtgtcaagagccctgtgttccattctggctcctccactaaattgctgtgtgacttcaggcaagacattgatcctctctcagcctttgcttgctagtctgaaccaaagagttgtttgggcatttgctgtgttggccatttctggagcaagagggtcttcttcctccttcccccagccagccagctgtcctggggccaggctttcctgggtggaaagaagtatacctttccctggggccctaggatagcaaagtgagccatagtgggccaggctgccctccatgctgggccccagcccaggtctgcactcgcctggatcaccttctttgagccttagccatctcctgtcaggtaggaatgaacttgccagccttcaggctcgttcagctatgaccatctgtgcggtcagggtacactcagctctcctccccaactccagcagcctttaagaagtgtccctttggcgccccctggaggcagagcactgagctggaccctgggtagactcccacagggaggacggagctggcctcaggagtgggacacccagacttggcagggccttcaagaggcctgtgtgggggccccaggaatccttagctgaagcggggagactcactctccatctcaggaaattctagcccttgccctcagggagccacggttgagggtgaggcccaacacctgccttagggccctgggtgggcaagtctgggccctggggtagggagggagactcaggcccacacttgggtattttctaatttcagacaaacacacactcagcgcgcactcactgattcctacacattgccaagatttcacacatgtgaccaggggccaccaaagtccctgtgacctttgtgactaggatcctaatttctctattttctcctgggtgcctgggtctgtgtcacctggggcagtgtggataatgtttagttctgtgacactgttttttgggggtggcacctggttctccgatgcctgggctggtgtcaggcccaggactgtagtgctgggagcagtaaagctcagctctgtgtaatgagtgatgctatggcttgctcgtgtcttatgatccaatccttttctacatcagcccttgttttgttttatggctagtcttatctggcctggttatttccttgcggggaggagagggtttgctaatctgctcccagcccaacctattaccaccccacctcgctgggacctactgctcgggaggcagcagacagggagccaccagcagtggcttcctggccctgtgctgggggtggggggaagctgggggcacatgtggcccttgccttctgagcagctcccagtgccagggctttgagactttcccacatgataaaagaaaagggaggtacagaagttccaattccctttttattttgctggttggtatctgtaaatgtttaataaatatctgagcatgtatctatcaacgccaagaatttcaaagtctccttcaacaatatgaggcttttaggatgtttatattccttcatccctcttgtttcccaggttttgcagggaaaaaaagtctggaattatagatacagcttattattaaatttgttcttgcataatgtctcttctattacaaaaattctttcttcataaactgcattagaggtttgcaacaaccacatcatttccattaacttagatttaggttttactggattcattgctcaccattattgcttgtatattacatcttttccaatctttatattctggtctaatttttgtttgagtgtcttcgtctactaatggtttcaaaaatggaataaggtcatgaggatttctgaatcctcacctgtccaaattgtcattcacattttatagaagaggaaactggctcagaaagcacaagtgact

SEQ ID NO: 19822 - DNA, 2593 bp, Homo sapiens
  source 1..2593: mol_type = unassigned DNA
aaacccagccttctatacaaccgtggagccagggcaagggagagacagaaggagcaagtgacccagggagacaaacacttggagatacttggggctgagtttgagcaagactccctaacctgtgtctggacaagtctgatgtcctgtgtggcccaagaagaactgaccccgtgtctggagctcccaccgttattgcatccctgctgtggctcacctgctgctgtctccaggagcccctgagaagatttgcttcctctcccctgctaagctccaggtcctgagattaaattaggggctggagctcactgcactccagcagtcatgggacccaggataggtggggaacacagccttgattgtgtttgtgagctattttggcagccgggtgcaccgaccccgaatgattggctatggggctatccttgtggccctggcgggcctgctcatgactctcccgcacttcatctcggagccataccgctacgacaacaccagccctgaggatatgccacaggacttcaaggcttccctgtgcctgcccacaacctcggccccagcctcggccccctccaatggcaactgctcaagctacacagaaacccagcatctgagtgtggtggggatcatgttcgtggcacagaccctgctgggcgtgggcggggtgcccattcagccctttggcatctcctacatcgatgactttgcccacaacagcaactcgcccctctacctcgggatcctgtttgcagtgaccatgatggggccaggcctggcctttgggctgggcagcctcatgctgcgcctttatgtggacattaaccagatgccagaaggtggtatcagcctgaccataaaggacccccgatgggtgggtgcctggtggctgggtttcctcatcgctgccggtgcagtggccctggctgccatcccctacttcttcttccccaaggaaatgcccaaggaaaaacgtgagcttcagtttcggcgaaaggtcttagcagtcacagactcacctgccaggaagggcaaggactctccctctaagcagagccctggggagtccacgaagaagcaggatggcctagtccagattgcaccaaacctgactgtgatccagttcattaaagtcttccccagggtgctgctgcagaccctacgccaccccatcttcctgctggtggtcctgtcccaggtatgcttgtcatccatggctgcgggcatggccaccttcctgcccaagttcctggagcgccagttttccatcacagcctcctacgccaacctgctcatcggctgcctctccttcccttcggtcatcgtgggcatcgtggtgggtggcgtcctggtcaagcggctccacctgggccctgtgggatgcggtgccctttgcctgctggggatgctgctgtgcctcttcttcagcctgccgctcttctttatcggctgctccagccaccagattgcgggcatcacacaccagaccagtgcccaccctgggctggagctgtctccaagctgcatggaggcctgctcctgcccattggacggctttaaccctgtctgcgaccccagcactcgtgtggaatacatcacaccctgccacgcaggctgctcaagctgggtggtccaggatgctctggacaacagccaggttttctacaccaactgcagctgcgtggtggagggcaaccccgtgctggcaggatcctgcgactcaacgtgcagccatctggtggtgcccttcctgctcctggtcagcctgggctcggccctggcctgtctcacccacacaccctccttcatgctcatcctaagaggagtgaagaaagaagacaagactttggctgtgggcatccagttcatgttcctgaggattttggcctggatgcccagccccgtgatccacggcagcgccatcgacaccacctgtgtgcactgggccctgagctgtgggcgtcgagctgtctgtcgctactacaataatgacctgctccgaaaccggttcatcggcctccagttcttcttcaaaacaggttctgtgatctgcttcgccttagttttggctgtcctgaggcagcaggacaaagaggcaaggaccaaagagagcagatccagccctgccgtagagcagcaattgctagtgtcggggccagggaagaagccagaggattcccgagtgtgagctgtcttggggccccacctggccaagagtagcagccacagcagtacctcctctgagtcctttgcccaagattgggtgtcaagagccctgtgttccattctggctcctccactaaattgctgtgtgacttcaggcaagacattgatcctctctcagcctttgcttgctagtctgaaccaaagagttgtttgggcatttgctgtgttggccatttctggagcaagagggtcttcttcctccttcccccagccagccagctgtcctggggccaggctttcctgggtggaaagaagtatacctttccctggggccctaggatagcaaagtgagccatagtgggccaggctgccctccatgctgggccccagcccaggtctgcactcgcctggatcaccttctttgagccttagc

SEQ ID NO: 19823 - DNA, 1720 bp, Homo sapiens
  source 1..1720: mol_type = unassigned DNA
cttctatacaaccgtggagccagggcaagggagagacagaaggagcaagtgacccagggagacaaacacttggagatacttggggctgagtttgagcaagactccctaacctgtgtctggacaagtctgatgtcctgtgtggcccaagaagaactgaccccgtgtctggagctcccaccgttattgcatccctgctgtggctcacctgctgctgtctccaggagcccctgagaagatttgcttcctctcccctgctaagctccaggtcctgagattaaattaggggctggagctcactgcactccagcagtcatgggacccaggataggtggtatcagcctgaccataaaggacccccgatgggtgggtgcctggtggctgggtttcctcatcgctgccggtgcagtggccctggctgccatcccctacttcttcttccccaaggaaatgcccaaggaaaaacgtgagcttcagtttcggcgaaaggtcttagcagtcacagactcacctgccaggaagggcaaggactctccctctaagcagagccctggggagtccacgaagaagcaggatggcctagtccagattgcaccaaacctgactgtgatccagttcattaaagtcttccccagggtgctgctgcagaccctacgccaccccatcttcctgctggtggtcctgtcccaggtatgcttgtcatccatggctgcgggcatggccaccttcctgcccaagttcctggagcgccagttttccatcacagcctcctacgccaacctgctcatcggctgcctctccttcccttcggtcatcgtgggcatcgtggtgggtggcgtcctggtcaagcggctccacctgggccctgtgggatgcggtgccctttgcctgctggggatgctgctgtgcctcttcttcagcctgccgctcttctttatcggctgctccagccaccagattgcgggcatcacacaccagaccagtgcccaccctgggctggagctgtctccaagctgcatggaggcctgctcctgcccattggacggctttaaccctgtctgcgaccccagcactcgtgtggaatacatcacaccctgccacgcaggctgctcaagctgggtggtccaggatgctctggacaacagccaggttttctacaccaactgcagctgcgtggtggagggcaaccccgtgctggcaggatcctgcgactcaacgtgcagccatctggtggtgcccttcctgctcctggtcagcctgggctcggccctggcctgtctcacccacacaccctccttcatgctcatcctaagaggagtgaagaaagaagacaagactttggctgtgggcatccagttcatgttcctgaggattttgggtaaagatcttgcttgggaccattggtggtggtgatggggtccagatgcccactgtgtgccaggcctggggcacaggcatgagcggaattcaatccctgatcttagggctcacaagctcatggggtgacagacctggcccagctctcctagagcggggtatagaggcagagtctagacagcccgtcaggaagccacctcggatgcaggggtggggcgggcttgagggccagacagccaagaggccccagtaacccagagcccctgaggggttgtacatgccagggagggggcagggtaggacggtgggccttcattgtcccctgagcaccacctccctcagcctg

SEQ ID NO: 19824 - DNA, 588 bp, Homo sapiens
  source 1..588: mol_type = unassigned DNA
aaccgtggagccagggcaagggagagacagaaggagcaagtgacccagggagacaaacacttggagatacttggggctgagtttgagcaagactccctaacctgtgtctggacaagtctgatgtcctgtgtggcccaagaagaactgaccccgtgtctggagctcccaccgttattgcatccctgctgtggctcacctgctgctgtctccaggagcccctgagaagatttgcttcctctcccctgctaagctccaggtcctgagattaaattaggggctggagctcactgcactccagcagtcatgggacccaggatagggccagcgggtgaggtaccccaggtaccagacaaggaaaccaaagccacaatgggcacagaaaacacacctggaggcaaagccagcccagaccctcaggacgtgcggccaagtgtgttccataacatcaaggtacctctcagggcctggcaggggcctccgagtctagaagagcaggctctgccacgtgctggtggtgtaatgccaaggaagactttctctgagcctcggtttcctcatctatagaatgtgtggctgtgaggatcaaag

SEQ ID NO: 19825 - DNA, 2121 bp, Homo sapiens
  source 1..2121: mol_type = unassigned DNA
caagtgacccagggagacaaacacttggagatacttggggctgagtttgagcaagactccctaacctgtgtctggacaagtctgatgtcctgtgtggcccaagaagaactgaccccgtgtctggagctcccaccgttattgcatccctgctgtggctcacctgctgctgtctccaggagcccctgagaagatttgcttcctctcccctgctaagctccaggtcctgagattaaattaggggctggagctcactgcactccagcagtcatgggacccaggatagaggatatgccacaggacttcaaggcttccctgtgcctgcccacaacctcggccccagcctcggccccctccaatggcaactgctcaagctacacagaaacccagcatctgagtgtggtggggatcatgttcgtggcacagaccctgctgggcgtgggcggggtgcccattcagccctttggcatctcctacatcgatgactttgcccacaacagcaactcgcccctctacctcgggatcctgtttgcagtgaccatgatggggccaggcctggcctttgggctgggcagcctcatgctgcgcctttatgtggacattaaccagatgccagaaggtggtatcagcctgaccataaaggacccccgatgggtgggtgcctggtggctgggtttcctcatcgctgccggtgcagtggccctggctgccatcccctacttcttcttccccaaggaaatgcccaaggaaaaacgtgagcttcagtttcggcgaaaggtcttagcagtcacagactcacctgccaggaagggcaaggactctccctctaagcagagccctggggagtccacgaagaagcaggatggcctagtccagattgcaccaaacctgactgtgatccagttcattaaagtcttccccagggtgctgctgcagaccctacgccaccccatcttcctgctggtggtcctgtcccaggtatgcttgtcatccatggctgcgggcatggccaccttcctgcccaagttcctggagcgccagttttccatcacagcctcctacgccaacctgctcatcggctgcctctccttcccttcggtcatcgtgggcatcgtggtgggtggcgtcctggtcaagcggctccacctgggccctgtgggatgcggtgccctttgcctgctggggatgctgctgtgcctcttcttcagcctgccgctcttctttatcggctgctccagccaccagattgcgggcatcacacaccagaccagtgcccaccctgggctggagctgtctccaagctgcatggaggcctgctcctgcccattggacggctttaaccctgtctgcgaccccagcactcgtgtggaatacatcacaccctgccacgcaggctgctcaagctgggtggtccaggatgctctggacaacagccaggttttctacaccaactgcagctgcgtggtggagggcaaccccgtgctggcaggatcctgcgactcaacgtgcagccatctggtggtgcccttcctgctcctggtcagcctgggctcggccctggcctgtctcacccacacaccctccttcatgctcatcctaagaggagtgaagaaagaagacaagactttggctgtgggcatccagttcatgttcctgaggattttggcctggatgcccagccccgtgatccacggcagcgccatcgacaccacctgtgtgcactgggccctgagctgtgggcgtcgagctgtctgtcgctactacaataatgacctgctccgaaaccggttcatcggcctccagttcttcttcaaaacaggttctgtgatctgcttcgccttagttttggctgtcctgaggcagcaggacaaagaggcaaggaccaaagagagcagatccagccctgccgtagagcagcaattgctagtgtcggggccagggaagaagccagaggattcccgagtgtgagctgtcttggggccccacctggccaagagtagcagccacagcagtacctcctctgagtcctttgcccaagattgggtgtcaagagccctgtgttccattctggctcctccactaaattgctgtgtgacttcaggcaagacattgatcctctctcag

SEQ ID NO: 19826 - DNA, 3219 bp, Homo sapiens
  source 1..3219: mol_type = unassigned DNA
ccaagaagaactgaccccgtgtctggagctcccaccgttattgcatccctgctgtggctcacctgctgctgtctccaggagcccctgagaagatttgcttcctctcccctgctaagctccaggtcctgagattaaattaggggctggagctcactgcactccagcagtcatgggacccaggataggtggggaacacagccttgattgtgtttgtgagctattttggcagccgggtgcaccgaccccgaatgattggctatggggctatccttgtggccctggcgggcctgctcatgactctcccgcacttcatctcggagccataccgctacgacaacaccagccctggtggtatcagcctgaccataaaggacccccgatgggtgggtgcctggtggctgggtttcctcatcgctgccggtgcagtggccctggctgccatcccctacttcttcttccccaaggaaatgcccaaggaaaaacgtgagcttcagtttcggcgaaaggtcttagcagtcacagactcacctgccaggaagggcaaggactctccctctaagcagagccctggggagtccacgaagaagcaggatggcctagtccagattgcaccaaacctgactgtgatccagttcattaaagtcttccccagggtgctgctgcagaccctacgccaccccatcttcctgctggtggtcctgtcccaggtatgcttgtcatccatggctgcgggcatggccaccttcctgcccaagttcctggagcgccagttttccatcacagcctcctacgccaacctgctcatcggctgcctctccttcccttcggtcatcgtgggcatcgtggtgggtggcgtcctggtcaagcggctccacctgggccctgtgggatgcggtgccctttgcctgctggggatgctgctgtgcctcttcttcagcctgccgctcttctttatcggctgctccagccaccagattgcgggcatcacacaccagaccagtgcccaccctgggctggagctgtctccaagctgcatggaggcctgctcctgcccattggacggctttaaccctgtctgcgaccccagcactcgtgtggaatacatcacaccctgccacgcaggctgctcaagctgggtggtccaggatgctctggacaacagccaggttttctacaccaactgcagctgcgtggtggagggcaaccccgtgctggcaggatcctgcgactcaacgtgcagccatctggtggtgcccttcctgctcctggtcagcctgggctcggccctggcctgtctcacccacacaccctccttcatgctcatcctaagaggagtgaagaaagaagacaagactttggctgtgggcatccagttcatgttcctgaggattttggcctggatgcccagccccgtgatccacggcagcgccatcgacaccacctgtgtgcactgggccctgagctgtgggcgtcgagctgtctgtcgctactacaataatgacctgctccgaaaccggttcatcggcctccagttcttcttcaaaacaggttctgtgatctgcttcgccttagttttggctgtcctgaggcagcaggacaaagaggcaaggaccaaagagagcagatccagccctgccgtagagcagcaattgctagtgtcggggccagggaagaagccagaggattcccgagtgtgagctgtcttggggccccacctggccaagagtagcagccacagcagtacctcctctgagtcctttgcccaagattgggtgtcaagagccctgtgttccattctggctcctccactaaattgctgtgtgacttcaggcaagacattgatcctctctcagcctttgcttgctagtctgaaccaaagagttgtttgggcatttgctgtgttggccatttctggagcaagagggtcttcttcctccttcccccagccagccagctgtcctggggccaggctttcctgggtggaaagaagtatacctttccctggggccctaggatagcaaagtgagccatagtgggccaggctgccctccatgctgggccccagcccaggtctgcactcgcctggatcaccttctttgagccttagccatctcctgtcaggtaggaatgaacttgccagccttcaggctcgttcagctatgaccatctgtgcggtcagggtacactcagctctcctccccaactccagcagcctttaagaagtgtccctttggcgccccctggaggcagagcactgagctggaccctgggtagactcccacagggaggacggagctggcctcaggagtgggacacccagacttggcagggccttcaagaggcctgtgtgggggccccaggaatccttagctgaagcggggagactcactctccatctcaggaaattctagcccttgccctcagggagccacggttgagggtgaggcccaacacctgccttagggccctgggtgggcaagtctgggccctggggtagggagggagactcaggcccacacttgggtattttctaatttcagacaaacacacactcagcgcgcactcactgattcctacacattgccaagatttcacacatgtgaccaggggccaccaaagtccctgtgacctttgtgactaggatcctaatttctctattttctcctgggtgcctgggtctgtgtcacctggggcagtgtggataatgtttagttctgtgacactgttttttgggggtggcacctggttctccgatgcctgggctggtgtcaggcccaggactgtagtgctgggagcagtaaagctcagctctgtgtaatgagtgatgctatggcttgctcgtgtcttatgatccaatccttttctacatcagcccttgttttgttttatggctagtcttatctggcctggttatttccttgcggggaggagagggtttgctaatctgctcccagcccaacctattaccaccccacctcgctgggacctactgctcgggaggcagcagacagggagccaccagcagtggcttcctggccctgtgctgggggtggggggaagctgggggcacatgtggcccttgccttctgagcagctcccagtgccagggctttgagactttcccacatgataaaagaaaagggaggtacagaagttccaattccctttttattttgctggttggtatctgtaaatgtttaataaatatctgagcatgta

SEQ ID NO: 19827 - DNA, 224 bp, Homo sapiens
  source 1..224: mol_type = unassigned DNA
aacgaagaggcacacaggaggtcggagaacacaatatcaacagggccagcgggtgaggtaccccaggtaccagacaaggaaaccaaagccacaatgggcacagaaaacacacctggaggcaaagccagcccagaccctcaggacgtgcggccaagtgtgttccataacatcaagctgttcgttctgtgccacagcctgctgcagctggcgcagctcatgatctc

SEQ ID NO: 19828 - DNA, 373 bp, Homo sapiens
  source 1..373: mol_type = unassigned DNA
atttgggcaaggccccacttgctcccagaagcccagcagggagagcttcataggccatggagacagacccagctgaggagcagctgcagggactccaggagaacgcagccatggcttggggactgcagtacggcaggaagggtgggatggatgcctcctctcggggcacctcacaggacagatgagaatgagggccagcgggtgaggtaccccaggtaccagacaaggaaaccaaagccacaatgggcacagaaaacacacctggaggcaaagccagcccagaccctcaggacgtgcggccaagtgtgttccataacatcaagctgttcgttctgtgccacagcctgctgcagctggcgcagctcatgatctc

SEQ ID NO: 19829 - DNA, 546 bp, Homo sapiens
  source 1..546: mol_type = unassigned DNA
attttacccaatccctactcaagatgaagatggagatggagatggggccagcgggtgaggtaccccaggtaccagacaaggaaaccaaagccacaatgggcacagaaaacacacctggaggcaaagccagcccagaccctcaggacgtgcggccaagtgtgttccataacatcaagctgttcgttctgtgccacagcctgctgcagctggcgcagctcatgatctccggctacctaaagagctccatctccacagtggagaagcgcttcggcctctccagccagacgtcggggctgctggcctccttcaacgaggtggggaacacagccttgattgtgtttgtgagctattttggcagccgggtgcaccgaccccgaatgattggctatggggctatccttgtggccctggcgggcctgctcatgactctcccgcacttcatctcggagccataccgctacgacaacaccagccctgaggatatgccacaggacttcaaggcttccctgtgcctgcccacaacctcggccccagcctcggccccct

SEQ ID NO: 19830 - DNA, 274 bp, Homo sapiens
  source 1..274: mol_type = unassigned DNA
aaacagccatatctctaaaggataaagtactcccaggaaggctttgagccttggcagaaaaggctgggattgaagcttcagggagagccagagggccagcgggtgaggtaccccaggtaccagacaaggaaaccaaagccacaatgggcacagaaaacacacctggaggcaaagccagcccagaccctcaggacgtgcggccaagtgtgttccataacatcaagctgttcgttctgtgccacagcctgctgcagctggcgcagctcatgatctc

SEQ ID NO: 19831 - DNA, 577 bp, Homo sapiens
  source 1..577: mol_type = unassigned DNA
agccatatctctaaaggataaagtactcccaggaaggctttgagccttggcagaaaaggctgggattgaagcttcagggagagccagaggtgaggctggagtgggagatcacctgaggcaggtgagcaggctccatgagtgggcagggccagcgggtgaggtaccccaggtaccagacaaggaaaccaaagccacaatgggcacagaaaacacacctggaggcaaagccagcccagaccctcaggacgtgcggccaagtgtgttccataacatcaagctgttcgttctgtgccacagcctgctgcagctggcgcagctcatgatctccggctacctaaagagctccatctccacagtggagaagcgcttcggcctctccagccagacgtcggggctgctggcctccttcaacgaggtggggaacacagccttgattgtgtttgtgagctattttggcagccgggtgcaccgaccccgaatgattggctatggggctatccttgtggccctggcgggcctgctcatgactctcccgcacttcatctcggagccataccgctacgacaacaccagccct

SEQ ID NO: 19832 - DNA, 2368 bp, Homo sapiens
  source 1..2368: mol_type = unassigned DNA
atatctctaaaggataaagtactcccaggaaggctttgagccttggcagaaaaggctgggattgaagcttcagggagagccagaggtgaggctggagtgggagatcacctgaggcagggccagcgggtgaggtaccccaggtaccagacaaggaaaccaaagccacaatgggcacagaaaacacacctggaggcaaagccagcccagaccctcaggacgtgcggccaagtgtgttccataacatcaagctgttcgttctgtgccacagcctgctgcagctggcgcagctcatgatctccggctacctaaagagctccatctccacagtggagaagcgcttcggcctctccagccagacgtcggggctgctggcctccttcaacgaggtggggaacacagccttgattgtgtttgtgagctattttggcagccgggtgcaccgaccccgaatgattggctatggggctatccttgtggccctggcgggcctgctcatgactctcccgcacttcatctcggagccataccgctacgacaacaccagccctgaggatatgccacaggacttcaaggcttccctgtgcctgcccacaacctcggccccagcctcggccccctccaatggcaactgctcaagctacacagaaacccagcatctgagtgtggtggggatcatgttcgtggcacagaccctgctgggcgtgggcggggtgcccattcagccctttggcatctcctacatcgatgactttgcccacaacagcaactcgcccctctacctcgggatcctgtttgcagtgaccatgatggggccaggcctggcctttgggctgggcagcctcatgctgcgcctttatgtggacattaaccagatgccagaaggtggtatcagcctgaccataaaggacccccgatgggtgggtgcctggtggctgggtttcctcatcgctgccggtgcagtggccctggctgccatcccctacttcttcttccccaaggaaatgcccaaggaaaaacgtgagcttcagtttcggcgaaaggtcttagcagtcacagactcacctgccaggaagggcaaggactctccctctaagcagagccctggggagtccacgaagaagcaggatggcctagtccagattgcaccaaacctgactgtgatccagttcattaaagtcttccccagggtgctgctgcagaccctacgccaccccatcttcctgctggtggtcctgtcccaggtatgcttgtcatccatggctgcgggcatggccaccttcctgcccaagttcctggagcgccagttttccatcacagcctcctacgccaacctgctcatcggctgcctctccttcccttcggtcatcgtgggcatcgtggtgggtggcgtcctggtcaagcggctccacctgggccctgtgggatgcggtgccctttgcctgctggggatgctgctgtgcctcttcttcagcctgccgctcttctttatcggctgctccagccaccagattgcgggcatcacacaccagaccagtgcccaccctgggctggagctgtctccaagctgcatggaggcctgctcctgcccattggacggctttaaccctgtctgcgaccccagcactcgtgtggaatacatcacaccctgccacgcaggctgctcaagctgggtggtccaggatgctctggacaacagccaggttttctacaccaactgcagctgcgtggtggagggcaaccccgtgctggcaggatcctgcgactcaacgtgcagccatctggtggtgcccttcctgctcctggtcagcctgggctcggccctggcctgtctcacccacacaccctccttcatgctcatcctaagaggagtgaagaaagaagacaagactttggctgtgggcatccagttcatgttcctgaggattttggcctggatgcccagccccgtgatccacggcagcgccatcgacaccacctgtgtgcactgggccctgagctgtgggcgtcgagctgtctgtcgctactacaataatgacctgctccgaaaccggttcatcggcctccagttcttcttcaaaacaggttctgtgatctgcttcgccttagttttggctgtcctgaggcagcaggacaaagaggcaaggaccaaagagagcagatccagccctgccgtagagcagcaattgctagtgtcggggccagggaagaagccagaggattcccgagtgtgagctgtcttggggccccacctggccaagagtagcagccacagcagtacctcctctgagtcctttgcccaagattgggtgtcaagagccctgtgttccattctggctcctccactaaattgctgtgtgacttcaggcaa

SEQ ID NO: 19833 - DNA, 649 bp, Homo sapiens
  source 1..649: mol_type = unassigned DNA
gtggccctggcgggcctgctcatgactctcccgcacttcatctcggagccataccgctacgacaacaccagccctgaggatatgccacaggacttcaaggcttccctgtgcctgcccacaacctcggccccagcctcggccccctccaatggcaactgctcaagctacacagaaacccagcatctgagtgtggtggggatcatgttcgtggcacagaccctgctgggcgtgggcggggtgcccattcagccctttggcatctcctacatcgatgactttgcccacaacagcaactcgcccctctacctcgggatcctgtttgcagtgaccatgatggggccaggcctggcctttgggctgggcagcctcatgctgcgcctttatgtggacattaaccagatgccagaaggtgagcctcaggagcacatgtttgctagaccctagctaactgactgccactctcataggagacattgagccaggggacctcggttcaaatcctagcagcaccactgaccttgggcaagtctcttagcctctctgaacctcagctttctcatctgtgagataatctctgtcctgtctgtctcctaaagctgtgatcagagtccagcgagatggtggagataaactgtaaagtgccatcaaa

SEQ ID NO: 19834 - DNA, 757 bp, Homo sapiens
  source 1..757: mol_type = unassigned DNA
gtagaagggtcactgaggtgcagagatgtttgaagaagctcaaaggcttgtaggattgagggggcctgtctccatacttgcccaccttcattgcaaggagctcactatcacgccatcatcgggcagccctgatgatgaaaatcctctgtgtggagctgaaatctctggccattgctctcggctacagggccgaggatgccccagctagtggcctaagggagggaagccaggccaaccctactggtcttctctcccaccagtgcccaccctgggctggagctgtctccaagctgcatggaggcctgctcctgcccattggacggctttaaccctgtctgcgaccccagcactcgtgtggaatacatcacaccctgccacgcaggctgctcaagctgggtggtccaggatgctctggacaacagccaggttttctacaccaactgcagctgcgtggtggagggcaaccccgtgctggcaggatcctgcgactcaacgtgcagccatctggtggtgcccttcctgctcctggtcagcctgggctcggccctggcctgtctcacccacacaccctccttcatgctcatcctaagaggagtgaagaaagaagacaagactttggctgtgggcatccagttcatgttcctgaggattttggcctggatgcccagccccgtgatccacggcagcgccatcgacaccacctgtgtgcactgggccctgagctgtgggcgtcgagctgtctgtcgctactacaata

SEQ ID NO: 19835 - DNA, 582 bp, Homo sapiens
  source 1..582: mol_type = unassigned DNA
agagatgtttgaagaagctcaaaggcttgtaggattgagggggcctgtctccatacttgcccaccttcattgcaaggagctcactatcacgccatcatcgggcagccctgatgatgaaaatcctctgtgtggagctgaaatctctggccattgctctcggctacagggccgaggatgccccagctagtggcctaagggagggaagccaggccaaccctactggtcttctctcccaccagtgcccaccctgggctggagctgtctccaagctgcatggaggcctgctcctgcccattggacggctttaaccctgtctgcgaccccagcactcgtgtggaatacatcacaccctgccacgcaggctgctcaagctgggtggtccaggatgctctggacaacagccaggttttctacaccaactgcagctgcgtggtggagggcaaccccgtgctggcaggatcctgcgactcaacgtgcagccatctggtggtgcccttcctgctcctggtcagcctgggctcggccctggcctgtctcacccacacaccctccttcatgctcatcctaaggtgaaggtggggg

SEQ ID NO: 19836 - DNA, 5875 bp, Homo sapiens
  source 1..5875: mol_type = unassigned DNA
tgtctgcagctgccagggctggaggtgagaggcccagagggctccagctgtccaggccagccagccacttcaagggttgatgggactaatccctgcacacctgtctcccatctgaggccctgtgtggctggggcacatgagtctagaagctctggtctatgggaaagcaaagagaagcccaggcctcttggcttgggctggcttctatcgggtgcctgtgagccctggcagtccagatcacttcgcagagtccttggctggaggttttcctcgctacctagggagtgagtgcaggctgggatcaaacactccagggggcaagcccggggacatggccagcctggggatgttttcttacagttggtgtgtagaatgtgggggaatgatgctctcctggctccctccctcttcttctctactttctctctgcttccctctccctgcccaccacctcagcccaggctcaacttgcacatagacagcccttgaggtgcctgctcctcaagccgtctttgctcagccaacgggtcacgatctcggactcccagccagctctaccccaactggctgtggaacttgggcctctcacaagccttccccgctgcaagcccttggccagctgcctgcccttggaggctcttgaagtctcttcctcctcttcccactccaggttttctacaccaactgcagctgcgtggtggagggcaaccccgtgctggcaggatcctgcgactcaacgtgcagccatctggtggtgcccttcctgctcctggtcagcctgggctcggccctggcctgtctcacccacacaccctccttcatgctcatcctaaggtgaaggtgggggtggggcaggggcaggtggataccaggaggtccttaaccacaggcagaacaaggaattccaaggacggagttcaagaaaggaggccacttgggtgtcctggcccccacaatatggccttaactgtgttcatcccatggcaacctactgaggcaaggttttctccccatcttgcagataagaaaattgaggctcagagaagttcaggagctggcccccatcacatagcaagtgttgggtggaatagtactggttccctggcccacagcccaggctcctacttgcccaggggagaggaggacatacctagggccctgtcctggcctctggaggtgagggcataatacctgcaatggatgagctgcaggaggtgcatctaggaaaccaaactgtgtcagtctggtgcatgactctgaatgctgcttcaaggctacatacaagtgcttattaggtgcccgctgtggacccaacccatgctgagcactgccttttgggccaagatctttgtggccctcgtcctaagaatgcctgctggccctgacaaattgtcacctgagttcaaagtcagggtctcctggggtgagggctgggataagaggactgagtgagaaaaaaatagtttttcctttttttttttttttttttttgagatgcagttttgctctgtctcccaggctggagtgcaatggcgcaatctcggctcactgcaacctcctcctcctgggttcacgccattctcctgcctcagcctccctagtagctgggattacaggcacccgccaccacacccaactaattgtatttttagcagagacggggtttcaccatgttggccaggacggtctcgaactcctgacctcagtgatccacctgccttggcctcccaaagtgctgggattacaggcatgagccaccacactcggctgagaaaaacagtttttctattctctcactcaacaatcaacacagaagacttctgcaaccagaagtgtgggggtattttcccacacaccaggcactcaattaattctgcagtggaccctagccagtgtcccccaattctattctgacacaatctacctggagacagcatcagatcccacaggctgagtgctcagtcccacaagactttccctccacttcccatgccaaccacaagcctcaggctgttttaccaatgattctgactgaccagccgtatgctggggtttccacagccccatctttgagtttgctttatttgctagagtggctcacagagctcaggaaaacatctacttaatgtttatcggtttattataaaagatattacaaaggatacagatgaagtgatgcatacggtgaggtatgggggaggagctttcatgccctccctggctgcatcctgcagggacctccatgtgttcagctatccggaagctcgccaaagcttcattatgtaggcatgattgattaaatcactggatattggcagtcacctcaaccttcagcccctctccccttgctggaggttggggctgaaagtcctaaccctctaatcctgccttggtccctctggtgaccaagccccagcctgaagctactaggggctgctcaccatcaatcaactcattagcatacaaaaagacacttttcactttgaacattccaagaattttaggagtgtatgccgggaagaccaaatacacatctcacaatatcacagggacctcagagcaagataatttccattttccttctcctgggattattttattcactatctactttctaggaaattagaagggaaatggagcctcttgcaaataccagaagacatgtagatctagaacacaagctggcctgggagagaaaatagaggaatcagatgcccaacaggcagcctgactaaaaggagttgagaacacagcctcagggctgcgtggatacaggccctgaccgctgtcagccatgagatcttggccaagttattgaatctgtctaagtgtcagtctccttatctgtaaaatggggctaatgtacacctcgctcataggagtgatgtggggttgcagggcagagttactgagcccgtagtaagcgctccataaatgccagccactggtgttgtctggcaggagctggcgttacagtggttggggatgctggggaagtgtctgactgtcccagctccaggtcttgccaactgtaggagtaaggggagaatttgatgggaccagtgggtggaggaagaggagtgatgtctgtgaccagaaacatacagaggtcagcacaggaccctgatggtcagtgggtgtgttgtcttgtatatgggaccaggctctgcaggttgaaaaaggatggggtacgtccctgagcccccagcctagatcatcagatgggagagaggctggctctgggtggtgggagagaagggcataataagaacccttcaacgttgatgcatggcccttgggggctggaacccctccaacctcatgttgcccatgtctctgcttgttagaggagtgaagaaagaagacaagactttggctgtgggcatccagttcatgttcctgaggattttgggtaaagatcttgcttgggaccattggtggtggtgatggggtccagatgcccactgtgtgccaggcctggggcacaggcatgagcggaattcaatccctgatcttagggctcacaagctcatggggtgacagacctggcccagctctcctagagcggggtatagaggcagagtctagacagcccgtcaggaagccacctcggatgcaggggtggggcgggcttgagggccagacagccaagaggccccagtaacccagagcccctgaggggttgtacatgccagggagggggcagggtaggacggtgggccttcattgtcccctgagcaccacctccctcagcctggatgcccagccccgtgatccacggcagcgccatcgacaccacctgtgtgcactgggccctgagctgtgggcgtcgagctgtctgtcgctactacaataatgacctgctccgaaaccggttcatcggcctccagttcttcttcaaaacaggttctgtgatctgcttcgccttagttttggctgtcctgaggcagcaggacaaagaggcaaggaccaaagagagcagatccagccctgccgtagagcagcaattgctagtgtcggggccagggaagaagccagaggattcccgagtgtgagctgtcttggggccccacctggccaagagtagcagccacagcagtacctcctctgagtcctttgcccaagattgggtgtcaagagccctgtgttccattctggctcctccactaaattgctgtgtgacttcaggcaagacattgatcctctctcagcctttgcttgctagtctgaaccaaagagttgtttgggcatttgctgtgttggccatttctggagcaagagggtcttcttcctccttcccccagccagccagctgtcctggggccaggctttcctgggtggaaagaagtatacctttccctggggccctaggatagcaaagtgagccatagtgggccaggctgccctccatgctgggccccagcccaggtctgcactcgcctggatcaccttctttgagccttagccatctcctgtcaggtaggaatgaacttgccagccttcaggctcgttcagctatgaccatctgtgcggtcagggtacactcagctctcctccccaactccagcagcctttaagaagtgtccctttggcgccccctggaggcagagcactgagctggaccctgggtagactcccacagggaggacggagctggcctcaggagtgggacacccagacttggcagggccttcaagaggcctgtgtgggggccccaggaatccttagctgaagcggggagactcactctccatctcaggaaattctagcccttgccctcagggagccacggttgagggtgaggcccaacacctgccttagggccctgggtgggcaagtctgggccctggggtagggagggagactcaggcccacacttgggtattttctaatttcagacaaacacacactcagcgcgcactcactgattcctacacattgccaagatttcacacatgtgaccaggggccaccaaagtccctgtgacctttgtgactaggatcctaatttctctattttctcctgggtgcctgggtctgtgtcacctggggcagtgtggataatgtttagttctgtgacactgttttttgggggtggcacctggttctccgatgcctgggctggtgtcaggcccaggactgtagtgctgggagcagtaaagctcagctctgtgtaatgagtgatgctatggcttgctcgtgtcttatgatccaatccttttctacatcagcccttgttttgttttatggctagtcttatctggcctggttatttccttgcggggaggagagggtttgctaatctgctcccagcccaacctattaccaccccacctcgctgggacctactgctcgggaggcagcagacagggagccaccagcagtggcttcctggccctgtgctgggggtggggggaagctgggggcacatgtggcccttgccttctgagcagctcccagtgccagggctttgagactttcccacatgataaaagaaaagggaggtacagaagttccaattccctttttattttgctggttggtatctgtaaatgtttaataaatatctgagcatgtatctatcaacgccaagaatttcaaagtctccttcaacaatatgaggcttttaggatgtttatattccttcatccctcttgtttcccaggttttgcagggaaaaaaagtctggaattatagatacagcttattattaaatttgttcttgcataatgtctcttctattacaaaaattctttcttcataaactgcattagaggtttgcaacaaccacatcatttccattaacttagatttaggttttactggattcattgctcaccattattgcttgtatattacatcttttccaatcttta

SEQ ID NO: 19837 - DNA, 2874 bp, Homo sapiens
  source 1..2874: mol_type = unassigned DNA
cgtcgagctgtctgtcgctactacaataatgacctgctccgaaaccggtgagacctggtttgatggcttgtgggaagggtgctggaaatactctcagagtcccaggcaggataccagcagggaggggaggtttcatttaagtctacctgctaggtgacaggtgtcattatatattcagtgctgagctcaccagtccttcaagctaaacactgcccccctccttttatagatgaggaaagtgacagttaaagcaagtagcccaaggtcacacagctaataacttgcagagctgggccttgaccacagagtctatgcaggaacttggggagaaacagaggagcagccatgctgcgagagggacttggggtgaagggctggggagaaagccctgtctaggacacaggaggcctgggtttcaggcccagctctgtctccctcatcatgggacttatcttgtctggggctcagtcttcccatctgtacaaaggggaactcaaaggaacctgaaggcacagaggcggctggcctgggatggatgtggagaggacttgctagcagggctggggacagggagctggtcactttcagctctgaggaggtgaggagggcacagtttctgtgggctgggactgtccacagggggcttcctagaaaaggaaaagtcaaacaagggctttgatagttaaacaggggagagggaatccgtttgttcttgtggcaggtggcgcaatataaaattgcacttgtcaggccccctgagcccttgggctcggagagaggcagggccaggccaggccacagagcagagtccaggacagggcgatgaagatggccaggcctctgctcccacccagggctcctctgcagagcctctccccctcctccagggaagagccacagcagaggtcaatgtctccctgaggcctcagtatctctgatttcacaatgagtgatgactgctgacgtccatgccctggcctggcagctcttgagttcaagggtccccattctttccccaggttcatcggcctccagttcttcttcaaaacaggttctgtgatctgcttcgccttagttttggctgtcctgaggcagcaggacaaagaggcaaggaccaaagagagcagatccagccctgccgtagagcagcaattgctagtgtcggggccagggaagaagccagaggattcccgagtgtgagctgtcttggggccccacctggccaagagtagcagccacagcagtacctcctctgagtcctttgcccaagattgggtgtcaagagccctgtgttccattctggctcctccactaaattgctgtgtgacttcaggcaagacattgatcctctctcagcctttgcttgctagtctgaaccaaagagttgtttgggcatttgctgtgttggccatttctggagcaagagggtcttcttcctccttcccccagccagccagctgtcctggggccaggctttcctgggtggaaagaagtatacctttccctggggccctaggatagcaaagtgagccatagtgggccaggctgccctccatgctgggccccagcccaggtctgcactcgcctggatcaccttctttgagccttagccatctcctgtcaggtaggaatgaacttgccagccttcaggctcgttcagctatgaccatctgtgcggtcagggtacactcagctctcctccccaactccagcagcctttaagaagtgtccctttggcgccccctggaggcagagcactgagctggaccctgggtagactcccacagggaggacggagctggcctcaggagtgggacacccagacttggcagggccttcaagaggcctgtgtgggggccccaggaatccttagctgaagcggggagactcactctccatctcaggaaattctagcccttgccctcagggagccacggttgagggtgaggcccaacacctgccttagggccctgggtgggcaagtctgggccctggggtagggagggagactcaggcccacacttgggtattttctaatttcagacaaacacacactcagcgcgcactcactgattcctacacattgccaagatttcacacatgtgaccaggggccaccaaagtccctgtgacctttgtgactaggatcctaatttctctattttctcctgggtgcctgggtctgtgtcacctggggcagtgtggataatgtttagttctgtgacactgttttttgggggtggcacctggttctccgatgcctgggctggtgtcaggcccaggactgtagtgctgggagcagtaaagctcagctctgtgtaatgagtgatgctatggcttgctcgtgtcttatgatccaatccttttctacatcagcccttgttttgttttatggctagtcttatctggcctggttatttccttgcggggaggagagggtttgctaatctgctcccagcccaacctattaccaccccacctcgctgggacctactgctcgggaggcagcagacagggagccaccagcagtggcttcctggccctgtgctgggggtggggggaagctgggggcacatgtggcccttgccttctgagcagctcccagtgccagggctttgagactttcccacatgataaaagaaaagggaggtacagaagttccaattccctttttattttgctggttggtatctgtaaatgtttaataaatatctgagcatgtatctatcaacgccaagaatttcaaagtctccttcaacaatatgaggcttttaggatgtttatattccttcatccctcttgtttcccaggttttgcagggaaaaaaagtctggaattatagatacagcttattattaaatttgttcttgcataa

SEQ ID NO: 19838 - DNA, 3092 bp, Homo sapiens
  source 1..3092: mol_type = unassigned DNA
gcggcgcggcggccgggccctcgagacggggacggacacaccagcccctcggataccacttggccactcccgctgaggccactcccactgcgtggctgaagcctcgaggtcaccaggcggaggcgcggagatgcccctgcatcagctgggggacaagccgctcaccttccccagccccaactcagccatggaaaacgggcttgaccacaccccacccagcaggagggcatccccgggcacacccctgagccccggctccctccgctccgctgcccatagccccctggacaccagcaagcagcccctctgccagctctgggccgagaagcatggcgcccgggggacccatgaggtgcggtacgtctcggccgggcagagcgtggcgtgcggctggtgggccttcgcaccgccgtgcctgcaggtcctcaacacgcccaagggcatcctgttcttcctgtgtgcggccgcattcctgcaggggatgactgtgaatggcttcatcaacacagtcatcacctccctggagcgccgctatgacctgcacagctaccagagcgggctcatcgccagctcctacgacattgccgcctgcctctgcctcaccttcgtcagctacttcgggggctcagggcacaagccgcgctggctgggctggggcgtgctgcttatgggcacggggtcgctggtgttcgcgctgccccacttcacggctggccgctatgaggtggagttggacgcgggtgtcaggacgtgccctgccaaccccggcgcggtgtgtgcggacagcacctcgggcctgtcccgctaccagctggtcttcatgctgggccagttcctgcatggcgtgggtgccacacccctctacacgctgggcgtcacctacctggatgagaacgtcaagtccagctgctcgcccgtctacattgccatcttctacacagcggccatcctgggcccagctgccggctacctgattggaggtgccctgctgaatatctacacggaaatgggccgacggacggagctgaccaccgagagcccactgtgggtcggcgcctggtgggtcggcttcctgggctctggggccgctgctttcttcaccgccgttcccatccttggttaccctcggcagctgccaggctcccagcgctacgcggtcatgagagcggcggaaatgcaccagttgaaggacagcagccgtggggaggcgagcaacccggactttgggaaaaccatcagagacctgcctctctccatctggctcctgctgaagaaccccacgttcatcctgctctgcctggccggggccaccgaggccactctcatcaccggcatgtccacgttcagccccaagttcttggagtcccagttcagcctgagtgcctcagaagctgccaccttgtttgggtacctggtggtgccagcgggtggtggcggcaccttcctgggcggcttctttgtgaacaagctcaggctccggggctccgcggtcatcaagttctgcctgttctgcaccgttgtcagcctgctgggcatcctcgtcttctcactgcactgccccagtgtgcccatggcgggcgtcacagccagctacggcgggagcctcctgcccgaaggccacctgaacctaacggctccctgcaacgctgcctgcagctgccagccagaacactacagccctgtgtgcggctcggacggcctcatgtacttctcactgtgccacgcagggtgccctgcagccacggagacgaatgtggacggccagaaggtgagtggagccgctgcctaccgcccctgtcctcccctggaccctgggaaggggcccccgtgccttccccttgtaatcggagctattgttgggcttcccaggtgtaccgagactgtagctgtatccctcagaatctttcctctggttttggccatgccactgcagggaaatgcacttcaacttgtcagagaaagcccctccttctggttttcatattcgttgtaattttctttacattcctcagcagcattcctgcactaacggcaactctacggtaagctggggtcgggtgtgcgcttgtccagagctttccttgcagcaccctgaggcggagctctgcagatcctgagacaggagcactccaggaaacacccaggtctaagcgggcctgtctgtcactggtggcaggagagacctcactgtctctgatctctgacgaggggcttcccacttgggggggggtgatgatgtggctggggactggtccaggaggccactggcctagggggtgacttggcatgcaaccccacttctgtgggtgctgacgctgtggttttctattgcagatgtgtccgtgaccctcagagatcctttgccctgggaatccagtggattgtagttagaatactagggggcatcccggggcccatcgccttcggctgggtgatcgacaaggcctgtctgctgtggcaggaccagtgtggccagcagggctcctgcttggtgtaccagaattcggccatgagccgctacatactcatcatggggctcctgtacaaggtgctgggcgtcctcttctttgccatagcctgcttcttatacaagcccctgtcggagtcttcagatggcctggaaacttgtctgcccagccagtcctcagcccctgacagtgccacagatagccagctccagagcagcgtctgaccaccgcccgcgcccacccggccacggcgggcactcagcatttcctgatgacagaacagtgccgttgggtgatgcaatcacacgggaacttctatttgacctgcaaccttctacttaacctgtggtttaaagtcggctgtgacctcctgtccccagagctgtacggccctgcagtgggtgggaggaacttgcataaatatatatttatggacacacagtttgcatcagaacgtgtttatagaatgtgttttatacccgatcgtgtgtggtgtgcgtgaggacaaactccgcaggggctgtgaatcccactgggagggcggtgggcctgcagcctgaggaaggcttgtgtgtcctcagttaaaactgtgcatatcgaaatatattttgttatttaagcctg

SEQ ID NO: 19839 - DNA, 2665 bp, Homo sapiens
  source 1..2665: mol_type = unassigned DNA
gacacaccagcccctcggataccacttggccactcccgctgaggccactcccactgcgtggctgaagcctcgaggtcaccaggcggaggcgcggagatgcccctgcatcagctgggggacaagccgctcaccttccccagccccaactcagccatggaaaacgggcttgaccacaccccacccagcaggagggcatccccgggcacacccctgagccccggctccctccgctccgctgcccatagccccctggacaccagcaagcagcccctctgccagctctgggccgagaagcatggcgcccgggggacccatgaggtgcggtacgtctcggccgggcagagcgtggcgtgcggctggtgggccttcgcaccgccgtgcctgcaggtcctcaacacgcccaagggcatcctgttcttcctgtgtgcggccgcattcctgcaggggatgactgtgaatggcttcatcaacacagtcatcacctccctggagcgccgctatgacctgcacagctaccagagcgggctcatcgccagctcctacgacattgccgcctgcctctgcctcaccttcgtcagctacttcgggggctcagggcacaagccgcgctggctgggctggggcgtgctgcttatgggcacggggtcgctggtgttcgcgctgccccacttcacggctggccgctatgaggtggagttggacgcgggtgtcaggacgtgccctgccaaccccggcgcggtgtgtgcggacagcacctcgggcctgtcccgctaccagctggtcttcatgctgggccagttcctgcatggcgtgggtgccacacccctctacacgctgggcgtcacctacctggatgagaacgtcaagtccagctgctcgcccgtctacattgccatcttctacacagcggccatcctgggcccagctgccggctacctgattggaggtgccctgctgaatatctacacggaaatgggccgacggacggagctgaccaccgagagcccactgtgggtcggcgcctggtgggtcggcttcctgggctctggggccgctgctttcttcaccgccgttcccatccttggttaccctcggcagctgccaggctcccagcgctacgcggtcatgagagcggcggaaatgcaccagttgaaggacagcagccgtggggaggcgagcaacccggactttgggaaaaccatcagagacctgcctctctccatctggctcctgctgaagaaccccacgttcatcctgctctgcctggccggggccaccgaggccactctcatcaccggcatgtccacgttcagccccaagttcttggagtcccagttcagcctgagtgcctcagaagctgccaccttgtttgggtacctggtggtgccagcgggtggtggcggcaccttcctgggcggcttctttgtgaacaagctcaggctccggggctccgcggtcatcaagttctgcctgttctgcaccgttgtcagcctgctgggcatcctcgtcttctcactgcactgccccagtgtgcccatggcgggcgtcacagccagctacggcgggagcctcctgcccgaaggccacctgaacctaacggctccctgcaacgctgcctgcagctgccagccagaacactacagccctgtgtgcggctcggacggcctcatgtacttctcactgtgccacgcagggtgccctgcagccacggagacgaatgtggacggccagaaggtgtaccgagactgtagctgtatccctcagaatctttcctctggttttggccatgccactgcagggaaatgcacttcaacttgtcagagaaagcccctccttctggttttcatattcgttgtaattttctttacattcctcagcagcattcctgcactaacggcaactctacgatgtgtccgtgaccctcagagatcctttgccctgggaatccagtggattgtagttagaatactagggggcatcccggggcccatcgccttcggctgggtgatcgacaaggcctgtctgctgtggcaggaccagtgtggccagcagggctcctgcttggtgtaccagaattcggccatgagccgctacatactcatcatggggctcctgtacaaggtgctgggcgtcctcttctttgccatagcctgcttcttatacaagcccctgtcggagtcttcagatggcctggaaacttgtctgcccagccagtcctcagcccctgacagtgccacagatagccagctccagagcagcgtctgaccaccgcccgcgcccacccggccacggcgggcactcagcatttcctgatgacagaacagtgccgttgggtgatgcaatcacacgggaacttctatttgacctgcaaccttctacttaacctgtggtttaaagtcggctgtgacctcctgtccccagagctgtacggccctgcagtgggtgggaggaacttgcataaatatatatttatggacacacagtttgcatcagaacgtgtttatagaatgtgttttatacccgatcgtgtgtggtgtgcgtgaggacaaactccgcaggggctgtgaatcccactgggagggcggtgggcctgcagcctgaggaaggcttgtgtgtcctcagttaaaactgtgcatatcgaaatatattttgttatttaagcctg

SEQ ID NO: 19840 - DNA, 986 bp, Homo sapiens
  source 1..986: mol_type = unassigned DNA
ttcctgggcggcttctttgtgaacaagctcaggctccggggctccgcggtcatcaagttctgcctgttctgcaccgttgtcagcctgctgggcatcctcgtcttctcactgcactgccccagtgtgcccatggcgggcgtcacagccagctacggcgggagcctcctgcccgaaggccacctgaacctaacggctccctgcaacgctgcctgcagctgccagccagaacactacagccctgtgtgcggctcggacggcctcatgtacttctcactgtgccacgcagggtgccctgcagccacggagacgaatgtggacggccagaaggtgtaccgagactgtagctgtatccctcagaatctttcctctggttttggccatgccactgcagggaaatgcacttcaacttgtcagagaaagcccctccttctggttttcatattcgttgtaattttctttacattcctcagcagcattcctgcactaacggcaactctacgatgtgtccgtgaccctcagagatcctttgccctgggaatccagtggattgtagttagaatactagggggcatcccggggcccatcgccttcggctgggtgatcgacaaggcctgtctgctgtggcaggaccagtgtggccagcagggctcctgcttggtgtaccagaattcggccatgagccgctacatactcatcatggggctcctgtacaagtttcagttaccagaggtccaccacagtctgaatgtattaaataggaaattccagaagcaaacagttcataacctttaaagcacgcgccgttctgcacagtctggtgagatcttgatctgtcctgcccaggactcggattctccctttgtccaactttggaagaaggcaaggtcagaacttattctgcagggagctttggggatattggatactaaggcccaagccctctgtgatacgcctttcgctttggcataaaataacggttgactctc

SEQ ID NO: 19841 - DNA, 543 bp, Homo sapiens
  source 1..543: mol_type = unassigned DNA
gaactagggaaaggggctgtgcatcaggcggacggtgctggggggcatgggtgtgccttccttgcgtgaggaggaaaaaccattctatcaccagaaggcagtgcccagtggtgccctgcagccacggagacgaatgtggacggccagaagcattcctgcactaacggcaactctacgatgtgtccgtgaccctcagagatcctttgccctgggaatccagtggattgtagttagaatactagggggcatcccggggcccatcgccttcggctgggtgatcgacaaggcctgtctgctgtggcaggaccagtgtggccagcagggctcctgcttggtgtaccagaattcggccatgagccgctacatactcatcatggggctcctgtacaaggctcccctgctgaggattcatcccaccttggatggaaaatgcagtttttgtgggagatggaactggagggtacggagggctgactgcacatacaaatatacatacatgagtgtacatatgttcttatataaacgtgtcacagtaaaattgtt

SEQ ID NO: 19842 - DNA, 819 bp, Homo sapiens
  source 1..819: mol_type = unassigned DNA
gcagcctcctgcccgaaggccacctgaacctaacggctccctgcaacgctgcctgcagctgccagccagaacactacagccctgtgtgcggctcggacggcctcatgtacttctcactgtgccacgcagggtgccctgcagccacggagacgaatgtggacggccagaagcagcattcctgcactaacggcaactctacgatgtgtccgtgaccctcagagatcctttgccctgggaatccagtggattgtagttagaatactagggggcatcccggggcccatcgccttcggctgggtgatcgacaaggcctgtctgctgtggcaggaccagtgtggccagcagggctcctgcttggtgtaccagaattcggccatgagccgctacatactcatcatggggctcctgtacaaggtgctgggcgtcctcttctttgccatagcctgcttcttatacaagcccctgtcggagtcttcagatggcctggaaacttgtctgcccagccagtcctcagcccctgacagtgccacagatagccagctccagagcagcgtctgaccaccgcccgcgcccacccggccacggcgggcactcagcatttcctgatgacagaacagtgccgttgggtgatgcaatcacacgggaacttctatttgacctgcaaccttctacttaacctgtggtttaaagtcggctgtgacctcctgtccccagagctgtacggccctgcagtgggtgggaggaacttgcataaatatatatttatggacacacagtttgcatcagaacgtgtttatagaatgtgttttatacccgatc

SEQ ID NO: 19843 - DNA, 856 bp, Homo sapiens
  source 1..856: mol_type = unassigned DNA
actacagccctgtgtgcggctcggacggcctcatgtacttctcactgtgccacgcagggtgccctgcagccacggagacgaatgtggacggccagaagatgtgtccgtgaccctcagagatcctttgccctgggaatccagtggattgtagttagaatactagggggcatcccggggcccatcgccttcggctgggtgatcgacaaggcctgtctgctgtggcaggaccagtgtggccagcagggctcctgcttggtgtaccagaattcggccatgagccgctacatactcatcatggggctcctgtacaaggtgctgggcgtcctcttctttgccatagcctgcttcttatacaagcccctgtcggagtcttcagatggcctggaaacttgtctgcccagccagtcctcagcccctgacagtgccacagatagccagctccagagcagcgtctgaccaccgcccgcgcccacccggccacggcgggcactcagcatttcctgatgacagaacagtgccgttgggtgatgcaatcacacgggaacttctatttgacctgcaaccttctacttaacctgtggtttaaagtcggctgtgacctcctgtccccagagctgtacggccctgcagtgggtgggaggaacttgcataaatatatatttatggacacacagtttgcatcagaacgtgtttatagaatgtgttttatacccgatcgtgtgtggtgtgcgtgaggacaaactccgcaggggctgtgaatcccactgggagggcggtgggcctgcagcctgaggaaggcttgtgtgtcctcagttaaaactgtgcatatcgaaatatattttgttatttaagcctg

SEQ ID NO: 19844 - DNA, 440 bp, Homo sapiens
  source 1..440: mol_type = unassigned DNA
gtgacttggcatgcaaccccacttctgtgggtgctgacgctgtggttttctattgcagatgtgtccgtgaccctcagagatcctttgccctgggaatccagtggattgtagttagaatactagggggcatcccggggcccatcgccttcggctgggtgatcgacaaggcctgtctgctgtggcaggaccagtgtggccagcagggctcctgcttggtgtaccagaattcggccatgagccgctacatactcatcatggggctcctgtacaagtttcagttaccagaggtccaccacagtctgaatgtattaaataggaaattccagaagcaaacagttcataacctttaaagcacgcgccgttctgcacagtctggtgagatcttgatctgtcctgcccaggactcggattctccctttgtccaactttggaagaaggca

SEQ ID NO: 19845 - DNA, 556 bp, Homo sapiens
  source 1..556: mol_type = unassigned DNA
tgtccgtgaccctcagagatcctttgccctgggaatccagtggattgtagttagaatactagggggcatcccggggcccatcgccttcggctgggtgatcgacaaggcctgtctgctgtggcaggaccagtgtggccagcagggctcctgcttggtgtaccagaattcggccatgagccgctacatactcatcatggggctcctgtacaaggaagaagagaatgaatttagaaggctgtaaaccccatctgagccttacacatagatctccttgaattggattttcaccaaggccgtgatggatgtggagtctcggctttctgacaacgtcttccagagcaggctttctctagagggtggactgcctgtgttctcctgggagagaatgcatttgcttccgatgcccagggcacgaaagaggtggacgaaacaacggaagtggagggggtggattctctacctgggaaacccagcatggcacactcatatagaattaagatcttataataagtgtgcagatgcgcccgttctaaggaaataaagggttctgccctcc

SEQ ID NO: 19846 - DNA, 2776 bp, Homo sapiens
  source 1..2776: mol_type = unassigned DNA
ctgcggcgggggcggccccagcggatgaatgaagcggcgcgtggctgccggggaggccagagcgtggagcgctgcgcggcgcggcggccgggccctcgagacggggacggacacaccagcccctcggataccacttggccactcccgctgaggccactcccactgcgtggctgaagcctcgaggtcaccaggcggaggcgcggagatgcccctgcatcagctgggggacaagccgctcaccttccccagccccaactcagccatggaaaacgggcttgaccacaccccacccagcaggagggcatccccgggcacacccctgagccccggctccctccgctccgctgcccatagccccctggacaccagcaagcagcccctctgccagctctgggccgagaagcatggcgcccgggggacccatgaggtgcggtacgtctcggccgggcagagcgtggcgtgcggctggtgggccttcgcaccgccgtgcctgcaggtcctcaacacgcccaagggcatcctgttcttcctgtgtgcggccgcattcctgcaggggatgactgtgaatggcttcatcaacacagtcatcacctccctggagcgccgctatgacctgcacagctaccagagcgggctcatcgccagctcctacgacattgccgcctgcctctgcctcaccttcgtcagctacttcgggggctcagggcacaagccgcgctggctgggctggggcgtgctgcttatgggcacggggtcgctggtgttcgcgctgccccacttcacggctggccgctatgaggtggagttggacgcgggtgtcaggacgtgccctgccaaccccggcgcggtgtgtgcggacagcacctcgggcctgtcccgctaccagctggtcttcatgctgggccagttcctgcatggcgtgggtgccacacccctctacacgctgggcgtcacctacctggatgagaacgtcaagtccagctgctcgcccgtctacattgccatcttctacacagcggccatcctgggcccagctgccggctacctgattggaggtgccctgctgaatatctacacggaaatgggccgacggacggagctgaccaccgagagcccactgtgggtcggcgcctggtgggtcggcttcctgggctctggggccgctgctttcttcaccgccgttcccatccttggttaccctcggcagctgccaggctcccagcgctacgcggtcatgagagcggcggaaatgcaccagttgaaggacagcagccgtggggaggcgagcaacccggactttgggaaaaccatcagagacctgcctctctccatctggctcctgctgaagaaccccacgttcatcctgctctgcctggccggggccaccgaggccactctcatcaccggcatgtccacgttcagccccaagttcttggagtcccagttcagcctgagtgcctcagaagctgccaccttgtttgggtacctggtggtgccagcgggtggtggcggcaccttcctgggcggcttctttgtgaacaagctcaggctccggggctccgcggtcatcaagttctgcctgttctgcaccgttgtcagcctgctgggcatcctcgtcttctcactgcactgccccagtgtgcccatggcgggcgtcacagccagctacggcgggagcctcctgcccgaaggccacctgaacctaacggctccctgcaacgctgcctgcagctgccagccagaacactacagccctgtgtgcggctcggacggcctcatgtacttctcactgtgccacgcagggtgccctgcagccacggagacgaatgtggacggccagaaggtgtaccgagactgtagctgtatccctcagaatctttcctctggttttggccatgccactgcagggaaatgcacttcaacttgtcagagaaagcccctccttctggttttcatattcgttgtaattttctttacattcctcagcagcattcctgcactaacggcaactctacgatgtgtccgtgaccctcagagatcctttgccctgggaatccagtggattgtagttagaatactagggggcatcccggggcccatcgccttcggctgggtgatcgacaaggcctgtctgctgtggcaggaccagtgtggccagcagggctcctgcttggtgtaccagaattcggccatgagccgctacatactcatcatggggctcctgtacaaggtgctgggcgtcctcttctttgccatagcctgcttcttatacaagcccctgtcggagtcttcagatggcctggaaacttgtctgcccagccagtcctcagcccctgacagtgccacagatagccagctccagagcagcgtctgaccaccgcccgcgcccacccggccacggcgggcactcagcatttcctgatgacagaacagtgccgttgggtgatgcaatcacacgggaacttctatttgacctgcaaccttctacttaacctgtggtttaaagtcggctgtgacctcctgtccccagagctgtacggccctgcagtgggtgggaggaacttgcataaatatatatttatggacacacagtttgcatcagaacgtgtttatagaatgtgttttatacccgatcgtgtgtggtgtgcgtgaggacaaactccgcaggggctgtgaatcccactgggagggcggtgggcctgcagcctgaggaaggcttgtgtgtcctcagttaaaactgtgcatatcgaaatatattttgttatttaagcctgcg

SEQ ID NO: 19847 - DNA, 5334 bp, Homo sapiens
  source 1..5334: mol_type = unassigned DNA
cccacgccgcgccttccggttggtccttgaggcgacgggtgaggcacagctgagcgccaaagccacaggctggggcgctaacgcccccgctcagcgctctgcgctccagacagctgcgagctggagtaggaaggttcaggcggtggcggagagtgcgctggaggctggagggccaggaggcgggaagcttcccgcacgggggcgctgtcacctgcctgtgggaggagccagagagggacctggctctgctgctctgaagcaccggagtcgggagaacccatccagacatgaagagcgccaaaggtattgagaacttggcttttgtcccctccagcccagacatcctgcgccgcttgtctgcgtcgccctcccaaatcgaagtctctgccttgtcctctgacccccaaagagagaattctcagccacaggagcttcagaagccccaggagccccagaagtcaccagagccatctctgccttcagcccctcccaatgtctccgaagagaagctccggtcactgtcgctgtccgagtttgaggaggggtcttacggctggaggaacttccatcctcaatgtctccagcgctgcaacacacctggaggctttctgcttcactactgcctcttggccgtcacgcaaggtattgtagttaatggcctagtaaatattagcatttccactgttgagaagcgttatgaaatgaagagttccctgactggcctgatttcatcaagctacgatatttcattctgtttgttgtctttatttgtatcattctttggtgaaagaggacataagccgagatggcttgcatttgcagcctttatgattggactgggagcacttgtattctcattgccacaatttttcagtggagaatataaattggggtctctttttgaagacacttgtgtaacaacaaggaatagcaccagttgtacatcttcaacttcttcactttctaactacttgtatgtcttcatcttgggacaactattgctgggggcaggaggaactcctctttatactctgggaacagcctttcttgatgattctgtgcccacacacaagtcttctctctatataggaaccggttatgctatgtcaatcttaggccctgctattggctatgtattgggaggacaactgctaaccatatacattgatgttgctatgggagaaagcactgatgtcactgaggatgatccgcgatggttgggagcttggtggattgggtttcttctatcatggatctttgcttggtctttaataatacctttttcttgctttccaaaacatttaccaggtacagcagaaattcaagctggaaaaacttcccaggctcatcagagtaatagtaatgcagatgtgaaatttggaaaaagtattaaagattttccagctgctctaaagaatttgatgaagaatgctgtctttatgtgtttagttctatcaacttcttcagaagccttaattactactggatttgctacatttttacctaaatttatagaaaatcaattcggattgacatccagcttcgcagctactcttggaggggctgttttaattcctggagctgctctcggtcaaattttaggtggcttccttgtttcaaaattcagaatgacatgtaaaaacacaatgaagtttgcactgttcacatctggagttgcacttacgctgagttttgtatttatgtatgccaaatgtgaaaatgagccatttgctggtgtatctgaatcatataatgggactggagaattgggaaacttgatagccccttgtaatgccaattgtaactgttcgcgatcatattattatcctgtctgtggagatggagtccaatatttttctccctgctttgcaggctgttcaaacccagttgcacacaggaagccaaaggtatattacaactgttcctgtattgaaaggaaaacagaaataacatccactgcagaaacttttggttttgaagctaaagctggaaaatgtgaaactcattgtgcgaaactgcccatattcctttgcattttctttattgtaattatttttacctttatggccggtactcctataactgtgtctatcctaaggtgtgttaatcacagacaacggtccctagccttgggaatacaatttatggtccttcgattattagggacaattcctggaccaattatatttggtttcacaatagacagcacatgtattctttgggatataaatgattgtggaattaaaggagcttgctggatttatgataacatcaagatggcccatatgctagtagccataagtgttacttgtaaagttatcaccatgttcttcaatggatttgcaatctttttgtataaaccacctccatcagccacagatgtgtcatttcataaagagaatgcagttgtgactaatgttttagcagaacaggatctcaacaaaatagtaaaagaagggtgaaatgggaaaagagaagactgttttacacctggaaaatttacctcgatttttaagaacacacattgccatggcaggattatctatccaatatggacaatcatatttacaaaattgatgtttttataatcaaatgtatttttttacttatgtagtttttgttttatgcaagaaacagacctgtgccttcaaagcccacgtaaagcctcaaaacacagcacacacacacacgagcacacacacacacacacacacgaacacacacacacacacacacacgcacacatacacacttatttcctattcccattgtctaggtatgaaatcctcaagcaataacaagaaaaaaggcccacaattagaaaaatttacatttaaaaaaaatgttgtttctatccccattacaacttgtttaattttaattttcattgtcaatattttgagcttagaacatttatggtataaaaatttaaactaatcaaagttgtgtgatgatttccgggaattattattgaaagcctatgaatttaaaaccaggtttaccatgtaatttgtttttaaatttatgtatactagcctggcctttctccaagcaaattattgaactattagaatatgttagttatcatccttgtgtcttagtatatagtgaatacagaaacatcagcattgtatacacatattttcactttaactcaagaattccaggaggtaatttgttgatattacaatttttaacacatttatgattctgtgataatattattcaattgcatatatttcagaggaaagtaccagtcagtaaagaaaaatgccaactaaacatgaaactattgatcaatacttatatacctttaatttttcctatttgaaaagccaaccacttaacacattactcatagcacctaagacagtgccttgcatagtgtagtcatctattattattgtttaattagaatattaaaccctaccctttaactcagcagtccccaaccttttttgcatcagggaccatttttgtggaagacaatttttccatgggggaagaaggtatggttttgagatgaaactgctccacctcagaccatcaggcattagttagattctcataaggagagtgcaacctagatcccttgcatgtgcagttcccaatggagtgtgcactcctatgagaatctaatgccactactgatctaacaagaggtggagctcaggcagtaatgctcactcacctgcctctcagctcaccaactgtgtggcccgattcctaacaggccacacacagcccagggctggggacccctgctttaactgatgcattgatttgataaagtattttacaagcctgataatgttataaccctgtttattcaggtcagatttatgccaactttgctgagaatatggagggtatagatgagtgaacatcaacaaacataacttctaccatggttaagaattttacttaggaaaagtattgaagttcaaatccagatagtattacatttgaaattgttataagggttattaatttaataaaattcatcatcaggtttcccctataagctttctcctaggttaattttccacaagcattgttttatatacactgtaatcaggataacacaagcttagtgttagatcttgtaggaaaccaagattagaaacattagaaatttgcagaatttaagaaattatgttttgtggtaatctatggccaacgatgttagaacctagcgcaattgtaaagtgaaattcaaggagaaggaatgaggagttagggaagcagcatacttgaatattagagaaggagaggagctgtgggtcaggaatcagagagacctgctaaaaccagacagatataaacaccaaagacggaagccaaataggtagccaaaaatccagatatttgagaagcaggaaatttatagcaaccaaagaaatagggcaagagaggcaggtgaacacacatgatacctcaattgacaatcttcctcccaccaagccagacacgttgtaaatgctgcttcctattggagcccagaaaaaaggaaaaggaaagtttaggctttctttgtcctttgtgtggaagcagggaattggattgaagactttcatagttgtaacataaaggcaaatcctgaggaactcactgatggagatgtgaaatggcagtaaggaagaaaacagaataactgaacaaatatattagtctagggccacttaatttagaggaagaaaaaaaatcaacccatccatagaaatagtttgataaacaggtcactaaatcattggcgtttataaagattcttagctatcaagggctgcattgtattttatatactcagttttataaggtgatactttttaaataagcgctttaatgaaaatggttagactgaaaataattttggtccttaaaaggagtcaggagcttttatatataaggtacatattttaaaagaatacctcctttataacagggttttacagacactaccataatttataatcattattttttacttttgggttcacctagatcatatgagttgatgtgatacttctagaacaaaattattcatagtgcgttttttgtaatttatgattgttaagtaagcttgacttataaattgacattgtaattgtgtacataattggatatatgtgttaaaatttaacatttagatttacttaattgtagaaaatacaaatgtaaaacttacacatggaaagaactgtatgcagttgactttactatgtaaattggagggaaacaaagttttagatccattttctttcaaaattttctttattgtaaagtatgcaaaatatatattcataccatttattaaatcagaatgtttatacaaaa

SEQ ID NO: 19848 - DNA, 553 bp, Homo sapiens
  source 1..553: mol_type = unassigned DNA
tataatctattggctttgacaataaagtttatggggcagagaaaatatttaactttgaaatccctgtacatcgaaaggaatattttacaaataacttgacaaagatgtttcaatggtcttggaatgcagaatggaattttgagaaatagaaatttgtaggcaagggtctaaactaggcaaggtggtaagaatgtggatgtgccagccttcttttttttttttttgagacagattcttactttgacccccaggctggagtgcagtggcacgatcttggttcaccacaatctcgtctcgaaggctcaggtgattctctcacctcagccgcctgagtagctgggaccacagtttcagctgtgagttcaacatggaggcaaatcagtgccccctggttgtggaaccatcttacccagacctggtcatcaatgtaggagaagtgactcttggagaagaaaacagaaaaaagctgcagaaaattcagagagaccaagagaaggagagagttatgcgggctgcatgtgctttattaaactcaggaggaggagtgattcga

SEQ ID NO: 19849 - DNA, 575 bp, Homo sapiens
  source 1..575: mol_type = unassigned DNA
aaacgctaagggggcttcggaagcgctggagcttgagaggtttctgtatacatagccttcaggactgcttttggtggaaagagatagcaggtggtgctaattcactgtgttggtgggaactctggctacactgaaaggtttgaaaaagttatcctgtaaactgactagaatcaggtgcttttgtttctgaagtgcttttattcttactttgacccccaggctggagtgcagtggcacgatcttggttcaccacaatctcgtctcgaaggctcaggtgattctctcacctcagccgcctgagtagctgggaccacagtttcagctgtgagttcaacatggaggcaaatcagtgccccctggttgtggaaccatcttacccagacctggtcatcaatgtaggagaagtgactcttggagaagaaaacagaaaaaagctgcagaaaattcagagagaccaagagaaggagagagttatgcgggctgcatgtgctttattaaactcaggaggaggagtgattcgaatggccaagaaggttgagcatcccgtggagatgggactggatttagaacagtct

SEQ ID NO: 19850 - DNA, 714 bp, Homo sapiens
  source 1..714: mol_type = unassigned DNA
aaacgctaagggggcttcggaagcgctggagcttgagaggtcagagagggtccttgcccccagcctgggactccggagttgcgtttctacccgtgcttcagggtctagcccagccgaatccgcgtcgggctgtaactcgagtgccaggtttctgtatacatagccttcaggactgcttttggtggaaagagatagcaggtggtgctaattcactgtgttggtgggaactctggctacactgaaaggtttgaaaaagttatcctgtaaactgactagaatcaggtgcttttgtttctgaagtgcttttattcttactttgacccccaggctggagtgcagtggcacgatcttggttcaccacaatctcgtctcgaaggctcaggtgattctctcacctcagccgcctgagtagctgggaccacagtttcagctgtgagttcaacatggaggcaaatcagtgccccctggttgtggaaccatcttacccagacctggtcatcaatgtaggagaagtgactcttggagaagaaaacagaaaaaagctgcagaaaattcagagagaccaagagaaggagagagttatgcgggctgcatgtgctttattaaactcaggaggaggagtgattcgaatggccaagaaggttgagcatcccgtggagatgggactggatttagaacagtctttgagagagcttattcagtcttcagatctgc

SEQ ID NO: 19851 - DNA, 606 bp, Homo sapiens
  source 1..606: mol_type = unassigned DNA
aaacgctaagggggcttcggaagcgctggagcttgagaggtcagagagggtccttgcccccagcctgggactccggagttgcgtttctacccgtgcttcagggtctagcccagccgaatccgcgtcgggctgtaactcgagtgccaggtttctgtatacatagccttcaggactgcttttggtggaaagagatagcagattcttactttgacccccaggctggagtgcagtggcacgatcttggttcaccacaatctcgtctcgaaggctcaggtgattctctcacctcagccgcctgagtagctgggaccacagtttcagctgtgagttcaacatggaggcaaatcagtgccccctggttgtggaaccatcttacccagacctggtcatcaatgtaggagaagtgactcttggagaagaaaacagaaaaaagctgcagaaaattcagagagaccaagagaaggagagagttatgcgggctgcatgtgctttattaaactcaggaggaggagtgattcgaatggccaagaaggttgagcatcccgtggagatgggactggatttagaacagtctttgagagagcttattcagtcttcagatctgca

SEQ ID NO: 19852 - DNA, 584 bp, Homo sapiens
  source 1..584: mol_type = unassigned DNA
aaacgctaagggggcttcggaagcgctggagcttgagaggtcagagagggtccttgcccccagcctgggactccggagttgcgtttctacccgtgcttcagggtctagcccagccgaatccgcgtcgggctgtaactcgagtgccagattcttactttgacccccaggctggagtgcagtggcacgatcttggttcaccacaatctcgtctcgaaggctcaggtgattctctcacctcagccgcctgagtagctgggaccacagtttcagctgtgagttcaacatggaggcaaatcagtgccccctggttgtggaaccatcttacccagacctggtcatcaatgtaggagaagtgactcttggagaagaaaacagaaaaaagctgcagaaaattcagagagaccaagagaaggagagagttatgcgggctgcatgtgctttattaaactcaggaggaggagtgattcgaatggccaagaaggttgagcatcccgtggagatgggactggatttagaacagtctttgagagagcttattcagtcttcagatctgcaggctttctttgagaccaagcaacaaggaa

SEQ ID NO: 19853 - DNA, 791 bp, Homo sapiens
  source 1..791: mol_type = unassigned DNA
atctcctgcgtgggatgtgcgtgggatggcgccaacccgctagtatataaggactcgacctgggcgcctccagggaaacgctaagggggcttcggaagcgctggagcttgagaggtcagagagggtccttgcccccagcctgggactccggagttgcgtttctacccgtgcttcagggtctagcccagccgaatccgcgtcgggctgtaactcgagtgccaggtttctgtatacatagccttcaggactgcttttggtggaaagagatagcaggtggtgctaattcactgtgttggtgggaactctggctacactgaaagattcttactttgacccccaggctggagtgcagtggcacgatcttggttcaccacaatctcgtctcgaaggctcaggtgattctctcacctcagccgcctgagtagctgggaccacagtttcagctgtgagttcaacatggaggcaaatcagtgccccctggttgtggaaccatcttacccagacctggtcatcaatgtaggagaagtgactcttggagaagaaaacagaaaaaagctgcagaaaattcagagagaccaagagaaggagagagttatgcgggctgcatgtgctttattaaactcaggaggaggagtgattcgaatggccaagaaggttgagcatcccgtggagatgggactggatttagaacagtctttgagagagcttattcagtcttcagatctgcaggctttctttgagaccaagcaacaaggaaggtgtttttacatttttgttaaatcttggagcag

SEQ ID NO: 19854 - DNA, 634 bp, Homo sapiens
  source 1..634: mol_type = unassigned DNA
ggaaacgctaagggggcttcggaagcgctggagcttgagaggtcagagagggtccttgcccccagcctgggactccggagttgcgtttctacccgtgcttcagggtctagcccagccgaatccgcgtcgggctgtaactcgagtgccaggctggagtgcagtggcacgatcttggttcaccacaatctcgtctcgaaggctcaggtgattctctcacctcagccgcctgagtagctgggaccacagtttcagctgtgagttcaacatggaggcaaatcagtgccccctggttgtggaaccatcttacccagacctggtcatcaatgtaggagaagtgactcttggagaagaaaacagaaaaaagctgcagaaaattcagagagaccaagagaaggagagagttatgcgggctgcatgtgctttattaaactcaggaggaggagtgattcgaatggccaagaaggttgagcatcccgtggagatgggactggatttagaacagtctttgagagagcttattcagtcttcagatctgcaggctttctttgagaccaagcaacaaggaaggtgtttttacatttttgttaaatcttggagcagtggccctttccctgaagatcgctctgtcaagccc

SEQ ID NO: 19855 - DNA, 5030 bp, Homo sapiens
  source 1..5030: mol_type = unassigned DNA
aaacgctaagggggcttcggaagcgctggagcttgagaggtttctgtatacatagccttcaggactgcttttggtggaaagagatagcaggtggtgctaattcactgtgttggtgggaactctggctacactgaaagattcttactttgacccccaggctggagtgcagtggcacgatcttggttcaccacaatctcgtctcgaaggctcaggtgattctctcacctcagccgcctgagtagctgggaccacagtttcagctgtgagttcaacatggaggcaaatcagtgccccctggttgtggaaccatcttacccagacctggtcatcaatgtaggagaagtgactcttggagaagaaaacagaaaaaagctgcagaaaattcagagagaccaagagaaggagagagttatgcgggctgcatgtgctttattaaactcaggaggaggagtgattcgaatggccaagaaggttgagcatcccgtggagatgggactggatttagaacagtctttgagagagcttattcagtcttcagatctgcaggctttctttgagaccaagcaacaaggaaggtgtttttacatttttgttaaatcttggagcagtggccctttccctgaagatcgctctgtcaagccccgcctttgcagcctcagttcttcattataccgtagatctgagacctctgtgcgttccatggactcaagagaggcattctgtttcctgaagaccaaaaggaagccaaaaatcttggaagaaggaccttttcacaaaattcacaagggtgtataccaagagctccctaactcggatcctgctgacccaaactcggatcctgctgacctaattttccaaaaagactatcttgaatatggtgaaatcctgccttttcctgagtctcagttagtagagtttaaacagttctctacaaaacacttccaagaatatgtaaaaaggacaattccagaatacgtccctgcatttgcaaacactggaggaggctatctttttattggagtggatgataagagtagggaagtcctgggatgtgcaaaagaaaatgttgaccctgactctttgagaaggaaaatagaacaagccatatacaaactaccttgtgttcatttttgccaaccccaacgcccgataaccttcacactcaaaattgtgaatgtgttaaaaaggggagagctctatggctatgcttgcatgatcagagtaaatcccttctgctgtgcagtgttctcagaagctcccaattcatggatagtggaggacaagtacgtctgcagcctgacaaccgagaaatgggtaggcatgatgacagacacagatccagatcttctacagttgtctgaagattttgaatgtcagctgagtctatctagtgggcctccccttagcagaccagtgtactccaagaaaggcctggaacataaaaaggaactccagcaacttttattttcagtcccaccaggatatttgcgatatactccagagtcactctggagggacctgatctcagagcacagaggactagaggagttaataaataagcaaatgcaacctttctttcggggaattttgatcttctctagaagttgggctgtggacctgaacttgcaggagaagccaggagtcatctgtgatgctctgctgatagcacagaacagcacccccattctctacaccattctcagggagcaagatgcagagggccaggactactgcactcgcaccgcctttactttgaagcagaagctagtgaacatggggggctacaccgggaaggtgtgtgtcagggccaaggtcctctgcctgagtcctgagagcagcgcagaggccttggaggctgcagtgtctccgatggattaccctgcgtcctatagccttgcaggcacccagcacatggaagccctgctgcagtccctcgtgattgtcttactcggcttcaggtctctcttgagtgaccagctcggctgtgaggttttaaatctgctcacagcccagcagtatgagatattctccagaagcctccgcaagaacagagagttgtttgtccacggcttacctggctcagggaagaccatcatggccatgaagatcatggagaagatcaggaatgtgtttcactgtgaggcacacagaattctctacgtttgtgaaaaccagcctctgaggaactttatcagtgatagaaatatctgccgagcagagacccggaaaactttcctaagagaaaactttgaacacattcaacacatcgtcattgacgaagctcagaatttccgtactgaagatggggactggtatgggaaggcaaaaagcatcactcggagagcaaagggtggcccaggaattctctggatctttctggattactttcagaccagccacttggattgcagtggcctccctcctctctcagaccaatatccaagagaagagctcaccagaatagttcgcaatgcagatccaatagccaagtacttacaaaaagaaatgcaagtaattagaagtaatccttcatttaacatccccactgggtgcctcgaggtatttcctgaagccgaatggtcccagggtgttcagggaaccttacgaattaagaaatacttgactgtggagcaaataatgacctgtgtggcagacacgtgcaggcgcttctttgataggggctattctccaaaggatgttgctgtgcttgtcagcaccgcaaaagaagtggagcactataagtatgagctcttgaaagcaatgaggaagaaaagggtggtgcagctcagtgatgcatgtgatatgttgggtgatcacattgtgttggacagtgttcggcgattctcaggcctggaaaggagcatagtgtttgggatccatccaaggacagctgacccagctatcttacccaatgttctgatctgtctggcttccagggcaaaacaacacctgtatatttttccgtggggtggccattaggaagaactccaaatcaaaatgctatgtaaatgtctatgggtgacagtctgctgatggtagaaacctttctttttagttcacaagtcagagatttggacggagctgacacaaagagtttggagctcccccatttctggctctcctttcaggggttccttccccaaccctttcagcagcggtggctgccccccattctgacccctgactcttccagccagaaagatggtggttttctaaaggaactttagctgtcctgcacaatgccgatctgtgtcttgcattttgggtaaaagccataaaaataagaaactcagcctgtggcctttctttcttccaaggctgggcttctttttttaagtgacttcatgcagtttgttgcttttaaaaatttgtccagaatcgttttctgcagaagcatggtctgttaggagcttactggccgtagcagaagcaattgtttcctgaattcttgacatttatctttgctgtattcatttagggcttgggagagtccgaagataattcagtcactgtcagattaataattttgtcaggacaaagaataccgttatgattatttaatcctttaaaattgtggtctccagagcttgttctcagaatggcccagaccaagccttaattgtgatagtgaatattaatggtcactttaaggagaaattataggccaagatgaaatgaacataaacctgtttgccctggctttcagtggaagatgatattagagaccaaaatctggttctgaaggtgtgtatcagccctaaggtgaaccagacttgggaaagattgtctttaaaaatcaatgagtttatgttttaacttctcagcttagttctatgcattgctctataacacacctagttaagttttatgttattcttgaactgtgattttttttctatttactttcatggtttggtgggccattgttatggactgaatgtttgtgtcccacccttcacccccaaattcccgtgttgaagccccaacctgcactgtggagctggggctgctaaggaagtaattaaggttacatgaagtcatggtggggctctgatctgctaaggttggtgtccttatagggagagaccccagagagcttgttccctccctccctgtgcatgcaaacaagagggcatgggagcacacagagagatggcagccacctacaagccaagaggagaagcctcacaatcaaactctcgctgctggcgagagtcttggactctgtcttggacttccagcctccagactgtgagaaacaaatttctgttgtttcagcttctcagtctctggtgttttgttattgcagcctgagaacacagctgtacgattatttgtcaaacagaaaacactgatacttaacaatgctaatgcaattatttatttgcttttcagtctctacaaaacgttctaaaacactaatctaaatattaacagtaaaatatttgcataactaatggaaactaagaaatcatatgaccaatatttcacttattggtaatcttactctactgatttccccccagactgtgatttttgaacttccttgcctttctcctgtctttctgtgtttattcatggaattccagttatctgggcttgaaattgcaggctctcctaacttaagcaaaatctgacagatcagcaaaatgagataaatgtttcttttttctttctgactgcattaaatcagatacaactcagcattaaaaagctatctttgtaaatgttgttactaataaattagtcttataagatccctggactttggagttgttgcaatgtctttgagagtaattctttaaaagtctaatttcgactggttgtatctctttatgatttattgccccactaacaatatttgaaacaatataatattttaaaatgtataaataattatgaatttttgtttagaacaaagaggattactgatatttgtttccctatgaatggcaaaaggtttagcttactactgcatttctgttttaaataaaaagttgagagtttgtgtctcattaaactgaaaaaaa

SEQ ID NO: 19856 - DNA, 1124 bp, Homo sapiens
  source 1..1124: mol_type = unassigned DNA
atatctgccgagcagagacccggaaaactttcctaagagaaaactttgaacacattcaacacatcgtcattgacgaagctcagaatttccgtactgaagatggggactggtatgggaaggcaaaaagcatcactcggagagcaaaggaatagttcgcaatgcagatccaatagccaagtacttacaaaaagaaatgcaagtaattagaagtaatccttcatttaacatccccactgggtgcctcgaggtatttcctgaagccgaatggtcccagggtgttcagggaaccttacgaattaagaaatacttgactgtggagcaaataatgacctgtgtggcagacacgtgcaggcgcttctttgataggggctattctccaaaggatgttgctgtgcttgtcagcaccgcaaaagaagtggagcactataagtatgagctcttgaaagcaatgaggaagaaaagggtggtgcagctcagtgatgcatgtgatatgttgggtgatcacattgtgttggacagtgttcggcgattctcaggcctggaaaggagcatagtgtttgggatccatccaaggacagctgacccagctatcttacccaatgttctgatctgtctggcttccagggcaaaacaacacctgtatatttttccgtggggtggccattaggaagaactccaaatcaaaatgctatgtaaatgtctatgggtgacagtctgctgatggtagaaacctttctttttagttcacaagtcagagatttggacggagctgacacaaagagtttggagctcccccatttctggctctcctttcaggggttccttccccaaccctttcagcagcggtggctgccccccattctgacccctgactcttccagccagaaagatggtggttttctaaaggaactttagctgtcctgcacaatgccgatctgtgtcttgcattttgggtaaaagccataaaaataagaaactcagcctgtggcctttctttcttccaaggctgggcttctttttttaagtgacttcatgcagtttgttgcttttaaaaatttgtccagaatcgttttctgcagaagcatggtctgttaggagcttactggccgtagcagaagcaattg

SEQ ID NO: 19857 - DNA, 579 bp, Homo sapiens
  source 1..579: mol_type = unassigned DNA
gaaaatagaacaagccatatacaaactaccttgtgttcatttttgccaaccccaacgcccgataaccttcacactcaaaattgtgaatgtgttaaaaaggggagagctctatggctatgcttgcatgatcagagtaaatcccttctgctgtgcagtgttctcagaagctcccaattcatggatagtggaggacaagtacgtctgcagcctgacaaccgagaaatggatcttctacagttgtctgaagattttgaatgtcagctgagtctatctagtgggcctccccttagcagaccagtgtactccaagaaaggcctggaacataaaaaggaactccagcaacttttattttcaggtaattatggtttgtcttctcaacaccagccagtttctatattaggataaagggagattaaactataatatttgttttgtaaaatcctgaaagtgctctgcaaacccatttgtaagacgtgatgatgttacaatcctattggtgataagtggtttagaaatgaacccttactgaccccactggctaaggcaggaccacacatagaatccaggaacattatttcc

SEQ ID NO: 19858 - DNA, 4910 bp, Homo sapiens
  source 1..4910: mol_type = unassigned DNA
gcttcggaagcgctggagcttgagaggtcagagagggtccttgcccccagcctgggactccggagttgcgtttctacccgtgcttcagggtctagcccagccgaatccgcgtcgggctgtaactcgagtgccagtttcagctgtgagttcaacatggaggcaaatcagtgccccctggttgtggaaccatcttacccagacctggtcatcaatgtaggagaagtgactcttggagaagaaaacagaaaaaagctgcagaaaattcagagagaccaagagaaggagagagttatgcgggctgcatgtgctttattaaactcaggaggaggagtgattcgaatggccaagaaggttgagcatcccgtggagatgggactggatttagaacagtctttgagagagcttattcagtcttcagatctgcaggctttctttgagaccaagcaacaaggaaggtgtttttacatttttgttaaatcttggagcagtggccctttccctgaagatcgctctgtcaagccccgcctttgcagcctcagttcttcattataccgtagatctgagacctctgtgcgttccatggactcaagagaggcattctgtttcctgaagaccaaaaggaagccaaaaatcttggaagaaggaccttttcacaaaattcacaagggtgtataccaagagctccctaactcggatcctgctgacccaaactcggatcctgctgacctaattttccaaaaagactatcttgaatatggtgaaatcctgccttttcctgagtctcagttagtagagtttaaacagttctctacaaaacacttccaagaatatgtaaaaaggacaattccagaatacgtccctgcatttgcaaacactggaggaggctatctttttattggagtggatgataagagtagggaagtcctgggatgtgcaaaagaaaatgttgaccctgactctttgagaaggaaaatagaacaagccatatacaaactaccttgtgttcatttttgccaaccccaacgcccgataaccttcacactcaaaattgtgaatgtgttaaaaaggggagagctctatggctatgcttgcatgatcagagtaaatcccttctgctgtgcagtgttctcagaagctcccaattcatggatagtggaggacaagtacgtctgcagcctgacaaccgagaaatgggtaggcatgatgacagacacagatccagatcttctacagttgtctgaagattttgaatgtcagctgagtctatctagtgggcctccccttagcagaccagtgtactccaagaaaggcctggaacataaaaaggaactccagcaacttttattttcagtcccaccaggatatttgcgatatactccagagtcactctggagggacctgatctcagagcacagaggactagaggagttaataaataagcaaatgcaacctttctttcggggaattttgatcttctctagaagttgggctgtggacctgaacttgcaggagaagccaggagtcatctgtgatgctctgctgatagcacagaacagcacccccattctctacaccattctcagggagcaagatgcagagggccaggactactgcactcgcaccgcctttactttgaagcagaagctagtgaacatggggggctacaccgggaaggtgtgtgtcagggccaaggtcctctgcctgagtcctgagagcagcgcagaggccttggaggctgcagtgtctccgatggattaccctgcgtcctatagccttgcaggcacccagcacatggaagccctgctgcagtccctcgtgattgtcttactcggcttcaggtctctcttgagtgaccagctcggctgtgaggttttaaatctgctcacagcccagcagtatgagatattctccagaagcctccgcaagaacagagagttgtttgtccacggcttacctggctcagggaagaccatcatggccatgaagatcatggagaagatcaggaatgtgtttcactgtgaggcacacagaattctctacgtttgtgaaaaccagcctctgaggaactttatcagtgatagaaatatctgccgagcagagacccggaaaactttcctaagagaaaactttgaacacattcaacacatcgtcattgacgaagctcagaatttccgtactgaagatggggactggtatgggaaggcaaaaagcatcactcggagagcaaagggtggcccaggaattctctggatctttctggattactttcagaccagccacttggattgcagtggcctccctcctctctcagaccaatatccaagagaagagctcaccagaatagttcgcaatgcagatccaatagccaagtacttacaaaaagaaatgcaagtaattagaagtaatccttcatttaacatccccactgggtgcctcgaggtatttcctgaagccgaatggtcccagggtgttcagggaaccttacgaattaagaaatacttgactgtggagcaaataatgacctgtgtggcagacacgtgcaggcgcttctttgataggggctattctccaaaggatgttgctgtgcttgtcagcaccgcaaaagaagtggagcactataagtatgagctcttgaaagcaatgaggaagaaaagggtggtgcagctcagtgatgcatgtgatatgttgggtgatcacattgtgttggacagtgttcggcgattctcaggcctggaaaggagcatagtgtttgggatccatccaaggacagctgacccagctatcttacccaatgttctgatctgtctggcttccagggcaaaacaacacctgtatatttttccgtggggtggccattaggaagaactccaaatcaaaatgctatgtaaatgtctatgggtgacagtctgctgatggtagaaacctttctttttagttcacaagtcagagatttggacggagctgacacaaagagtttggagctcccccatttctggctctcctttcaggggttccttccccaaccctttcagcagcggtggctgccccccattctgacccctgactcttccagccagaaagatggtggttttctaaaggaactttagctgtcctgcacaatgccgatctgtgtcttgcattttgggtaaaagccataaaaataagaaactcagcctgtggcctttctttcttccaaggctgggcttctttttttaagtgacttcatgcagtttgttgcttttaaaaatttgtccagaatcgttttctgcagaagcatggtctgttaggagcttactggccgtagcagaagcaattgtttcctgaattcttgacatttatctttgctgtattcatttagggcttgggagagtccgaagataattcagtcactgtcagattaataattttgtcaggacaaagaataccgttatgattatttaatcctttaaaattgtggtctccagagcttgttctcagaatggcccagaccaagccttaattgtgatagtgaatattaatggtcactttaaggagaaattataggccaagatgaaatgaacataaacctgtttgccctggctttcagtggaagatgatattagagaccaaaatctggttctgaaggtgtgtatcagccctaaggtgaaccagacttgggaaagattgtctttaaaaatcaatgagtttatgttttaacttctcagcttagttctatgcattgctctataacacacctagttaagttttatgttattcttgaactgtgattttttttctatttactttcatggtttggtgggccattgttatggactgaatgtttgtgtcccacccttcacccccaaattcccgtgttgaagccccaacctgcactgtggagctggggctgctaaggaagtaattaaggttacatgaagtcatggtggggctctgatctgctaaggttggtgtccttatagggagagaccccagagagcttgttccctccctccctgtgcatgcaaacaagagggcatgggagcacacagagagatggcagccacctacaagccaagaggagaagcctcacaatcaaactctcgctgctggcgagagtcttggactctgtcttggacttccagcctccagactgtgagaaacaaatttctgttgtttcagcttctcagtctctggtgttttgttattgcagcctgagaacacagctgtacgattatttgtcaaacagaaaacactgatacttaacaatgctaatgcaattatttatttgcttttcagtctctacaaaacgttctaaaacactaatctaaatattaacagtaaaatatttgcataactaatggaaactaagaaatcatatgaccaatatttcacttattggtaatcttactctactgatttccccccagactgtgatttttgaacttccttgcctttctcctgtctttctgtgtttattcatggaattccagttatctgggcttgaaattgcaggctctcctaacttaagcaaaatctgacagatcagcaaaatgagataaatgtttcttttttctttctgactgcattaaatcagatacaactcagcattaaaaagctatctttgtaaatgttgttactaataaattagtcttataagatccctggactttggagttgttgcaatgtctttgagagtaattctttaaaagtctaatttcgactggttgtatctctttatgatttattgccccactaacaatatttgaaacaatataatattttaaaatgtataaataattatgaatttttgtttagaacaaagaggattactgatatttgtttccctatgaatggcaaaaggtttagcttactactgcatttctgttttaaataaaaagttgagagtttgtgtctcattaaactgaaaaaaa

SEQ ID NO: 19859 - DNA, 582 bp, Homo sapiens
  source 1..582: mol_type = unassigned DNA
aaacgctaagggggcttcggaagcgctggagcttgagaggtcagagagggtccttgcccccagcctgggactccggagttgcgtttctacccgtgcttcagggtctagcccagccgaatccgcgtcgggctgtaactcgagtgccaggtttctgtatacatagccttcaggactgcttttggtggaaagagatagcaggtggtgctaattcactgtgttggtgggaactctggctacactgaaaggtttgaaaaagttatcctgtaaactgactagaatcaggtgcttttgtttctgaagtgcttttgtaagtgtactgagtttcttttctgaattcttaatttcttattgacttagtttaattttatttaggatttcaaatttatatgggacaatatctctaccttacaaaaaatgtgcaagtgatgctgattataattcctttaatcctaaggaaagagcttgagatagagctccctaagccttttttgcctgcaaaagaatctaagcagatggtggggttgctgtttaaatacaattgccaaccaaaaactataatctattggctttgacaataaagtt

SEQ ID NO: 19860 - DNA, 588 bp, Homo sapiens
  source 1..588: mol_type = unassigned DNA
tcttgcatctcctgcgtgggatgtgcgtgggatggcgccaacccgctagtatataaggactcgacctgggcgcctccagggaaacgctaagggggcttcggaagcgctggagcttgagaggtcagagagggtccttgcccccagcctgggactccggagttgcgtttctacccgtgcttcagggtctagcccagccgaatccgcgtcgggctgtaactcgagtgccaggtttctgtatacatagccttcaggactgcttttggtggaaagagatagcaggtggtgctaattcactgtgttggtgggaactctggctacactgaaaggctggagtgcagtggcacgatcttggttcaccacaatctcgtctcgaaggctcaggtgattctctcacctcagccgcctgagtagctgggaccacagtttcagctgtgagttcaacatggaggcaaatcagtgccccctggttgtggaaccatcttacccagacctggtcatcaatgtaggagaagtgactcttggagaagaaaacagaaaaaagctgcagaaaattcagagagaccaagagaaggagagagttatgcgggc

SEQ ID NO: 19861 - DNA, 5233 bp, Homo sapiens
  source 1..5233: mol_type = unassigned DNA
tgccccgcgcgctctgctacgggcccgctgggcttccgcgccttctagcttccggagcccactttgatcggggccataatacctattgagatcccctcttctgtcttgtaccttcgccactggcatcggatttgcagaagcgtgcgtgggatcagaggaccgccctccccacaacaaccggcccctgcatcttagcagccgttggaagccccagctcttttaccgccaagttcatccttgggagacagaagacgcgtgatctcctctccgctgctcttggggtctccttgcagccctggccaggcggattcatcctcaggacctaaagttgcccaaggagctcctgctctgccagaggagggtggagagggcggtgggaggcgtgtgcctgagtgggctctactgccttgttccatattatttggtgcacattttccctggcactctgggttgctagccccgccgggcactgggcctcagacactgcgcggttccctcggagcagcaagctaaagaaagcccccagtgccggcgaggaaggaggcggcggggaaagatgcgcggcgttggctggcagatgctgtccctgtcgctggggttagtgctggcgatcctgaacaaggtggcaccgcaggcgtgcccggcgcagtgctcttgctcgggcagcacagtggactgtcacgggctggcgctgcgcagcgtgcccaggaatatcccccgcaacaccgagagactggatttaaatggaaataacatcacaagaattacgaagacagattttgctggtcttagacatctaagagttcttcagcttatggagaataagattagcaccattgaaagaggagcattccaggatcttaaagaactagagagactgcgtttaaacagaaatcaccttcagctgtttcctgagttgctgtttcttgggactgcgaagctatacaggcttgatctcagtgaaaaccaaattcaggcaatcccaaggaaagctttccgtggggcagttgacataaaaaatttgcaactggattacaaccagatcagctgtattgaagatggggcattcagggctctccgggacctggaagtgctcactctcaacaataacaacattactagactttctgtggcaagtttcaaccatatgcctaaacttaggacttttcgactgcattcaaacaacctgtattgtgactgccacctggcctggctctccgactggcttcgccaaaggcctcgggttggtctgtacactcagtgtatgggcccctcccacctgagaggccataatgtagccgaggttcaaaaacgagaatttgtctgcagtggtcaccagtcatttatggctccttcttgtagtgttttgcactgccctgccgcctgtacctgtagcaacaatatcgtagactgtcgtgggaaaggtctcactgagatccccacaaatcttccagagaccatcacagaaatacgtttggaacagaacacaatcaaagtcatccctcctggagctttctcaccatataaaaagcttagacgaattgacctgagcaataatcagatctctgaacttgcaccagatgctttccaaggactacgctctctgaattcacttgtcctctatggaaataaaatcacagaactccccaaaagtttatttgaaggactgttttccttacagctcctattattgaatgccaacaagataaactgccttcgggtagatgcttttcaggatctccacaacttgaaccttctctccctatatgacaacaagcttcagaccatcgccaaggggaccttttcacctcttcgggccattcaaactatgcatttggcccagaacccctttatttgtgactgccatctcaagtggctagcggattatctccataccaacccgattgagaccagtggtgcccgttgcaccagcccccgccgcctggcaaacaaaagaattggacagatcaaaagcaagaaattccgttgttcaggtacagaagattatcgatcaaaattaagtggagactgctttgcggatctggcttgccctgaaaagtgtcgctgtgaaggaaccacagtagattgctctaatcaaaagctcaacaaaatcccggagcacattccccagtacactgcagagttgcgtctcaataataatgaatttaccgtgttggaagccacaggaatctttaagaaacttcctcaattacgtaaaataaactttagcaacaataagatcacagatattgaggagggagcatttgaaggagcatctggtgtaaatgaaatacttcttacgagtaatcgtttggaaaatgtgcagcataagatgttcaagggattggaaagcctcaaaactttgatgttgagaagcaatcgaataacctgtgtggggaatgacagtttcataggactcagttctgtgcgtttgctttctttgtatgataatcaaattactacagttgcaccaggggcatttgatactctccattctttatctactctaaacctcttggccaatccttttaactgtaactgctacctggcttggttgggagagtggctgagaaagaagagaattgtcacgggaaatcctagatgtcaaaaaccatacttcctgaaagaaatacccatccaggatgtggccattcaggacttcacttgtgatgacggaaatgatgacaatagttgctccccactttctcgctgtcctactgaatgtacttgcttggatacagtcgtccgatgtagcaacaagggtttgaaggtcttgccgaaaggtattccaagagatgtcacagagttgtatctggatggaaaccaatttacactggttcccaaggaactctccaactacaaacatttaacacttatagacttaagtaacaacagaataagcacgctttctaatcagagcttcagcaacatgacccagctcctcaccttaattcttagttacaaccgtctgagatgtattcctcctcgcacctttgatggattaaagtctcttcgattactttctctacatggaaatgacatttctgttgtgcctgaaggtgctttcaatgatctttctgcattatcacatctagcaattggagccaaccctctttactgtgattgtaacatgcagtggttatccgactgggtgaagtcggaatataaggagcctggaattgctcgttgtgctggtcctggagaaatggcagataaacttttactcacaactccctccaaaaaatttacctgtcaaggtcctgtggatgtcaatattctagctaagtgtaacccctgcctatcaaatccgtgtaaaaatgatggcacatgtaatagtgatccagttgacttttaccgatgcacctgtccatatggtttcaaggggcaggactgtgatgtcccaattcatgcctgcatcagtaacccatgtaaacatggaggaacttgccacttaaaggaaggagaagaagatggattctggtgtatttgtgctgatggatttgaaggagaaaattgtgaagtcaacgttgatgattgtgaagataatgactgtgaaaataattctacatgtgtcgatggcattaataactacacatgcctttgcccacctgagtatacaggtgagttgtgtgaggagaagctggacttctgtgcccaggacctgaacccctgccagcacgattcaaagtgcatcctaactccaaagggattcaaatgtgactgcacaccagggtacgtaggtgaacactgcgacatcgattttgacgactgccaagacaacaagtgtaaaaacggagcccactgcacagatgcagtgaacggctatacgtgcatatgccccgaaggttacagtggcttgttctgtgagttttctccacccatggtcctccctcgtaccagcccctgtgataattttgattgtcagaatggagctcagtgtatcgtcagaataaatgagccaatatgtcagtgtttgcctggctatcagggagaaaagtgtgaaaaattggttagtgtgaattttataaacaaagagtcttatcttcagattccttcagccaaggttcggcctcagacgaacataacacttcagattgccacagatgaagacagcggaatcctcctgtataagggtgacaaagaccatatcgcggtagaactctatcgggggcgtgttcgtgccagctatgacaccggctctcatccagcttctgccatttacagtgtggagacaatcaatgatggaaacttccacattgtggaactacttgccttggatcagagtctctctttgtccgtggatggtgggaaccccaaaatcatcactaacttgtcaaagcagtccactctgaattttgactctccactctatgtaggaggcatgccagggaagagtaacgtggcatctctgcgccaggcccctgggcagaacggaaccagcttccacggctgcatccggaacctttacatcaacagtgagctgcaggacttccagaaggtgccgatgcaaacaggcattttgcctggctgtgagccatgccacaagaaggtgtgtgcccatggcacatgccagcccagcagccaggcaggcttcacctgcgagtgccaggaaggatggatggggcccctctgtgaccaacggaccaatgacccttgccttggaaataaatgcgtacatggcacctgcttgcccatcaatgcgttctcctacagctgtaagtgcttggagggccatggaggtgtcctctgtgatgaagaggaggatctgtttaacccatgccaggcgatcaagtgcaagcatgggaagtgcaggctttcaggtctggggcagccctactgtgaatgcagcagtggatacacgggggacagctgtgatcgagaaatctcttgtcgaggggaaaggataagagattattaccaaaagcagcagggctatgctgcttgccaaacaaccaagaaggtgtcccgattagagtgcagaggtgggtgtgcaggagggcagtgctgtggaccgctgaggagcaagcggcggaaatactctttcgaatgcactgacggctcctcctttgtggacgaggttgagaaagtggtgaagtgcggctgtacgaggtgtgtgtcctaaacacactcccggcagctctgtctttggaaaaggttgtatacttcttgaccgtgtgggactaatgaatgcttcatagtggaaatatttgaaatatattgtaaaatacagaac

SEQ ID NO: 19862 - DNA, 6390 bp, Homo sapiens
  source 1..6390: mol_type = unassigned DNA
cggattcatcctcaggacctaaagttgcccaaggagctcctgctctgccagaggagggtggagagggcggtgggaggcgtgtgcctgagtgggctctactgccttgttccatattatttggtgcacattttccctggcactctgggttgctagccccgccgggcactgggcctcagacactgcgcggttccctcggagcagcaagctaaagaaagcccccagtgccggcgaggaaggaggcggcggggaaagatgcgcggcgttggctggcagatgctgtccctgtcgctggggttagtgctggcgatcctgaacaaggtggcaccgcaggcgtgcccggcgcagtgctcttgctcgggcagcacagtggactgtcacgggctggcgctgcgcagcgtgcccaggaatatcccccgcaacaccgagagactggatttaaatggaaataacatcacaagaattacgaagacagattttgctggtcttagacatctaagagttcttcagcttatggagaataagattagcaccattgaaagaggagcattccaggatcttaaagaactagagagactgcgtttaaacagaaatcaccttcagctgtttcctgagttgctgtttcttgggactgcgaagctatacaggcttgatctcagtgaaaaccaaattcaggcaatcccaaggaaagctttccgtggggcagttgacataaaaaatttgcaactggattacaaccagatcagctgtattgaagatggggcattcagggctctccgggacctggaagtgctcactctcaacaataacaacattactagactttctgtggcaagtttcaaccatatgcctaaacttaggacttttcgactgcattcaaacaacctgtattgtgactgccacctggcctggctctccgactggcttcgccaaaggcctcgggttggtctgtacactcagtgtatgggcccctcccacctgagaggccataatgtagccgaggttcaaaaacgagaatttgtctgcagtggtcaccagtcatttatggctccttcttgtagtgttttgcactgccctgccgcctgtacctgtagcaacaatatcgtagactgtcgtgggaaaggtctcactgagatccccacaaatcttccagagaccatcacagaaatacgtttggaacagaacacaatcaaagtcatccctcctggagctttctcaccatataaaaagcttagacgaattgacctgagcaataatcagatctctgaacttgcaccagatgctttccaaggactacgctctctgaattcacttgtcctctatggaaataaaatcacagaactccccaaaagtttatttgaaggactgttttccttacagctcctattattgaatgccaacaagataaactgccttcgggtagatgcttttcaggatctccacaacttgaaccttctctccctatatgacaacaagcttcagaccatcgccaaggggaccttttcacctcttcgggccattcaaactatgcatttggcccagaacccctttatttgtgactgccatctcaagtggctagcggattatctccataccaacccgattgagaccagtggtgcccgttgcaccagcccccgccgcctggcaaacaaaagaattggacagatcaaaagcaagaaattccgttgttcagctaaagaacagtatttcattccaggtacagaagattatcgatcaaaattaagtggagactgctttgcggatctggcttgccctgaaaagtgtcgctgtgaaggaaccacagtagattgctctaatcaaaagctcaacaaaatcccggagcacattccccagtacactgcagagttgcgtctcaataataatgaatttaccgtgttggaagccacaggaatctttaagaaacttcctcaattacgtaaaataaactttagcaacaataagatcacagatattgaggagggagcatttgaaggagcatctggtgtaaatgaaatacttcttacgagtaatcgtttggaaaatgtgcagcataagatgttcaagggattggaaagcctcaaaactttgatgttgagaagcaatcgaataacctgtgtggggaatgacagtttcataggactcagttctgtgcgtttgctttctttgtatgataatcaaattactacagttgcaccaggggcatttgatactctccattctttatctactctaaacctcttggccaatccttttaactgtaactgctacctggcttggttgggagagtggctgagaaagaagagaattgtcacgggaaatcctagatgtcaaaaaccatacttcctgaaagaaatacccatccaggatgtggccattcaggacttcacttgtgatgacggaaatgatgacaatagttgctccccactttctcgctgtcctactgaatgtacttgcttggatacagtcgtccgatgtagcaacaagggtttgaaggtcttgccgaaaggtattccaagagatgtcacagagttgtatctggatggaaaccaatttacactggttcccaaggaactctccaactacaaacatttaacacttatagacttaagtaacaacagaataagcacgctttctaatcagagcttcagcaacatgacccagctcctcaccttaattcttagttacaaccgtctgagatgtattcctcctcgcacctttgatggattaaagtctcttcgattactttctctacatggaaatgacatttctgttgtgcctgaaggtgctttcaatgatctttctgcattatcacatctagcaattggagccaaccctctttactgtgattgtaacatgcagtggttatccgactgggtgaagtcggaatataaggagcctggaattgctcgttgtgctggtcctggagaaatggcagataaacttttactcacaactccctccaaaaaatttacctgtcaaggtcctgtggatgtcaatattctagctaagtgtaacccctgcctatcaaatccgtgtaaaaatgatggcacatgtaatagtgatccagttgacttttaccgatgcacctgtccatatggtttcaaggggcaggactgtgatgtcccaattcatgcctgcatcagtaacccatgtaaacatggaggaacttgccacttaaaggaaggagaagaagatggattctggtgtatttgtgctgatggatttgaaggagaaaattgtgaagtcaacgttgatgattgtgaagataatgactgtgaaaataattctacatgtgtcgatggcattaataactacacatgcctttgcccacctgagtatacaggtgagttgtgtgaggagaagctggacttctgtgcccaggacctgaacccctgccagcacgattcaaagtgcatcctaactccaaagggattcaaatgtgactgcacaccagggtacgtaggtgaacactgcgacatcgattttgacgactgccaagacaacaagtgtaaaaacggagcccactgcacagatgcagtgaacggctatacgtgcatatgccccgaaggttacagtggcttgttctgtgagttttctccacccatggtcctccctcgtaccagcccctgtgataattttgattgtcagaatggagctcagtgtatcgtcagaataaatgagccaatatgtcagtgtttgcctggctatcagggagaaaagtgtgaaaaattggttagtgtgaattttataaacaaagagtcttatcttcagattccttcagccaaggttcggcctcagacgaacataacacttcagattgccacagatgaagacagcggaatcctcctgtataagggtgacaaagaccatatcgcggtagaactctatcgggggcgtgttcgtgccagctatgacaccggctctcatccagcttctgccatttacagtgtggagacaatcaatgatggaaacttccacattgtggaactacttgccttggatcagagtctctctttgtccgtggatggtgggaaccccaaaatcatcactaacttgtcaaagcagtccactctgaattttgactctccactctatgtaggaggcatgccagggaagagtaacgtggcatctctgcgccaggcccctgggcagaacggaaccagcttccacggctgcatccggaacctttacatcaacagtgagctgcaggacttccagaaggtgccgatgcaaacaggcattttgcctggctgtgagccatgccacaagaaggtgtgtgcccatggcacatgccagcccagcagccaggcaggcttcacctgcgagtgccaggaaggatggatggggcccctctgtgaccaacggaccaatgacccttgccttggaaataaatgcgtacatggcacctgcttgcccatcaatgcgttctcctacagctgtaagtgcttggagggccatggaggtgtcctctgtgatgaagaggaggatctgtttaacccatgccaggcgatcaagtgcaagcatgggaagtgcaggctttcaggtctggggcagccctactgtgaatgcagcagtggatacacgggggacagctgtgatcgagaaatctcttgtcgaggggaaaggataagagattattaccaaaagcagcagggctatgctgcttgccaaacaaccaagaaggtgtcccgattagagtgcagaggtgggtgtgcaggagggcagtgctgtggaccgctgaggagcaagcggcggaaatactctttcgaatgcactgacggctcctcctttgtggacgaggttgagaaagtggtgaagtgcggctgtacgaggtgtgtgtcctaaacacactcccggcagctctgtctttggaaaaggttgtatacttcttgaccgtgtgggactaatgaatgcttcatagtggaaatatttgaaatatattgtaaaatacagaacagacttatttttattatgagaataaagactttttttctgcatttggaaaaaaaaaaaaagaaatgcttgaactaaagcttcccctatgctggagaagtatgaagaaagatatacctggagacattagaacagcgatgggaaccattgcaactcgggtccatctttgtaacatgctgaagacaagcagaagcacatgcacgagggacagaggagctactgtgcactgctgtgaaattgcccagagcataaaacctgtgtaccctccttcacatcaaccaagttcactaggacataccaagcacatgcgtgtgaatgaggatgcaaggcaagagaatggaactccagaattcacagatagaacaaatggatgagaaatatttcatgcaaaatataaagtgtcctgaggatctgggttccatttacgagaggaaatgaaagtgctaaaataaattttatcttccttttaaatgtcagcatgtcagcagaagcagcacacaaaagtctttaccattttccagtattaatttttttgtaatataaatgataaaggagatgataaagaaccaatagattattgataaataaattagtaataatatgattttttgtttctatgagttctaaacagccctatacagtattcagtttccatgagaaatatttattgtatcaaagtacattgtacttaacattttaggccatccttttactgttccttgatgctttaatatatattaatttataattatcctgatatttttgtacatttttcaaacttaaaaatcaggatttttttttttttttttttggcaatagtactaacatagggttttatcttgggatacatatgtattggtctgtttgttgaccttgacatctgatcactgatgtcaatgacctactggcctcattcaggacacctgcagagagtatgcaaagtccgagagaggaaaacagaaatctgtatgtgagatggtcattgtacagaaagaagtggcccctctgcaacatgtcctcacagaaacgaaatggtgtgtagcaatcaacactagaaagtagaccttttgcaaattaatatgtccttgaccttttttgcccttttgtgggggtgaggtggggataaaaagactgtcatatcaagaactgtgacttttctttccctcaaacaataaaactcctttattatcttaatgctcccatgttaacatgtttgctgctaaattacaatgtagaattgataatggtttatagtgaactgtgctcttccctcattaaaatcccagggtgccctgtaaagatgcagatgtttcttcctgaaaacttctttttttacaaagaaaattagatgtacatgtataattcagtgtgctttgtctttctccagattaatatcggttacactgctgatgtttgtaaattaaacagatatttacttca

SEQ ID NO: 19863 - DNA, 5132 bp, Homo sapiens
  source 1..5132: mol_type = unassigned DNA
gcccaaggagctcctgctctgccagaggagggtggagagggcggtgggaggcgtgtgcctgagtgggctctactgccttgttccatattatttggtgcacattttccctggcactctgggttgctagccccgccgggcactgggcctcagacactgcgcggttccctcggagcagcaagctaaagaaagcccccagtgccggcgaggaaggaggcggcggggaaagatgcgcggcgttggctggcagatgctgtccctgtcgctggggttagtgctggcgatcctgaacaaggtggcaccgcaggcgtgcccggcgcagtgctcttgctcgggcagcacagtggactgtcacgggctggcgctgcgcagcgtgcccaggaatatcccccgcaacaccgagagactggatttaaatggaaataacatcacaagaattacgaagacagattttgctggtcttagacatctaagagttcttcagcttatggagaataagattagcaccattgaaagaggagcattccaggatcttaaagaactagagagactgcgtttaaacagaaatcaccttcagctgtttcctgagttgctgtttcttgggactgcgaagctatacaggcttgatctcagtgaaaaccaaattcaggcaatcccaaggaaagctttccgtggggcagttgacataaaaaatttgcaactggattacaaccagatcagctgtattgaagatggggcattcagggctctccgggacctggaagtgctcactctcaacaataacaacattactagactttctgtggcaagtttcaaccatatgcctaaacttaggacttttcgactgcattcaaacaacctgtattgtgactgccacctggcctggctctccgactggcttcgccaaaggcctcgggttggtctgtacactcagtgtatgggcccctcccacctgagaggccataatgtagccgaggttcaaaaacgagaatttgtctgcagtgatgaggaagaaggtcaccagtcatttatggctccttcttgtagtgttttgcactgccctgccgcctgtacctgtagcaacaatatcgtagactgtcgtgggaaaggtctcactgagatccccacaaatcttccagagaccatcacagaaatacgtttggaacagaacacaatcaaagtcatccctcctggagctttctcaccatataaaaagcttagacgaattgacctgagcaataatcagatctctgaacttgcaccagatgctttccaaggactacgctctctgaattcacttgtcctctatggaaataaaatcacagaactccccaaaagtttatttgaaggactgttttccttacagctcctattattgaatgccaacaagataaactgccttcgggtagatgcttttcaggatctccacaacttgaaccttctctccctatatgacaacaagcttcagaccatcgccaaggggaccttttcacctcttcgggccattcaaactatgcatttggcccagaacccctttatttgtgactgccatctcaagtggctagcggattatctccataccaacccgattgagaccagtggtgcccgttgcaccagcccccgccgcctggcaaacaaaagaattggacagatcaaaagcaagaaattccgttgttcagctaaagaacagtatttcattccaggtacagaagattatcgatcaaaattaagtggagactgctttgcggatctggcttgccctgaaaagtgtcgctgtgaaggaaccacagtagattgctctaatcaaaagctcaacaaaatcccggagcacattccccagtacactgcagagttgcgtctcaataataatgaatttaccgtgttggaagccacaggaatctttaagaaacttcctcaattacgtaaaataaactttagcaacaataagatcacagatattgaggagggagcatttgaaggagcatctggtgtaaatgaaatacttcttacgagtaatcgtttggaaaatgtgcagcataagatgttcaagggattggaaagcctcaaaactttgatgttgagaagcaatcgaataacctgtgtggggaatgacagtttcataggactcagttctgtgcgtttgctttctttgtatgataatcaaattactacagttgcaccaggggcatttgatactctccattctttatctactctaaacctcttggccaatccttttaactgtaactgctacctggcttggttgggagagtggctgagaaagaagagaattgtcacgggaaatcctagatgtcaaaaaccatacttcctgaaagaaatacccatccaggatgtggccattcaggacttcacttgtgatgacggaaatgatgacaatagttgctccccactttctcgctgtcctactgaatgtacttgcttggatacagtcgtccgatgtagcaacaagggtttgaaggtcttgccgaaaggtattccaagagatgtcacagagttgtatctggatggaaaccaatttacactggttcccaaggaactctccaactacaaacatttaacacttatagacttaagtaacaacagaataagcacgctttctaatcagagcttcagcaacatgacccagctcctcaccttaattcttagttacaaccgtctgagatgtattcctcctcgcacctttgatggattaaagtctcttcgattactttctctacatggaaatgacatttctgttgtgcctgaaggtgctttcaatgatctttctgcattatcacatctagcaattggagccaaccctctttactgtgattgtaacatgcagtggttatccgactgggtgaagtcggaatataaggagcctggaattgctcgttgtgctggtcctggagaaatggcagataaacttttactcacaactccctccaaaaaatttacctgtcaaggtcctgtggatgtcaatattctagctaagtgtaacccctgcctatcaaatccgtgtaaaaatgatggcacatgtaatagtgatccagttgacttttaccgatgcacctgtccatatggtttcaaggggcaggactgtgatgtcccaattcatgcctgcatcagtaacccatgtaaacatggaggaacttgccacttaaaggaaggagaagaagatggattctggtgtatttgtgctgatggatttgaaggagaaaattgtgaagtcaacgttgatgattgtgaagataatgactgtgaaaataattctacatgtgtcgatggcattaataactacacatgcctttgcccacctgagtatacagctgctaatctgaatgaggtggaaaaaggtgagttgtgtgaggagaagctggacttctgtgcccaggacctgaacccctgccagcacgattcaaagtgcatcctaactccaaagggattcaaatgtgactgcacaccagggtacgtaggtgaacactgcgacatcgattttgacgactgccaagacaacaagtgtaaaaacggagcccactgcacagatgcagtgaacggctatacgtgcatatgccccgaaggttacagtggcttgttctgtgagttttctccacccatggtcctccctcgtaccagcccctgtgataattttgattgtcagaatggagctcagtgtatcgtcagaataaatgagccaatatgtcagtgtttgcctggctatcagggagaaaagtgtgaaaaattggttagtgtgaattttataaacaaagagtcttatcttcagattccttcagccaaggttcggcctcagacgaacataacacttcagattgccacagatgaagacagcggaatcctcctgtataagggtgacaaagaccatatcgcggtagaactctatcgggggcgtgttcgtgccagctatgacaccggctctcatccagcttctgccatttacagtgtggagacaatcaatgatggaaacttccacattgtggaactacttgccttggatcagagtctctctttgtccgtggatggtgggaaccccaaaatcatcactaacttgtcaaagcagtccactctgaattttgactctccactctatgtaggaggcatgccagggaagagtaacgtggcatctctgcgccaggcccctgggcagaacggaaccagcttccacggctgcatccggaacctttacatcaacagtgagctgcaggacttccagaaggtgccgatgcaaacaggcattttgcctggctgtgagccatgccacaagaaggtgtgtgcccatggcacatgccagcccagcagccaggcaggcttcacctgcgagtgccaggaaggatggatggggcccctctgtgaccaacggaccaatgacccttgccttggaaataaatgcgtacatggcacctgcttgcccatcaatgcgttctcctacagctgtaagtgcttggagggccatggaggtgtcctctgtgatgaagaggaggatctgtttaacccatgccaggcgatcaagtgcaagcatgggaagtgcaggctttcaggtctggggcagccctactgtgaatgcagcagtggatacacgggggacagctgtgatcgagaaatctcttgtcgaggggaaaggataagagattattaccaaaagcagcagggctatgctgcttgccaaacaaccaagaaggtgtcccgattagagtgcagaggtgggtgtgcaggagggcagtgctgtggaccgctgaggagcaagcggcggaaatactctttcgaatgcactgacggctcctcctttgtggacgaggttgagaaagtggtgaagtgcggctgtacgaggtgtgtgtcctaaacacactcccggcagctctgtctttggaaaaggttgtatacttcttgaccgtgtgggactaatgaatgcttcatagtggaaatatttgaaatatattgtaaaatacagaacagacttatttttattatgagaataaagactttttttctgcatttggaaaaaaaaaaaaagaaatgcttgaactaaagcttcccctatgctggagaagtatgaagaaagatatacctggagacattagaacagcgatgggaaccattgcaactcgggtccatctttg

SEQ ID NO: 19864 - DNA, 4752 bp, Homo sapiens
  source 1..4752: mol_type = unassigned DNA
atgcgcggcgttggctggcagatgctgtccctgtcgctggggttagtgctggcgatcctgaacaaggtggcaccgcaggcgtgcccggcgcagtgctcttgctcgggcagcacagtggactgtcacgggctggcgctgcgcagcgtgcccaggaatatcccccgcaacaccgagagactggatttaaatggaaataacatcacaagaattacgaagacagattttgctggtcttagacatctaagagttcttcagcttatggagaataagattagcaccattgaaagaggagcattccaggatcttaaagaactagagagactgcgtttaaacagaaatcaccttcagctgtttcctgagttgctgtttcttgggactgcgaagctatacaggcttgatctcagtgaaaaccaaattcaggcaatcccaaggaaagctttccgtggggcagttgacataaaaaatttgcaactggattacaaccagatcagctgtattgaagatggggcattcagggctctccgggacctggaagtgctcactctcaacaataacaacattactagactttctgtggcaagtttcaaccatatgcctaaacttaggacttttcgactgcattcaaacaacctgtattgtgactgccacctggcctggctctccgactggcttcgccaaaggcctcgggttggtctgtacactcagtgtatgggcccctcccacctgagaggccataatgtagccgaggttcaaaaacgagaatttgtctgcagtgatgaggaagaaggtcaccagtcatttatggctccttcttgtagtgttttgcactgccctgccgcctgtacctgtagcaacaatatcgtagactgtcgtgggaaaggtctcactgagatccccacaaatcttccagagaccatcacagaaatacgtttggaacagaacacaatcaaagtcatccctcctggagctttctcaccatataaaaagcttagacgaattgacctgagcaataatcagatctctgaacttgcaccagatgctttccaaggactacgctctctgaattcacttgtcctctatggaaataaaatcacagaactccccaaaagtttatttgaaggactgttttccttacagctcctattattgaatgccaacaagataaactgccttcgggtagatgcttttcaggatctccacaacttgaaccttctctccctatatgacaacaagcttcagaccatcgccaaggggaccttttcacctcttcgggccattcaaactatgcatttggcccagaacccctttatttgtgactgccatctcaagtggctagcggattatctccataccaacccgattgagaccagtggtgcccgttgcaccagcccccgccgcctggcaaacaaaagaattggacagatcaaaagcaagaaattccgttgttcaggtacagaagattatcgatcaaaattaagtggagactgctttgcggatctggcttgccctgaaaagtgtcgctgtgaaggaaccacagtagattgctctaatcaaaagctcaacaaaatcccggagcacattccccagtacactgcagagttgcgtctcaataataatgaatttaccgtgttggaagccacaggaatctttaagaaacttcctcaattacgtaaaataaactttagcaacaataagatcacagatattgaggagggagcatttgaaggagcatctggtgtaaatgaaatacttcttacgagtaatcgtttggaaaatgtgcagcataagatgttcaagggattggaaagcctcaaaactttgatgttgagaagcaatcgaataacctgtgtggggaatgacagtttcataggactcagttctgtgcgtttgctttctttgtatgataatcaaattactacagttgcaccaggggcatttgatactctccattctttatctactctaaacctcttggccaatccttttaactgtaactgctacctggcttggttgggagagtggctgagaaagaagagaattgtcacgggaaatcctagatgtcaaaaaccatacttcctgaaagaaatacccatccaggatgtggccattcaggacttcacttgtgatgacggaaatgatgacaatagttgctccccactttctcgctgtcctactgaatgtacttgcttggatacagtcgtccgatgtagcaacaagggtttgaaggtcttgccgaaaggtattccaagagatgtcacagagttgtatctggatggaaaccaatttacactggttcccaaggaactctccaactacaaacatttaacacttatagacttaagtaacaacagaataagcacgctttctaatcagagcttcagcaacatgacccagctcctcaccttaattcttagttacaaccgtctgagatgtattcctcctcgcacctttgatggattaaagtctcttcgattactttctctacatggaaatgacatttctgttgtgcctgaaggtgctttcaatgatctttctgcattatcacatctagcaattggagccaaccctctttactgtgattgtaacatgcagtggttatccgactgggtgaagtcggaatataaggagcctggaattgctcgttgtgctggtcctggagaaatggcagataaacttttactcacaactccctccaaaaaatttacctgtcaaggtcctgtggatgtcaatattctagctaagtgtaacccctgcctatcaaatccgtgtaaaaatgatggcacatgtaatagtgatccagttgacttttaccgatgcacctgtccatatggtttcaaggggcaggactgtgatgtcccaattcatgcctgcatcagtaacccatgtaaacatggaggaacttgccacttaaaggaaggagaagaagatggattctggtgtatttgtgctgatggatttgaaggagaaaattgtgaagtcaacgttgatgattgtgaagataatgactgtgaaaataattctacatgtgtcgatggcattaataactacacatgcctttgcccacctgagtatacaggtgagttgtgtgaggagaagctggacttctgtgcccaggacctgaacccctgccagcacgattcaaagtgcatcctaactccaaagggattcaaatgtgactgcacaccagggtacgtaggtgaacactgcgacatcgattttgacgactgccaagacaacaagtgtaaaaacggagcccactgcacagatgcagtgaacggctatacgtgcatatgccccgaaggttacagtggcttgttctgtgagttttctccacccatggtcctccctcgtaccagcccctgtgataattttgattgtcagaatggagctcagtgtatcgtcagaataaatgagccaatatgtcagtgtttgcctggctatcagggagaaaagtgtgaaaaattggttagtgtgaattttataaacaaagagtcttatcttcagattccttcagccaaggttcggcctcagacgaacataacacttcagattgccacagatgaagacagcggaatcctcctgtataagggtgacaaagaccatatcgcggtagaactctatcgggggcgtgttcgtgccagctatgacaccggctctcatccagcttctgccatttacagtgtggagacaatcaatgatggaaacttccacattgtggaactacttgccttggatcagagtctctctttgtccgtggatggtgggaaccccaaaatcatcactaacttgtcaaagcagtccactctgaattttgactctccactctatgtaggaggcatgccagggaagagtaacgtggcatctctgcgccaggcccctgggcagaacggaaccagcttccacggctgcatccggaacctttacatcaacagtgagctgcaggacttccagaaggtgccgatgcaaacaggcattttgcctggctgtgagccatgccacaagaaggtgtgtgcccatggcacatgccagcccagcagccaggcaggcttcacctgcgagtgccaggaaggatggatggggcccctctgtgaccaacggaccaatgacccttgccttggaaataaatgcgtacatggcacctgcttgcccatcaatgcgttctcctacagctgtaagtgcttggagggccatggaggtgtcctctgtgatgaagaggaggatctgtttaacccatgccaggcgatcaagtgcaagcatgggaagtgcaggctttcaggtctggggcagccctactgtgaatgcagcagtggatacacgggggacagctgtgatcgagaaatctcttgtcgaggggaaaggataagagattattaccaaaagcagcagggctatgctgcttgccaaacaaccaagaaggtgtcccgattagagtgcagaggtgggtgtgcaggagggcagtgctgtggaccgctgaggagcaagcggcggaaatactctttcgaatgcactgacggctcctcctttgtggacgaggttgagaaagtggtgaagtgcggctgtacgaggtgtgtgtcctaaacacactcccggcagctctgtctttggaaaaggttgtatacttcttgaccgtgtgggactaatgaatgcttcatagtggaaatatttgaaatatattgtaaaatacagaacagacttatttttattatgagaataaagactttttttctgcatttggaaaaaaaaaaaaagaaa

SEQ ID NO: 19865 - DNA, 532 bp, Homo sapiens
  source 1..532: mol_type = unassigned DNA
tttgcgagtctctaatgaagaagtaaatgcagacccggtgttgacggcccacgcgctcctgatgaggcgcttccagagttcagcgaagtggagcatggaggccgttctctttgtgaacgccgaggccgccgccccgcgccagtccggccgccctagggatttaaatggaaataacatcacaagaattacgaagacagattttgctggtcttagacatctaagagttcttcagcttatggagaataagattagcaccattgaaagaggagcattccaggatcttaaagaactagagagactgcgtttaaacagaaatcaccttcagctgtttcctgagttgctgtttcttgggactgcgaagctatacaggcttgatctcagtgaaaaccaaattcaggcaatcccaaggaaagctttccgtggggcagttgacataaaaaatttgcaactggattacaaccagatcagctgtattgaagatggggcattcagggctctccgggacctggaagtgctcactctcaacaataac

SEQ ID NO: 19866 - DNA, 443 bp, Homo sapiens
  source 1..443: mol_type = unassigned DNA
attgtccctttgtcttgatggtgtaaggaagtggaatcttttcagagccctggcagtgctgggcagtgaaaagttggaaaacttggatcattagaagaaaattatcaactatgtttcaattcccaccttgttagaaattatttaaaacctttgttccaacaatttttatttagaaactttagcaacaataagatcacagatattgaggagggagcatttgaaggagcatctggtgtaaatgaaatacttcttacgagtaatcgtttggaaaatgtgcagcataagatgttcaagggattggaaagcctcaaaactttgatgttgagaagcaatcgaataacctgtgtggggaatgacagtttcataggactcagttctgtgcgtttgctttctttgtatgataatcaaattactacagttgcaccaggggcatttgatactct

SEQ ID NO: 19867 - DNA, 712 bp, Homo sapiens
  source 1..712: mol_type = unassigned DNA
gaaatgatgacaatagttgctccccactttctcgctgtcctactgaatgtacttgcttggatacagtcgtccgatgtagcaacaagggtttgaaggtcttgccgaaaggtattccaagagatgtcacagagttgtatctggatggaaaccaatttacactggttcccaaggaactctccaactacaaacatttaacacttatagacttaagtaacaacagaataagcacgctttctaatcagagcttcagcaacatgacccagctcctcaccttaattcttagttacaaccgtctgagatgtattcctcctcgcacctttgatggattaaagtctcttcgattactttctctacatggaaatgacatttctgttgtgcctgaaggtgctttcaatgatctttctgcattatcacatctttctagtgtacatgtgcacaacgtgcaggtttgtttgtgccttgtcttttaccccctagatcataaagagctctgctttttcacttttcccacttcctcccctgtcacatcaaggacttaaatgttgatagagatgagatcaaatgactaaaaaacatcattttgctcatttttaatttggaagggtttgaatctgacatacatatgcaggtaacattcactacattctgattcttaaacggggcattaaaacttccacagtatcgagtattatgattctacacatatatttca

SEQ ID NO: 19868 - DNA, 767 bp, Homo sapiens
  source 1..767: mol_type = unassigned DNA
acagagttgtatctggatggaaaccaatttacactggttcccaaggaactctccaactacaaacatttaacacttatagacttaagtaacaacagaataagcacgctttctaatcagagcttcagcaacatgacccagctcctcaccttaattcttagttacaaccgtctgagatgtattcctcctcgcacctttgatggattaaagtctcttcgattactttctctacatggaaatgacatttctgttgtgcctgaaggtgctttcaatgatctttctgcattatcacatctagcaattggagccaaccctctttactgtgattgtaacatgcagtggttatccgactgggtgaagtcggaatataaggagcctggaattgctcgttgtgctggtcctggagaaatggcagataaacttttactcacaactccctccaaaaaatttacctgtcaagggctgccagggccctgtggcttcctcataccaggtcctgtggatgtcaatattctagctaagtgtaacccctgcctatcaaatccgtgtaaaaatgatggcacatgtaatagtgatccagttgacttttaccgatgcacctgtccatatggtttcaaggggcaggactgtgatgtcccaattcatgcctgcatcagtaacccatgtaaacatggaggaacttgccacttaaaggaaggagaagaagatggattctggtgtatttgtgctgatggatttgaaggagaaaattgtgaagtcaacgttgatga

SEQ ID NO: 19869 - DNA, 739 bp, Homo sapiens
  source 1..739: mol_type = unassigned DNA
atccgactgggtgaagtcggaatataaggagcctggaattgctcgttgtgctggtcctggagaaatggcagataaacttttactcacaactccctccaaaaaatttacctgtcaaggtcctgtggatgtcaatattctagctaagtgtaacccctgcctatcaaatccgtgtaaaaatgatggcacatgtaatagtgatccagttgacttttaccgatgcacctgtccatatggtttcaaggggcaggactgtgatgtcccaattcatgcctgcatcagtaacccatgtaaacatggaggaacttgccacttaaaggaaggagaagaagatggattctggtgtatttgtgctgatggatttgaaggagaaaattgtgaagtcaacgttgatgattgtgaagataatgactgtgaaaataattctacatgtgtcgatggcattaataactacacatgcctttgcccacctgagtatacaggtacaaataataggaaatattttgccttccatcagtatatctgtttgaaagcatcattggaactatgttatatatgtttagtaaatctttttttatttgataaatggtaggtgtcttgaaaatcagatgtaatgtaaataacataaggacttaaagatagtttcagctaaccaaataaaagacccaggaatctctgttcaaacatacgcatctattataaagccatgctatccagtaataaaagaagctattttgctaaa

SEQ ID NO: 19870 - DNA, 394 bp, Homo sapiens
  source 1..394: mol_type = unassigned DNA
ccagctatgacaccggctctcatccagcttctgccatttacagtgtggagacaatcaatgatggaaacttccacattgtggaactacttgccttggatcagagtctctctttgtccgtggatggtgggaaccccaaaatcatcactaacttgtcaaagcagtccactctgaattttgactctccactctatgtaggaggcatgccagggaagagtaacgtggcatctctgcgccagggtgccctgtaaagatgcagatgtttcttcctgaaaacttctttttttacaaagaaaattagatgtacatgtataattcagtgtgctttgtctttctccagattaatatcggttacactgctgatgtttgtaaattaaacagatatttacttcattaa

SEQ ID NO: 19871 - DNA, 2947 bp, Homo sapiens
  source 1..2947: mol_type = unassigned DNA
ctgattttatgatagcctattgaaactcaaatatacgtatgatgtctaaacattttcatttacaaattactctagtcaaagctgggctttttctaattgttagctttggaacaaaaaggaacagatttactaattgtttctctgtgctgtggaactttgccaatctgtatttattcttgacatgtgcacatatgtgtgttgtgcctatatcaaaatgagctattaaaaatagttttggaagaagttcatttttaaccactgaaaaaaggaccataaatatgtggtcattaaagtccttatgatggatggatatggttaaattagaaaaacttaccccagggcaaggaattttctgtcaccagtcctttcctggaaatggtaagtttcatccttttgaccctgctctagaaagcaacccacagcgagatggacatagactaaaggcctgtactcacagaacttcacagccaagagacttcattcaatacctgtcagagtgtaaccatggactacccaaatcacctgagctgcatgtagatatttagatttctgcacctctcctgttcctacaggatcagaacctcagaaggaggggagagaggagcctgtaaagctgcctttgagcatgcactgctgttggttcttatgtatgacaaacttaggacaacttctctggtccatatgctcatggtgtatagatgacaatactaagccccagagagaagaaataactgctccaagtgcacgcagaaccagaaatccttaccgtataacctagtggtttcgtacacctagctgtctgactgatgcctgctttgaatgccaatggatgagtcatttcctatgaatgggaaaggagaaggtggcataagttcagacccagagtgtgctacagttcttggtctttagaaccaacagaccccctgaagagtgagaaactgggtcttcctcagcctagaacttccagccagtagtccagagtttaggcacagctaaagcataattacggggttgtggggatgtggtggtatagccagcactctgaaagcttccagcaccctccccccttccctggatgggtgccttctgcaggatgccttccacggactaagggtctggcttaggccatggaaagattcttccgttttgccaaaatgagtgttaccagataactgtcactagtggaatgtatatatacaaagattgcaaatactctgtttttgaagggatttcatttttatttctgatttcttggactatgaagtcttcactcttaattagcaagaaagaaaaaatgatgtgaatgaggtgctgtcctgaaaagaatcaggagtgagtttttaggcattgacatcattgaccaagcttagggacgttgccaggagtgagctgaattagttgctaacttcgaatgtgggagggctggggtgaatggtcactgtgaaccccagctgtcagcccctgaaacctggtggacctaaccctgactccagagatagaggagttcttctcatcagcctaactctaacctgaactcactgggtcaccttgagcatgtcaccagggctttctgagccctagccccttgtctttaagataaggggtagaattagagcaccataaactgagctttatggagctccagacttccaggagtgtgtgcctggaggtggagggtggaggacaaacagagagggaacattcccttcccccagtcttgcctttaaggacagtagctctgcctctaggttttatatatttgtgtacatgtaaagttttctttgaagcaaattttaaagattaaccaccaatcaactaggtattttattctagttgtggattagaatttcctggagcatcttccaatacagaacaaaacaaaaacacacatctctacatctcttctccacttcacttccctaccaccctgcccaaatatcctgccataataggttggcagtgaggtcccaagcatcagtatttctgagtagcaaatggctcagaaatccccagagagcctgacctctgacctggtgttcctccccaggcatgccagggaagagtaacgtggcatctctgcgccaggcccctgggcagaacggaaccagcttccacggctgcatccggaacctttacatcaacagtgagctgcaggacttccagaaggtgccgatgcaaacaggcattttgcctggctgtgagccatgccacaagaaggtgtgtgcccatggcacatgccagcccagcagccaggcaggcttcacctgcgagtgccaggaaggatggatggggcccctctgtgaccaacggaccaatgacccttgccttggaaataaatgcgtacatggcacctgcttgcccatcaatgcgttctcctacagctgtaagtgcttggagggccatggaggtgtcctctgtgatgaagaggaggatctgtttaacccatgccaggcgatcaagtgcaagcatgggaagtgcaggctttcaggtctggggcagccctactgtgaatgcagcagtggatacacgggggacagctgtgatcgagaaatctcttgtcgaggggaaaggataagagattattaccaaaagcagcagggctatgctgcttgccaaacaaccaagaaggtgtcccgattagagtgcagaggtgggtgtgcaggagggcagtgctgtggaccgctgaggagcaagcggcggaaatactctttcgaatgcactgacggctcctcctttgtggacgaggttgagaaagtggtgaagtgcggctgtacgaggtgtgtgtcctaaacacactcccggcagctctgtctttggaaaaggttgtatacttcttgaccgtgtgggactaatgaatgcttcatagtggaaatatttgaaatatattgtaaaatacagaacagacttatttttattatgagaataaagactttttttctgcatttgg

SEQ ID NO: 19872 - DNA, 6380 bp, Homo sapiens
  source 1..6380: mol_type = unassigned DNA
cggattcatcctcaggacctaaagttgcccaaggagctcctgctctgccagaggagggtggagagggcggtgggaggcgtgtgcctgagtgggctctactgccttgttccatattatttggtgcacattttccctggcactctgggttgctagccccgccgggcactgggcctcagacactgcgcggttccctcggagcagcaagctaaagaaagcccccagtgccggcgaggaaggaggcggcggggaaagatgcgcggcgttggctggcagatgctgtccctgtcgctggggttagtgctggcgatcctgaacaaggtggcaccgcaggcgtgcccggcgcagtgctcttgctcgggcagcacagtggactgtcacgggctggcgctgcgcagcgtgcccaggaatatcccccgcaacaccgagagactggatttaaatggaaataacatcacaagaattacgaagacagattttgctggtcttagacatctaagagttcttcagcttatggagaataagattagcaccattgaaagaggagcattccaggatcttaaagaactagagagactgcgtttaaacagaaatcaccttcagctgtttcctgagttgctgtttcttgggactgcgaagctatacaggcttgatctcagtgaaaaccaaattcaggcaatcccaaggaaagctttccgtggggcagttgacataaaaaatttgcaactggattacaaccagatcagctgtattgaagatggggcattcagggctctccgggacctggaagtgctcactctcaacaataacaacattactagactttctgtggcaagtttcaaccatatgcctaaacttaggacttttcgactgcattcaaacaacctgtattgtgactgccacctggcctggctctccgactggcttcgccaaaggcctcgggttggtctgtacactcagtgtatgggcccctcccacctgagaggccataatgtagccgaggttcaaaaacgagaatttgtctgcagtgccaggcatggtggtcaccagtcatttatggctccttcttgtagtgttttgcactgccctgccgcctgtacctgtagcaacaatatcgtagactgtcgtgggaaaggtctcactgagatccccacaaatcttccagagaccatcacagaaatacgtttggaacagaacacaatcaaagtcatccctcctggagctttctcaccatataaaaagcttagacgaattgacctgagcaataatcagatctctgaacttgcaccagatgctttccaaggactacgctctctgaattcacttgtcctctatggaaataaaatcacagaactccccaaaagtttatttgaaggactgttttccttacagctcctattattgaatgccaacaagataaactgccttcgggtagatgcttttcaggatctccacaacttgaaccttctctccctatatgacaacaagcttcagaccatcgccaaggggaccttttcacctcttcgggccattcaaactatgcatttggcccagaacccctttatttgtgactgccatctcaagtggctagcggattatctccataccaacccgattgagaccagtggtgcccgttgcaccagcccccgccgcctggcaaacaaaagaattggacagatcaaaagcaagaaattccgttgttcaggtacagaagattatcgatcaaaattaagtggagactgctttgcggatctggcttgccctgaaaagtgtcgctgtgaaggaaccacagtagattgctctaatcaaaagctcaacaaaatcccggagcacattccccagtacactgcagagttgcgtctcaataataatgaatttaccgtgttggaagccacaggaatctttaagaaacttcctcaattacgtaaaataaactttagcaacaataagatcacagatattgaggagggagcatttgaaggagcatctggtgtaaatgaaatacttcttacgagtaatcgtttggaaaatgtgcagcataagatgttcaagggattggaaagcctcaaaactttgatgttgagaagcaatcgaataacctgtgtggggaatgacagtttcataggactcagttctgtgcgtttgctttctttgtatgataatcaaattactacagttgcaccaggggcatttgatactctccattctttatctactctaaacctcttggccaatccttttaactgtaactgctacctggcttggttgggagagtggctgagaaagaagagaattgtcacgggaaatcctagatgtcaaaaaccatacttcctgaaagaaatacccatccaggatgtggccattcaggacttcacttgtgatgacggaaatgatgacaatagttgctccccactttctcgctgtcctactgaatgtacttgcttggatacagtcgtccgatgtagcaacaagggtttgaaggtcttgccgaaaggtattccaagagatgtcacagagttgtatctggatggaaaccaatttacactggttcccaaggaactctccaactacaaacatttaacacttatagacttaagtaacaacagaataagcacgctttctaatcagagcttcagcaacatgacccagctcctcaccttaattcttagttacaaccgtctgagatgtattcctcctcgcacctttgatggattaaagtctcttcgattactttctctacatggaaatgacatttctgttgtgcctgaaggtgctttcaatgatctttctgcattatcacatctagcaattggagccaaccctctttactgtgattgtaacatgcagtggttatccgactgggtgaagtcggaatataaggagcctggaattgctcgttgtgctggtcctggagaaatggcagataaacttttactcacaactccctccaaaaaatttacctgtcaaggtcctgtggatgtcaatattctagctaagtgtaacccctgcctatcaaatccgtgtaaaaatgatggcacatgtaatagtgatccagttgacttttaccgatgcacctgtccatatggtttcaaggggcaggactgtgatgtcccaattcatgcctgcatcagtaacccatgtaaacatggaggaacttgccacttaaaggaaggagaagaagatggattctggtgtatttgtgctgatggatttgaaggagaaaattgtgaagtcaacgttgatgattgtgaagataatgactgtgaaaataattctacatgtgtcgatggcattaataactacacatgcctttgcccacctgagtatacaggtgagttgtgtgaggagaagctggacttctgtgcccaggacctgaacccctgccagcacgattcaaagtgcatcctaactccaaagggattcaaatgtgactgcacaccagggtacgtaggtgaacactgcgacatcgattttgacgactgccaagacaacaagtgtaaaaacggagcccactgcacagatgcagtgaacggctatacgtgcatatgccccgaaggttacagtggcttgttctgtgagttttctccacccatggtcctccctcgtaccagcccctgtgataattttgattgtcagaatggagctcagtgtatcgtcagaataaatgagccaatatgtcagtgtttgcctggctatcagggagaaaagtgtgaaaaattggttagtgtgaattttataaacaaagagtcttatcttcagattccttcagccaaggttcggcctcagacgaacataacacttcagattgccacagatgaagacagcggaatcctcctgtataagggtgacaaagaccatatcgcggtagaactctatcgggggcgtgttcgtgccagctatgacaccggctctcatccagcttctgccatttacagtgtggagacaatcaatgatggaaacttccacattgtggaactacttgccttggatcagagtctctctttgtccgtggatggtgggaaccccaaaatcatcactaacttgtcaaagcagtccactctgaattttgactctccactctatgtaggaggcatgccagggaagagtaacgtggcatctctgcgccaggcccctgggcagaacggaaccagcttccacggctgcatccggaacctttacatcaacagtgagctgcaggacttccagaaggtgccgatgcaaacaggcattttgcctggctgtgagccatgccacaagaaggtgtgtgcccatggcacatgccagcccagcagccaggcaggcttcacctgcgagtgccaggaaggatggatggggcccctctgtgaccaacggaccaatgacccttgccttggaaataaatgcgtacatggcacctgcttgcccatcaatgcgttctcctacagctgtaagtgcttggagggccatggaggtgtcctctgtgatgaagaggaggatctgtttaacccatgccaggcgatcaagtgcaagcatgggaagtgcaggctttcaggtctggggcagccctactgtgaatgcagcagtggatacacgggggacagctgtgatcgagaaatctcttgtcgaggggaaaggataagagattattaccaaaagcagcagggctatgctgcttgccaaacaaccaagaaggtgtcccgattagagtgcagaggtgggtgtgcaggagggcagtgctgtggaccgctgaggagcaagcggcggaaatactctttcgaatgcactgacggctcctcctttgtggacgaggttgagaaagtggtgaagtgcggctgtacgaggtgtgtgtcctaaacacactcccggcagctctgtctttggaaaaggttgtatacttcttgaccgtgtgggactaatgaatgcttcatagtggaaatatttgaaatatattgtaaaatacagaacagacttatttttattatgagaataaagactttttttctgcatttggaaaaaaaaaaaaagaaatgcttgaactaaagcttcccctatgctggagaagtatgaagaaagatatacctggagacattagaacagcgatgggaaccattgcaactcgggtccatctttgtaacatgctgaagacaagcagaagcacatgcacgagggacagaggagctactgtgcactgctgtgaaattgcccagagcataaaacctgtgtaccctccttcacatcaaccaagttcactaggacataccaagcacatgcgtgtgaatgaggatgcaaggcaagagaatggaactccagaattcacagatagaacaaatggatgagaaatatttcatgcaaaatataaagtgtcctgaggatctgggttccatttacgagaggaaatgaaagtgctaaaataaattttatcttccttttaaatgtcagcatgtcagcagaagcagcacacaaaagtctttaccattttccagtattaatttttttgtaatataaatgataaaggagatgataaagaaccaatagattattgataaataaattagtaataatatgattttttgtttctatgagttctaaacagccctatacagtattcagtttccatgagaaatatttattgtatcaaagtacattgtacttaacattttaggccatccttttactgttccttgatgctttaatatatattaatttataattatcctgatatttttgtacatttttcaaacttaaaaatcaggatttttttttttttttttttggcaatagtactaacatagggttttatcttgggatacatatgtattggtctgtttgttgaccttgacatctgatcactgatgtcaatgacctactggcctcattcaggacacctgcagagagtatgcaaagtccgagagaggaaaacagaaatctgtatgtgagatggtcattgtacagaaagaagtggcccctctgcaacatgtcctcacagaaacgaaatggtgtgtagcaatcaacactagaaagtagaccttttgcaaattaatatgtccttgaccttttttgcccttttgtgggggtgaggtggggataaaaagactgtcatatcaagaactgtgacttttctttccctcaaacaataaaactcctttattatcttaatgctcccatgttaacatgtttgctgctaaattacaatgtagaattgataatggtttatagtgaactgtgctcttccctcattaaaatcccagggtgccctgtaaagatgcagatgtttcttcctgaaaacttctttttttacaaagaaaattagatgtacatgtataattcagtgtgctttgtctttctccagattaatatcggttacactgctgatgtttgtaaattaaacagatatttacttcatt

SEQ ID NO: 19873 - DNA, 9706 bp, Homo sapiens
  source 1..9706: mol_type = unassigned DNA
gagagcgagcgccggccagctcacccggccgccccgtgccccagccgcagccgccgcgctccccagcccagccccaagccggacctccccgggcgccacgccccattgcgctcgccccaggtccccaacccggcccgcgggccagcggggccagggggcgctccgcacctgggcactcccagcgatgcgcagcggggcagcgccggccccgccgatggagctgctgttgctgccgccgccgccgcccggagcgccccgctccgcccgcgccccgtgcgcctgagcaccgagctcgcccctcctccgcgctaactccgccgcccgctccccaggccgcccgcgctccccgcgcgcctcctcgggctccacgcgtcttgccccgcagaggcagcctcctccaggagcggggccctgcacaccatggcccccgggtgggcaggggtcggcgccgccgtgcgcgcccgcctggcgctggccttggcgctggcgagcgtcctgagtgggcctccagccgtcgcctgccccaccaagtgtacctgctccgctgccagcgtggactgccacgggctgggcctccgcgcggttcctcggggcatcccccgcaacgctgagcgccttgacctggacagaaataatatcaccaggatcaccaagatggacttcgctgggctcaagaacctccgagtcttgcatctggaagacaaccaggtcagcgtcatcgagagaggcgccttccaggacctgaagcagctagagcgactgcgcctgaacaagaataagctgcaagtccttccagaattgcttttccagagcacgccgaagctcaccagactagatttgagtgaaaaccagatccaggggatcccgaggaaggcgttccgcggcatcaccgatgtgaagaacctgcaactggacaacaaccacatcagctgcattgaagatggagccttccgagcgctgcgcgatttggagatccttaccctcaacaacaacaacatcagtcgcatcctggtcaccagcttcaaccacatgccgaagatccgaactctgcgcctccactccaaccacctgtactgcgactgccacctggcctggctctcggattggctgcgacagcgacggacagttggccagttcacactctgcatggctcctgtgcatttgaggggcttcaacgtggcggatgtgcagaagaaggagtacgtgtgcccagccccccactcggagcccccatcctgcaatgccaactccatctcctgcccttcgccctgcacgtgcagcaataacatcgtggactgtcgaggaaagggcttgatggagattcctgccaacttgccggagggcatcgtcgaaatacgcctagaacagaactccatcaaagccatccctgcaggagccttcacccagtacaagaaactgaagcgaatagacatcagcaagaatcagatatcggatattgctccagatgccttccagggcctgaaatcactcacatcgctggtcctgtatgggaacaagatcaccgagattgtcaagggactgtttgatgggctggtgtccctacagctgctcctcctcaatgccaacaagatcaactgcctgcgggtgaacacgtttcaggacctgcagaacctcaacttgctctccctgtatgacaacaagctgcagaccatcagcaaggggctcttcgcccctctgcagtccatccagacactccacttagcccaaaacccatttgtgtgcgactgccacttgaagtggctggccgactacctccaggacaaccccatcgagacaagcggggcccgctgcagcagcccgcgccgactcgccaacaagcgcatcagccagatcaagagcaagaagttccgctgctcaggctccgaggattaccgcagcaggttcagcagcgagtgcttcatggacctcgtgtgccccgagaagtgtcgctgtgagggcacgattgtggactgctccaaccagaagctggtccgcatcccaagccacctccctgaatatgtcaccgacctgcgactgaatgacaatgaggtatctgttctggaggccactggcatcttcaagaagttgcccaacctgcggaaaataaatctgagtaacaataagatcaaggaggtgcgagagggagctttcgatggagcagccagcgtgcaggagctgatgctgacagggaaccagctggagaccgtgcacgggcgcgtgttccgtggcctcagtggcctcaaaaccttgatgctgaggagtaacttgatcggctgtgtgagtaatgacacctttgccggcctgagttcggtgagactgctgtccctctatgacaatcggatcaccaccatcacccctggggccttcaccacgcttgtctccctgtccaccataaacctcctgtccaaccccttcaactgcaactgccacctggcctggctcggcaagtggttgaggaagaggcggatcgtcagtgggaaccctaggtgccagaagccatttttcctcaaggagattcccatccaggatgtggccatccaggacttcacctgtgatggcaacgaggagagtagctgccagctgagcccgcgctgcccggagcagtgcacctgtatggagacagtggtgcgatgcagcaacaaggggctccgcgccctccccagaggcatgcccaaggatgtgaccgagctgtacctggaaggaaaccacctaacagccgtgcccagagagctgtccgccctccgacacctgacgcttattgacctgagcaacaacagcatcagcatgctgaccaattacaccttcagtaacatgtctcacctctccactctgatcctgagctacaaccggctgaggtgcatccccgtccacgccttcaacgggctgcggtccctgcgagtgctaaccctccatggcaatgacatttccagcgttcctgaaggctccttcaacgacctcacatctctttcccatctggcgctgggaaccaacccactccactgtgactgcagtcttcggtggctgtcggagtgggtgaaggcggggtacaaggagcctggcatcgcccgctgcagtagccctgagcccatggctgacaggctcctgctcaccaccccaacccaccgcttccagtgcaaagggccagtggacatcaacattgtggccaaatgcaatgcctgcctctccagcccgtgcaagaataacgggacatgcacccaggaccctgtggagctgtaccgctgtgcctgcccctacagctacaagggcaaggactgcactgtgcccatcaacacctgcatccagaacccctgtcagcatggaggcacctgccacctgagtgacagccacaaggatgggttcagctgctcctgccctctgggctttgaggggcagcggtgtgagatcaacccagatgactgtgaggacaacgactgcgaaaacaatgccacctgcgtggacgggatcaacaactacgtgtgtatctgtccgcctaactacacaggtgagctatgcgacgaggtgattgaccactgtgtgcctgagctgaacctctgtcagcatgaggccaagtgcatccccctggacaaaggattcagctgcgagtgtgtccctggctacagcgggaagctctgtgagacagacaatgatgactgtgtggcccacaagtgccgccacggggcccagtgcgtggacacaatcaatggctacacatgcacctgcccccagggcttcagtggacccttctgtgaacaccccccacccatggtcctactgcagaccagcccatgcgaccagtacgagtgccagaacggggcccagtgcatcgtggtgcagcaggagcccacctgccgctgcccaccaggcttcgccggccccagatgcgagaagctcatcactgtcaacttcgtgggcaaagactcctacgtggaactggcctccgccaaggtccgaccccaggccaacatctccctgcaggtggccactgacaaggacaacggcatccttctctacaaaggagacaatgaccccctggcactggagctgtaccagggccacgtgcggctggtctatgacagcctgagttcccctccaaccacagtgtacagtgtggagacagtgaatgatgggcagtttcacagtgtggagctggtgacgctaaaccagaccctgaacctagtagtggacaaaggaactccaaagagcctggggaagctccagaagcagccagcagtgggcatcaacagccccctctaccttggaggcatccccacctccaccggcctctctgccttgcgccagggcacggaccggcctctaggcggcttccacggatgcatccatgaggtgcgcatcaacaacgagctgcaggacttcaaggccctcccaccacagtccctgggggtgtcaccaggctgcaagtcctgcaccgtgtgcaagcacggcctgtgccgctccgtggagaaggacagcgtggtgtgcgagtgccgcccaggctggaccggcccactctgcgatcaggaggcccgggacccctgcctcggccacagatgccaccatggaaaatgtgtggcaactgggacctcatacatgtgcaagtgtgccgagggctatggaggggacttgtgtgacaacaagaatgactctgccaatgcctgctcagccttcaagtgtcaccatgggcagtgccacatctcagaccaaggggagccctactgcctgtgccagcccggctttagcggcgagcactgccaacaagagaatccgtgcctgggacaagtagtccgagaggtgatccgccgccagaaaggttatgcatcatgtgccacagcctccaaggtgcccatcatggaatgtcgtgggggctgtgggccccagtgctgccagcccacccgcagcaagcggcggaaatacgtcttccagtgcacggacggctcctcgtttgtagaagaggtggagagacacttagagtgcggctgcctcgcgtgttcctaagcccctgcccgcctgcctgccacctctcggactccagcttgatggagttgggacagccatgtgggaccccctggtgattcagcatgaaggaaatgaagctggagaggaaggtaaagaagaagagaatattaagtatattgtaaaataaacaaaaaatagaacttatttttattatggaaagtgactattttcatcttttattatataaatatattacaccatctgcgtatatgtaccatatagtgagttatttttaccaagttttgtgttgtgtatttgttgtgtttttaaaaatagctgtttaaaaatttaagaaaaaaatagactaataaaaatgctttaaaacaaaaggataagaataaagaatgatagcctgtctgaggaaggaggaagatgttttcatgtttatgaaacggtattatgtcggcagtagaccaagagctgctcattgagatcagaaaaaggaataagaggaagagagagaaggaaaagacctttgtttcttgttttttaactcccttttatttttcctcccctaaaattacccagcttttcggagtcctggatgtcagtgcccaaaatgcccagttcttccaggaaaagctgctgagccctggccttctcagtctcactgccactcaaaaatattgctgtccctgtctgtcccagaccccccttcagggtatctgaacccactgggggacccctcttctccttcctgggtggccctggcttccgtatctgaacccactgggggacccctcttctccttcctggctggccctggcttccaatcgaggactgactattgaagtctgctacaggtgtcatttggaactgtcttaccaaattttaaaacagctgctatttttcctgctcctccccaggagaggggtcttcctagaggaggcgagggaagagaatatcatggtgtctcctcaggacccatgcactggccctctctcctccttccaggtaatttttcattggaatgtatcccagtagagaaggtagtcagcccttcttggaagcggaaggctgggagccaagtcaagtctgcccacagcgctagatgtccaactctggaaggttcttggaggctcttgttgtaagacaggcctctgccacctgatcctccaggtcaccagcatgacgatagagactccttgcccatctgtgacactttccaatgcatatccaaactttaccttattttatctatgcaacccctgcctccctgggaaggataagggagtagagctgggttcactaagaaggaagtttaggccctcacaggctctggaacttgccttaagccacacaccagataagtggaggagccagaccagaagtccagacccaaagcttgagattcttcctctagaatgggtgagcacaggtgattcaggcggcttaaatccatcagagcagccctgccggaaaaggaaataatatgatgttttttcctgctcttgttctgccttgctcactccttctccctccgcagtatctggaaagattctggagaccagggcttatgcatctagggaaagtgaccaagggcagcctatccagcctctgcctccattcctgaaggggacttccctgcccctgtttctttccatgtctctccctccctcactcccatttgcccccttccaccccatcaggttagccacatatcttccagggctcagctgttcacaccaactccctggctcttatcatccatccctccttcccccaggagcttccactgtaggagtttcagggagaagagtttggaattcattggacctttcagccctcaggttccctagaggagcctagttgatctgtgagtaccaatggtgggccaaagacgcagggaataatgaagggagaaagaaaagaaaggaagatggaggaaaacgaggcaactggaagaaggaaggaaggaaagaaggaagggatggaggggatgaagagaagggagagagggatatagctgaggaatttatctaaaaatgtgcatgtaaatctccattatgttccaggtactgtgccttatgatggctttgttttttgttgtcattagagacaaggtcttgctttgtcacccaggctggagtagagtggttcgatcatagctcaccgcagcctcaacctcctaggctcaagccatcttcctgcctcagtctcccaaaatgctgggattacaggtgtgagccactatgctcagcctgtttcaaacattattataatagcagatttatttagtactttattatacatcagataccactctaattgtgaaatagatatatattcatttaattattgaaacaaccatgtagttaaaacactattaactcattttacagttgagtagactgagacacagagaagttaaagaacttgcccaagagtaaatgtctaataaaccgtagagccaggatctgggcccaggctgtctgactccagaacttgctcactcaaccactaaaccatcctgcttctcatgggaaagaaacacatcctgcctttgaggatcctacagcctgtgacaaaaacagtcataaaaatggacaattgccttattacacaaggagctcttaagtggcaatacaagcaatggaagtggctgtccagaggagggaacttctagtcctaggtctttaaggatgaataggagtttgccagagtgagaaagggaattgaactttcctgggagtggccttttaaaaagcaatgagatatggccaggcctggcttgtttggggaagagtcaaaatctagggtggcaagagtatgggaagcacactgaggagcagagagaaatggggtaggtaggaaggtagggttttgaccacaaagagctgtgcatgctaaactgggccacaggtgccagcagggttgtttgaggaagggaagagcaagacaagctctggtttaggaagagagctgtggcagcataaaggcctgaaagaggagacagagctgtcacccaaaatggacttgagagctccctgtggtttactctgtggctagaaaacactgccggccagatggatcacaaatgtctatggtagcttagaagctctgctcttgaagaggatcctgggatctgcccaacacccttcccaacctccatttccccatccccacctccattgccccatcccccctctccccctaggcaggtggatctgagccttatcccaccaccaatgcccctgctagcctctccccacccagcccagagcctactcagcctgccatctcaagagccccaccgagggtcactggcttcctgggaggagtcaccaggctgccagctttccctctgcctccccaaggaacctgagacctccctctgctcatcaccctgggcccaatcctgaatccagcccccatcaaccaagacagcaaaagggccaggtctgtcccttataattttgagccttctccctcaagtttggaagccctgactttaagaaatgccaaatgcaaggaccattaagaaaattctccccgaaatgaggctcctctaacaaatgatgattaaaacgctctctccttgagcagtcacattctagaaacaggacattccatgaggcaggaagagttcagttaatttgctcctgaaaaagtgtggttcagtgtttgtgtggcaatgtacgtgggcagaagaggccgctcaagctgtgtcccccctgagcaggattcaggaaagggaaaagaagttctcttcaactcagccaaggggccgtacgatggccgatgagattatgtatttaaaagttctttgtaaagtgtaaactaaaaaccttaaatgtaagatgctgttgttattattactgttgttgttgctgttatggacatgccaaaaggcccttgttagaagacagttttgccttttcaatctcatagcaaggaactcaagtctgatgcttcaaaaagatgagaagaagggcaagaagagggataactcccaagctcagagggaaaaaaaaggtgggggaaaagagccccagggtgaccttcaggaaaggccaggaccaggatgatctaacctttcccttcaccagaaacaaagctattgccagactgaaccctaaagtcaagcagtcacccactgcctttgctgggagcagaagcccatagcaacaagtgacctgcccctcagactcaagatcccagataccagagctggaggagtcatagggcattactggtaggcaggaaaactgagggtcgaacaaatggaagaatgcggtgatcatagaccaaagacacacagataattaaccccatgtgtccacccaggccaaagttcttcctgctaccccacagtggatgtccaggcagatggtccccacatgatggggaagcagagggcatagtgtggttttgtgggacttgttcatgttttgtagtgtgggctcaacagtgccaaaggaaacactagggaaaagttggtgaaacatgccagctagcaggaccagtaaaggcataatcaggcatttggcaaagcttgcttttctaattcaatgataggttctaataggaaatttttgaagattttttaaaacaatgttatagtggcacttccccagtatggaataaataacatgcattcttttttcaatatactgtcatattcagatgtcattaaaataaatggatgagtcacagaggagctatcagatgctctcatgactaccataactca

SEQ ID NO: 19874 - DNA, 4895 bp, Homo sapiens
  source 1..4895: mol_type = unassigned DNA
cgcgcgcctcctcgggctccacgcgtcttgccccgcagaggcagcctcctccaggagcggggccctgcacaccatggcccccgggtgggcaggggtcggcgccgccgtgcgcgcccgcctggcgctggccttggcgctggcgagcgtcctgagtgggcctccagccgtcgcctgccccaccaagtgtacctgctccgctgccagcgtggactgccacgggctgggcctccgcgcggttcctcggggcatcccccgcaacgctgagcgccttgacctggacagaaataatatcaccaggatcaccaagatggacttcgctgggctcaagaacctccgagtcttgcatctggaagacaaccaggtcagcgtcatcgagagaggcgccttccaggacctgaagcagctagagcgactgcgcctgaacaagaataagctgcaagtccttccagaattgcttttccagagcacgccgaagctcaccagactagatttgagtgaaaaccagatccaggggatcccgaggaaggcgttccgcggcatcaccgatgtgaagaacctgcaactggacaacaaccacatcagctgcattgaagatggagccttccgagcgctgcgcgatttggagatccttaccctcaacaacaacaacatcagtcgcatcctggtcaccagcttcaaccacatgccgaagatccgaactctgcgcctccactccaaccacctgtactgcgactgccacctggcctggctctcggattggctgcgacagcgacggacagttggccagttcacactctgcatggctcctgtgcatttgaggggcttcaacgtggcggatgtgcagaagaaggagtacgtgtgcccagccccccactcggagcccccatcctgcaatgccaactccatctcctgcccttcgccctgcacgtgcagcaataacatcgtggactgtcgaggaaagggcttgatggagattcctgccaacttgccggagggcatcgtcgaaatacgcctagaacagaactccatcaaagccatccctgcaggagccttcacccagtacaagaaactgaagcgaatagacatcagcaagaatcagatatcggatattgctccagatgccttccagggcctgaaatcactcacatcgctggtcctgtatgggaacaagatcaccgagattgtcaagggactgtttgatgggctggtgtccctacagctgctcctcctcaatgccaacaagatcaactgcctgcgggtgaacacgtttcaggacctgcagaacctcaacttgctctccctgtatgacaacaagctgcagaccatcagcaaggggctcttcgcccctctgcagtccatccagacactccacttagcccaaaacccatttgtgtgcgactgccacttgaagtggctggccgactacctccaggacaaccccatcgagacaagcggggcccgctgcagcagcccgcgccgactcgccaacaagcgcatcagccagatcaagagcaagaagttccgctgctcaggctccgaggattaccgcagcaggttcagcagcgagtgcttcatggacctcgtgtgccccgagaagtgtcgctgtgagggcacgattgtggactgctccaaccagaagctggtccgcatcccaagccacctccctgaatatgtcaccgacctgcgactgaatgacaatgaggtatctgttctggaggccactggcatcttcaagaagttgcccaacctgcggaaaataaatctgagtaacaataagatcaaggaggtgcgagagggagctttcgatggagcagccagcgtgcaggagctgatgctgacagggaaccagctggagaccgtgcacgggcgcgtgttccgtggcctcagtggcctcaaaaccttgatgctgaggagtaacttgatcggctgtgtgagtaatgacacctttgccggcctgagttcggtgagactgctgtccctctatgacaatcggatcaccaccatcacccctggggccttcaccacgcttgtctccctgtccaccataaacctcctgtccaaccccttcaactgcaactgccacctggcctggctcggcaagtggttgaggaagaggcggatcgtcagtgggaaccctaggtgccagaagccatttttcctcaaggagattcccatccaggatgtggccatccaggacttcacctgtgatggcaacgaggagagtagctgccagctgagcccgcgctgcccggagcagtgcacctgtatggagacagtggtgcgatgcagcaacaaggggctccgcgccctccccagaggcatgcccaaggatgtgaccgagctgtacctggaaggaaaccacctaacagccgtgcccagagagctgtccgccctccgacacctgacgcttattgacctgagcaacaacagcatcagcatgctgaccaattacaccttcagtaacatgtctcacctctccactctgatcctgagctacaaccggctgaggtgcatccccgtccacgccttcaacgggctgcggtccctgcgagtgctaaccctccatggcaatgacatttccagcgttcctgaaggctccttcaacgacctcacatctctttcccatctggcgctgggaaccaacccactccactgtgactgcagtcttcggtggctgtcggagtgggtgaaggcggggtacaaggagcctggcatcgcccgctgcagtagccctgagcccatggctgacaggctcctgctcaccaccccaacccaccgcttccagtgcaaagtactctggttttgctgcccagggccagtggacatcaacattgtggccaaatgcaatgcctgcctctccagcccgtgcaagaataacgggacatgcacccaggaccctgtggagctgtaccgctgtgcctgcccctacagctacaagggcaaggactgcactgtgcccatcaacacctgcatccagaacccctgtcagcatggaggcacctgccacctgagtgacagccacaaggatgggttcagctgctcctgccctctgggctttgaggggcagcggtgtgagatcaacccagatgactgtgaggacaacgactgcgaaaacaatgccacctgcgtggacgggatcaacaactacgtgtgtatctgtccgcctaactacacaggtgagctatgcgacgaggtgattgaccactgtgtgcctgagctgaacctctgtcagcatgaggccaagtgcatccccctggacaaaggattcagctgcgagtgtgtccctggctacagcgggaagctctgtgagacagacaatgatgactgtgtggcccacaagtgccgccacggggcccagtgcgtggacacaatcaatggctacacatgcacctgcccccagggcttcagtggacccttctgtgaacaccccccacccatggtcctactgcagaccagcccatgcgaccagtacgagtgccagaacggggcccagtgcatcgtggtgcagcaggagcccacctgccgctgcccaccaggcttcgccggccccagatgcgagaagctcatcactgtcaacttcgtgggcaaagactcctacgtggaactggcctccgccaaggtccgaccccaggccaacatctccctgcaggtggccactgacaaggacaacggcatccttctctacaaaggagacaatgaccccctggcactggagctgtaccagggccacgtgcggctggtctatgacagcctgagttcccctccaaccacagtgtacagtgtggagacagtgaatgatgggcagtttcacagtgtggagctggtgacgctaaaccagaccctgaacctagtagtggacaaaggaactccaaagagcctggggaagctccagaagcagccagcagtgggcatcaacagccccctctaccttggaggcatccccacctccaccggcctctctgccttgcgccagggcacggaccggcctctaggcggcttccacggatgcatccatgaggtgcgcatcaacaacgagctgcaggacttcaaggccctcccaccacagtccctgggggtgtcaccaggctgcaagtcctgcaccgtgtgcaagcacggcctgtgccgctccgtggagaaggacagcgtggtgtgcgagtgccgcccaggctggaccggcccactctgcgatcaggaggcccgggacccctgcctcggccacagatgccaccatggaaaatgtgtggcaactgggacctcatacatgtgcaagtgtgccgagggctatggaggggacttgtgtgacaacaagaatgactctgccaatgcctgctcagccttcaagtgtcaccatgggcagtgccacatctcagaccaaggggagccctactgcctgtgccagcccggctttagcggcgagcactgccaacaagagaatccgtgcctgggacaagtagtccgagaggtgatccgccgccagaaaggttatgcatcatgtgccacagcctccaaggtgcccatcatggaatgtcgtgggggctgtgggccccagtgctgccagcccacccgcagcaagcggcggaaatacgtcttccagtgcacggacggctcctcgtttgtagaagaggtggagagacacttagagtgcggctgcctcgcgtgttcctaagcccctgcccgcctgcctgccacctctcggactccagcttgatggagttgggacagccatgtgggaccccctggtgattcagcatgaaggaaatgaagctggagaggaaggtaaagaagaagagaatattaagtatattgtaaaataaacaaaaaatagaacttatttttattatggaaagtgactattttcatcttttattatataaatatattacaccatctgcgta

SEQ ID NO: 19875 - DNA, 594 bp, Homo sapiens
  source 1..594: mol_type = unassigned DNA
ctgtccgcctaactacacaggtgagctatgcgacgaggtgattgaccactgtgtgcctgagctgaacctctgtcagcatgaggccaagtgcatccccctggacaaaggattcagctgcgagtgtgtccctggctacagcgggaagctctgtgagacagacaatgatgactgtgtggcccacaagtgccgccacggggcccagtgcgtggacacaatcaatggctacacatgcacctgcccccagggcttcagtggacccttctgtgaacaccccccacccatggtcctactgcagaccagcccatgcgaccagtacgagtgccagaacggggcccagtgcatcgtggtgcagcaggagcccacctgccgctgcccaccaggcttcgccggccccagatgcgagaagctcatcactgtcaacttcgtgggcaaagactcctacgtggaactggcctccgccaaggtggccactgacaaggacaacggcatccttctctacaaaggagacaatgaccccctggcactggagctgtaccagggccacgtgcggctggtctatgacagcctgagttcccctccaaccacagtgtacag

SEQ ID NO: 19876 - DNA, 4228 bp, Homo sapiens
  source 1..4228: mol_type = unassigned DNA
ctggagtgcatttttaatctacaccctcgtgaggtttgagaagcactggtcaagagtcatcccagtgcccagaatcagttctaggagcagctgctgtggctagggacagggtcatgcatggaggtcagtgggcagctggagccatctcccatctgccttccagctcaatgccctgcattgtgcctccatcacaacaaaatagcagagggggccttgagctgataggagacttgagatgcttgctctgtgcccaaatggctgtgtccagtcacttatggctccaggtacttcacctctcagggctgctgtttccttcttgcagaattaagaattaagacgcagtttgccaaatgttctcacttatacatggaatctaaacaaagccaaactcttagaagcagaaagtagaatggtgatgttcagaggccggtggggtgagggtggggtagagatgaagatgacacagatgttcgtcaaagggtgcaaaatttcaggtagacaggagaagtaagttcaagagatccattgtgttatacaacacggtgaatgtagttaacaacaatgtatcgtatacttgaaaatagctcagagagtagattttaagtgttcttaccacaaataaatgataagcatgtgaggtaatgcataggttaagtagcttgacttagctattccacaatgaaagcatatatcaaaacattgtgttgcacaccaaatatgtatacatttttaaaagactagttgagtacagtagtgaaaaaggaggaaagagtagaacaaggagtttgatctgtaactgactgtgaacaatccattgagagaactcactacctttgaaccagcctaaatatgcagtttttataataataaagaaaaagacaaagtgaccaaggtcaattcccagctaaactgtctatcacttctccaattcccactctccagcacctccaaaccgtggggcatctcacctcatactgtagggagagatgggtccagaagtctagttgtggactgaaaaccagtttgccctcccagagctaaagcagagggtttccgtgctggccacatagcttcctcttgcaactagaggtctcagcaccttgaagggacaattcataatcaggggaaaaaaagacaacacaggccttcccgctagtccagtctaaacagatccttcgtgtttgtctggaatgctttgcataggcagccatgctgagggcaagtgagattaggataatccagagtatttgcttgttaagacccttaaacaaaaccggagcgcggaagaaaagcccggtgtaagctgacgagtttgtgagtgcaatctgcggatttgtcggaggtgatttcgccagctaaagggataaactagacagctgtgccgaagagccttaacctgtgaaatatcgttcaaagtacaggctttggaggcagggaggggaggaagtagaggcctcagcaaaggttgtggcatggttcttttgaaatctattagaagaaggaaggaaacaggctcagagagattcccactgcatgtgcttaagaggctggagtgtctggcttcgctggagtcaattgcttaagaatctgctctgttgtgcttttttttctccacattctctcttcacctccttgttgaccttccaagatcccagctctcccacttctgcacaaaagcaaagacccatttatttattttgttaaagaaaaggaactggagaggtttgatgtcgcaggaaattggagcatctctccttccagtgacaggatcccagaggccatccctgagctaatgactctaagagaaagaatttcccctcagtgaagggccattagcaagagctggtgtccaggttctcagaagtcactgggatgcccgtaattgagcagcctcagggcctctgggaaggagccagggtcgaggagattcctttgcacctgcaaagcctggttagctgccccagaccccgggcccagcattaatagaatcctcctggcccacagcatccctcttgctctcattatccaaagcctgggacattcttatgccctggacttgctcccagatgaggaacacactgccagccagtgacaagcccacatctccaaggcgtcccctgagaatcccaggatgtgcttacatcacacagcctagagtttgcaccagaccagacagagacttaagtcactgctcaaaagctcctttcaggtcagggaggaaaagtcactggggaggtgaaatgactctggactttctgggagaaaaatgagcagctgctgaggcatgaggcaagaagatgatgcctacaggaaccctggcttgtggttggttgggtgaagccggttcctgtttcatctgtgtcgttaattgcttggtaatgaaacgtaaggccctaatttgactgggctcaattttccacctacaaagtgatggttcacgtgttcacagcctcgtgtcccgatgaagatgccacgggtgagtattctttgaaaaccaagaagagtgatgtaaatgtggtgcactttatcatgaggtagttgaactgaaggctctttaagctccttctcttgcactatgagtaaatgaattgcttgattgattgattaatccttaccattttgaatgtctgaaatgcttgattcacacttaggagtgaccgttatcgcacctttgagccatgttctcagactttaccgttaacgttttcagagacatcagcaagaatcagatatcggatattgctccagatgccttccagggcctgaaatcactcacatcgctggtcctgtatgggaacaagatcaccgagattgtcaagggactgtttgatgggctggtgtccctacagctgctcctcctcaatgccaacaagatcaactgcctgcgggtgaacacgtttcaggacctgcagaacctcaacttgctctccctgtatgacaacaagctgcagaccatcagcaaggggctcttcgcccctctgcagtccatccagacactccacttagcccaaaacccatttgtgtgcgactgccacttgaagtggctggccgactacctccaggacaaccccatcgagacaagcggggcccgctgcagcagcccgcgccgactcgccaacaagcgcatcagccagatcaagagcaagaagttccgctgctcaggctccgaggattaccgcagcaggttcagcagcgagtgcttcatggacctcgtgtgccccgagaagtgtcgctgtgagggcacgattgtggactgctccaaccagaagctggtccgcatcccaagccacctccctgaatatgtcaccgacctgcgactgaatgacaatgaggtatctgttctggaggccactggcatcttcaagaagttgcccaacctgcggaaaataaatctgagtaacaataagatcaaggaggtgcgagagggagctttcgatggagcagccagcgtgcaggagctgatgctgacagggaaccagctggagaccgtgcacgggcgcgtgttccgtggcctcagtggcctcaaaaccttgatgctgaggagtaacttgatcggctgtgtgagtaatgacacctttgccggcctgagttcggtgagactgctgtccctctatgacaatcggatcaccaccatcacccctggggccttcaccacgcttgtctccctgtccaccatgtaagttctcctgggtccactgcccacggactctgggatcccactctgcagcgctctctcctcccagctccctgctacctctagccaggctcatctatctgtctgtccacttaaaaactcgtcaggctttctgtatgtgccaggcaggcatcgtctaggtgttgaggctgcacacacccggcccctccttcctggaactcacagcatagtgaattgccacagaaagcatgtccacagtgatttgaaaacccaagctggaaggccaggcatggtggctcacgcctgtaatcctaacactttgggaggctgaggtgggtggatcacctgaggtgaggaattcgaaaccagcctgaccaacatggtgaaaccccttctctactaaaaattcaaaagttagccagttatggtggtgagtatccgtaatcccagctacctgggagactgaggcaggacagttgctggaacccgggaggcggaggctgcagtgagctgagatcatgccactgcattccagcctaggcgacagagcaagattccgtgtcaaaaaaaaaa

SEQ ID NO: 19877 - DNA, 2090 bp, Homo sapiens
  source 1..2090: mol_type = unassigned DNA
agaggcagcctcctccaggagcggggccctgcacaccatggcccccgggtgggcaggggtcggcgccgccgtgcgcgcccgcctggcgctggccttggcgctggcgagcgtcctgagtgggcctccagccgtcgcctgccccaccaagtgtacctgctccgctgccagcgtggactgccacgggctgggcctccgcgcggttcctcggggcatcccccgcaacgctgagcgccttgacctggacagaaataatatcaccaggatcaccaagatggacttcgctgggctcaagaacctccgagtcttgcatctggaagacaaccaggtcagcgtcatcgagagaggcgccttccaggacctgaagcagctagagcgactgcgcctgaacaagaataagctgcaagtccttccagaattgcttttccagagcacgccgaagctcaccagactagatttgagtgaaaaccagatccaggggatcccgaggaaggcgttccgcggcatcaccgatgtgaagaacctgcaactggacaacaaccacatcagctgcattgaagatggagccttccgagcgctgcgcgatttggagatccttaccctcaacaacaacaacatcagtcgcatcctggtcaccagcttcaaccacatgccgaagatccgaactctgcgcctccactccaaccacctgtactgcgactgccacctggcctggctctcggattggctgcgacagcgacggacagttggccagttcacactctgcatggctcctgtgcatttgaggggcttcaacgtggcggatgtgcagaagaaggagtacgtgtgcccagccccccactcggagcccccatcctgcaatgccaactccatctcctgcccttcgccctgcacgtgcagcaataacatcgtggactgtcgaggaaagggcttgatggagattcctgccaacttgccggagggcatcgtcgaaatacgcctagaacagaactccatcaaagccatccctgcaggagccttcacccagtacaagaaactgaagcgaatagacatcagcaagaatcagatatcggatattgctccagatgccttccagggcctgaaatcactcacatcgctggtcctgtatgggaacaagatcaccgagattgtcaagggactgtttgatgggctggtgtccctacagctgctcctcctcaatgccaacaagatcaactgcctgcgggtgaacacgtttcaggacctgcagaacctcaacttgctctccctgtatgacaacaagctgcagaccatcagcaaggggctcttcgcccctctgcagtccatccagacactccacttagcccaaaacccatttgtgtgcgactgccacttgaagtggctggccgactacctccaggacaaccccatcgagacaagcggggcccgctgcagcagcccgcgccgactcgccaacaagcgcatcagccagatcaagagcaagaagttccgctgctcaggtaatcaggttacggggctgggccccgctttctgactcagaatgcagcagccccagagaggccaataatccaatctggaggacagcgagcactgtaatggctcctggggagcatctttgcaaattaaattggggaaattcagttagccctgcagaaaaccagttaccttatggatttaaaataaaacacacacacacacacacacacacaataaaagcatggggaggaggagacggttgcaggggagacaggacccaggcagcagcgtgtctccaagagctaaggagaaggtggggctggggcggcctttgcacatgtgcctgttacaggctaagatttatatttttcgtttccaaagtgtgctccccaaagggcaagtagagaaatacatatagctcaggcgaggctacagacggtgtgtaatcttggggacctcccactcccttcggagacagaccatggtacagccctttgaccacagtatgttataggttccacatgttcacgaaaaacactttcactagcttagctcctccatccctgattactgtgttctgagtacggagagaacagtaaagagtcgtgcttgggaag

SEQ ID NO: 19878 - DNA, 987 bp, Homo sapiens
  source 1..987: mol_type = unassigned DNA
gacagtcagagaggagagacggagcagcgtggcagacaggctggctctgcacgagctcctggcggggaccagcagcgcctgcaagggggtggagggacaggcgctcgggtggcctgggccgccggcccctcacgctgcccccgctcagccttcatgctctcccctgcttttccacaggcaactggacaacaaccacatcagctgcattgaagatggagccttccgagcgctgcgcgatttggagatccttaccctcaacaacaacaacatcagtcgcatcctggtcaccagcttcaaccacatgccgaagatccgaactctgcgcctccactccaaccacctgtactgcgactgccacctggcctggctctcggattggctgcgacagcgacggacagttggccagttcacactctgcatggctcctgtgcatttgaggggcttcaacgtggcggatgtgcagaagaaggagtacgtgtgcccagccccccactcggagcccccatcctgcaatgccaactccatctcctgcccttcgccctgcacgtgcagcaataacatcgtggactgtcgaggaaagggcttgatggagattcctgccaacttgccggagggcatcgtcgaaatacgcctagaacagaactccatcaaagccatccctgcaggagccttcacccagtacaagaaactgaagcgaatagacatcagcaagaatcagatatcggatattgctccagatgccttccagggcctgaaatcactcacatcgctggtcctgtatgggaacaagatcaccgagattgtcaagggactgtttgatgggctggtgtccctacagctgctcctcctcaatgccaacaagatcaactgcctgcgggtgaacacgtttcaggacctgcagaacctcaacttgctctccctgtatgacaacaagctgcagaccatcagcaaggggctcttcgcccctctgcagtccatccagacact

SEQ ID NO: 19879 - DNA, 972 bp, Homo sapiens
  source 1..972: mol_type = unassigned DNA
gcctcctcgggctccacgcgtcttgccccgcagaggcagcctcctccaggagcggggccctgcacaccatggcccccgggtgggcaggggtcggcgccgccgtgcgcgcccgcctggcgctggccttggcgctggcgagcgtcctgagtgggcctccagccgtcgcctgccccaccaagtgtacctgctccgctgccagcgtggactgccacgggctgggcctccgcgcggttcctcggggcatcccccgcaacgctgagcgccttgacctggacagaaataatatcaccaggatcaccaagatggacttcgctgggctcaagaacctccgagtcttgcatctggaagacaaccaggtcagcgtcatcgagagaggcgccttccaggacctgaagcagctagagcgactgcgcctgaacaagaataagctgcaagtccttccagaattgcttttccagagcacgccgaagctcaccagactgcccagtgtggaactctgttggatggcactagacagaaatcacatccctcctacaggatttctacaaagcacgtgttcctggagcaactattatgaggaagatagagaaggcctagaaaatttggtccctgttgcctttgagacttgcaccatcaccctgcaactgagcactctgaccaaatatcaagatcaactgtgctttctgaaagatcaaattaagtctaattttaaatgggacaaaaggtagcactctttttatattcctacttaagaagatatccttcttggttctgttccattttgcacatggagtagttttaaagagccacatccaaggctggatttgaaagctgatgaacgtagctatgaagagctttatgatgaaaagggttattactggcctcccatctactggcttatctttttttattctttaagtcatgtgacaaatgagggttctgataggattgtctttggtgtggtttcatgag

SEQ ID NO: 19880 - DNA, 8903 bp, Homo sapiens
  source 1..8903: mol_type = unassigned DNA
agagatttgagtgaaaaccagatccaggggatcccgaggaaggcgttccgcggcatcaccgatgtgaagaacctgcaactggacaacaaccacatcagctgcattgaagatggagccttccgagcgctgcgcgatttggagatccttaccctcaacaacaacaacatcagtcgcatcctggtcaccagcttcaaccacatgccgaagatccgaactctgcgcctccactccaaccacctgtactgcgactgccacctggcctggctctcggattggctgcgacagcgacggacagttggccagttcacactctgcatggctcctgtgcatttgaggggcttcaacgtggcggatgtgcagaagaaggagtacgtgtgcccagccccccactcggagcccccatcctgcaatgccaactccatctcctgcccttcgccctgcacgtgcagcaataacatcgtggactgtcgaggaaagggcttgatggagattcctgccaacttgccggagggcatcgtcgaaatacgcctagaacagaactccatcaaagccatccctgcaggagccttcacccagtacaagaaactgaagcgaatagacatcagcaagaatcagatatcggatattgctccagatgccttccagggcctgaaatcactcacatcgctggtcctgtatgggaacaagatcaccgagattgtcaagggactgtttgatgggctggtgtccctacagctgctcctcctcaatgccaacaagatcaactgcctgcgggtgaacacgtttcaggacctgcagaacctcaacttgctctccctgtatgacaacaagctgcagaccatcagcaaggggctcttcgcccctctgcagtccatccagacactccacttagcccaaaacccatttgtgtgcgactgccacttgaagtggctggccgactacctccaggacaaccccatcgagacaagcggggcccgctgcagcagcccgcgccgactcgccaacaagcgcatcagccagatcaagagcaagaagttccgctgctcaggctccgaggattaccgcagcaggttcagcagcgagtgcttcatggacctcgtgtgccccgagaagtgtcgctgtgagggcacgattgtggactgctccaaccagaagctggtccgcatcccaagccacctccctgaatatgtcaccgacctgcgactgaatgacaatgaggtatctgttctggaggccactggcatcttcaagaagttgcccaacctgcggaaaataaatctgagtaacaataagatcaaggaggtgcgagagggagctttcgatggagcagccagcgtgcaggagctgatgctgacagggaaccagctggagaccgtgcacgggcgcgtgttccgtggcctcagtggcctcaaaaccttgatgctgaggagtaacttgatcggctgtgtgagtaatgacacctttgccggcctgagttcggtgagactgctgtccctctatgacaatcggatcaccaccatcacccctggggccttcaccacgcttgtctccctgtccaccataaacctcctgtccaaccccttcaactgcaactgccacctggcctggctcggcaagtggttgaggaagaggcggatcgtcagtgggaaccctaggtgccagaagccatttttcctcaaggagattcccatccaggatgtggccatccaggacttcacctgtgatggcaacgaggagagtagctgccagctgagcccgcgctgcccggagcagtgcacctgtatggagacagtggtgcgatgcagcaacaaggggctccgcgccctccccagaggcatgcccaaggatgtgaccgagctgtacctggaaggaaaccacctaacagccgtgcccagagagctgtccgccctccgacacctgacgcttattgacctgagcaacaacagcatcagcatgctgaccaattacaccttcagtaacatgtctcacctctccactctgatcctgagctacaaccggctgaggtgcatccccgtccacgccttcaacgggctgcggtccctgcgagtgctaaccctccatggcaatgacatttccagcgttcctgaaggctccttcaacgacctcacatctctttcccatctggcgctgggaaccaacccactccactgtgactgcagtcttcggtggctgtcggagtgggtgaaggcggggtacaaggagcctggcatcgcccgctgcagtagccctgagcccatggctgacaggctcctgctcaccaccccaacccaccgcttccagtgcaaagtactctggttttgctgcccagggccagtggacatcaacattgtggccaaatgcaatgcctgcctctccagcccgtgcaagaataacgggacatgcacccaggaccctgtggagctgtaccgctgtgcctgcccctacagctacaagggcaaggactgcactgtgcccatcaacacctgcatccagaacccctgtcagcatggaggcacctgccacctgagtgacagccacaaggatgggttcagctgctcctgccctctgggctttgaggggcagcggtgtgagatcaacccagatgactgtgaggacaacgactgcgaaaacaatgccacctgcgtggacgggatcaacaactacgtgtgtatctgtccgcctaactacacaggtgagctatgcgacgaggtgattgaccactgtgtgcctgagctgaacctctgtcagcatgaggccaagtgcatccccctggacaaaggattcagctgcgagtgtgtccctggctacagcgggaagctctgtgagacagacaatgatgactgtgtggcccacaagtgccgccacggggcccagtgcgtggacacaatcaatggctacacatgcacctgcccccagggcttcagtggacccttctgtgaacaccccccacccatggtcctactgcagaccagcccatgcgaccagtacgagtgccagaacggggcccagtgcatcgtggtgcagcaggagcccacctgccgctgcccaccaggcttcgccggccccagatgcgagaagctcatcactgtcaacttcgtgggcaaagactcctacgtggaactggcctccgccaaggtccgaccccaggccaacatctccctgcaggtggccactgacaaggacaacggcatccttctctacaaaggagacaatgaccccctggcactggagctgtaccagggccacgtgcggctggtctatgacagcctgagttcccctccaaccacagtgtacagtgtggagacagtgaatgatgggcagtttcacagtgtggagctggtgacgctaaaccagaccctgaacctagtagtggacaaaggaactccaaagagcctggggaagctccagaagcagccagcagtgggcatcaacagccccctctaccttggaggcatccccacctccaccggcctctctgccttgcgccagggcacggaccggcctctaggcggcttccacggatgcatccatgaggtgcgcatcaacaacgagctgcaggacttcaaggccctcccaccacagtccctgggggtgtcaccaggctgcaagtcctgcaccgtgtgcaagcacggcctgtgccgctccgtggagaaggacagcgtggtgtgcgagtgccgcccaggctggaccggcccactctgcgatcaggaggcccgggacccctgcctcggccacagatgccaccatggaaaatgtgtggcaactgggacctcatacatgtgcaagtgtgccgagggctatggaggggacttgtgtgacaacaagaatgactctgccaatgcctgctcagccttcaagtgtcaccatgggcagtgccacatctcagaccaaggggagccctactgcctgtgccagcccggctttagcggcgagcactgccaacaagagaatccgtgcctgggacaagtagtccgagaggtgatccgccgccagaaaggttatgcatcatgtgccacagcctccaaggtgcccatcatggaatgtcgtgggggctgtgggccccagtgctgccagcccacccgcagcaagcggcggaaatacgtcttccagtgcacggacggctcctcgtttgtagaagaggtggagagacacttagagtgcggctgcctcgcgtgttcctaagcccctgcccgcctgcctgccacctctcggactccagcttgatggagttgggacagccatgtgggaccccctggtgattcagcatgaaggaaatgaagctggagaggaaggtaaagaagaagagaatattaagtatattgtaaaataaacaaaaaatagaacttatttttattatggaaagtgactattttcatcttttattatataaatatattacaccatctgcgtatatgtaccatatagtgagttatttttaccaagttttgtgttgtgtatttgttgtgtttttaaaaatagctgtttaaaaatttaagaaaaaaatagactaataaaaatgctttaaaacaaaaggataagaataaagaatgatagcctgtctgaggaaggaggaagatgttttcatgtttatgaaacggtattatgtcggcagtagaccaagagctgctcattgagatcagaaaaaggaataagaggaagagagagaaggaaaagacctttgtttcttgttttttaactcccttttatttttcctcccctaaaattacccagcttttcggagtcctggatgtcagtgcccaaaatgcccagttcttccaggaaaagctgctgagccctggccttctcagtctcactgccactcaaaaatattgctgtccctgtctgtcccagaccccccttcagggtatctgaacccactgggggacccctcttctccttcctgggtggccctggcttccgtatctgaacccactgggggacccctcttctccttcctggctggccctggcttccaatcgaggactgactattgaagtctgctacaggtgtcatttggaactgtcttaccaaattttaaaacagctgctatttttcctgctcctccccaggagaggggtcttcctagaggaggcgagggaagagaatatcatggtgtctcctcaggacccatgcactggccctctctcctccttccaggtaatttttcattggaatgtatcccagtagagaaggtagtcagcccttcttggaagcggaaggctgggagccaagtcaagtctgcccacagcgctagatgtccaactctggaaggttcttggaggctcttgttgtaagacaggcctctgccacctgatcctccaggtcaccagcatgacgatagagactccttgcccatctgtgacactttccaatgcatatccaaactttaccttattttatctatgcaacccctgcctccctgggaaggataagggagtagagctgggttcactaagaaggaagtttaggccctcacaggctctggaacttgccttaagccacacaccagataagtggaggagccagaccagaagtccagacccaaagcttgagattcttcctctagaatgggtgagcacaggtgattcaggcggcttaaatccatcagagcagccctgccggaaaaggaaataatatgatgttttttcctgctcttgttctgccttgctcactccttctccctccgcagtatctggaaagattctggagaccagggcttatgcatctagggaaagtgaccaagggcagcctatccagcctctgcctccattcctgaaggggacttccctgcccctgtttctttccatgtctctccctccctcactcccatttgcccccttccaccccatcaggttagccacatatcttccagggctcagctgttcacaccaactccctggctcttatcatccatccctccttcccccaggagcttccactgtaggagtttcagggagaagagtttggaattcattggacctttcagccctcaggttccctagaggagcctagttgatctgtgagtaccaatggtgggccaaagacgcagggaataatgaagggagaaagaaaagaaaggaagatggaggaaaacgaggcaactggaagaaggaaggaaggaaagaaggaagggatggaggggatgaagagaagggagagagggatatagctgaggaatttatctaaaaatgtgcatgtaaatctccattatgttccaggtactgtgccttatgatggctttgttttttgttgtcattagagacaaggtcttgctttgtcacccaggctggagtagagtggttcgatcatagctcaccgcagcctcaacctcctaggctcaagccatcttcctgcctcagtctcccaaaatgctgggattacaggtgtgagccactatgctcagcctgtttcaaacattattataatagcagatttatttagtactttattatacatcagataccactctaattgtgaaatagatatatattcatttaattattgaaacaaccatgtagttaaaacactattaactcattttacagttgagtagactgagacacagagaagttaaagaacttgcccaagagtaaatgtctaataaaccgtagagccaggatctgggcccaggctgtctgactccagaacttgctcactcaaccactaaaccatcctgcttctcatgggaaagaaacacatcctgcctttgaggatcctacagcctgtgacaaaaacagtcataaaaatggacaattgccttattacacaaggagctcttaagtggcaatacaagcaatggaagtggctgtccagaggagggaacttctagtcctaggtctttaaggatgaataggagtttgccagagtgagaaagggaattgaactttcctgggagtggccttttaaaaagcaatgagatatggccaggcctggcttgtttggggaagagtcaaaatctagggtggcaagagtatgggaagcacactgaggagcagagagaaatggggtaggtaggaaggtagggttttgaccacaaagagctgtgcatgctaaactgggccacaggtgccagcagggttgtttgaggaagggaagagcaagacaagctctggtttaggaagagagctgtggcagcataaaggcctgaaagaggagacagagctgtcacccaaaatggacttgagagctccctgtggtttactctgtggctagaaaacactgccggccagatggatcacaaatgtctatggtagcttagaagctctgctcttgaagaggatcctgggatctgcccaacacccttcccaacctccatttccccatccccacctccattgccccatcccccctctccccctaggcaggtggatctgagccttatcccaccaccaatgcccctgctagcctctccccacccagcccagagcctactcagcctgccatctcaagagccccaccgagggtcactggcttcctgggaggagtcaccaggctgccagctttccctctgcctccccaaggaacctgagacctccctctgctcatcaccctgggcccaatcctgaatccagcccccatcaaccaagacagcaaaagggccaggtctgtcccttataattttgagccttctccctcaagtttggaagccctgactttaagaaatgccaaatgcaaggaccattaagaaaattctccccgaaatgaggctcctctaacaaatgatgattaaaacgctctctccttgagcagtcacattctagaaacaggacattccatgaggcaggaagagttcagttaatttgctcctgaaaaagtgtggttcagtgtttgtgtggcaatgtacgtgggcagaagaggccgctcaagctgtgtcccccctgagcaggattcaggaaagggaaaagaagttctcttcaactcagccaaggggccgtacgatggccgatgagattatgtatttaaaagttctttgtaaagtgtaaactaaaaaccttaaatgtaagatgctgttgttattattactgttgttgttgctgttatggacatgccaaaaggcccttgttagaagacagttttgccttttcaatctcatagcaaggaactcaagtctgatgcttcaaaaagatgagaagaagggcaagaagagggataactcccaagctcagagggaaaaaaaaggtgggggaaaagagccccagggtgaccttcaggaaaggccaggaccaggatgatctaacctttcccttcaccagaaacaaagctattgccagactgaaccctaaagtcaagcagtcacccactgcctttgctgggagcagaagcccatagcaacaagtgacctgcccctcagactcaagatcccagataccagagctggaggagtcatagggcattactggtaggcaggaaaactgagggtcgaacaaatggaagaatgcggtgatcatagaccaaagacacacagataattaaccccatgtgtccacccaggccaaagttcttcctgctaccccacagtggatgtccaggcagatggtccccacatgatggggaagcagagggcatagtgtggttttgtgggacttgttcatgttttgtagtgtgggctcaacagtgccaaaggaaacactagggaaaagttggtgaaacatgccagctagcaggaccagtaaaggcataatcaggcatttggcaaagcttgcttttctaattcaatgataggttctaataggaaatttttgaagattttttaaaacaatgttatagtggcacttccccagtatggaataaataacatgcattcttttttcaatatactgtcatattcagatgtcattaaaataaatggatgagtcacagaggagctatcagatgctctcatgactaccataactcagccctgc

SEQ ID NO: 19881 - DNA, 5189 bp, Homo sapiens
  source 1..5189: mol_type = unassigned DNA
cgcgctctcttcctccctcagacaactcgccccccgccctccgcccccctccacgtaattccgaaagagcagaagaaagagaaggagaacaggaaaagaagagctagtaagcgagagcgagagcacagaaaagaaaaaaaaaagccttaagaggaccgaaggggaggaaaggaaaaggatggacaaccacaaaacgcagcgattgcggaaattttccagcgccattggctgggcagcgtgagtccttcggtcgggcgtgatttcagcaccgggggaactggacagcacctcggggggacttctgggcaacccgcaaccacagcaagaactccaccagcagcctcaacaacagaagccgcggaaaaccctgctttgtatcagagaggcaaggtcagtccgacgcacagccatgcacaggcagtgcgcctgtactacgctgcaaaccctctgcttgtttctctaacatgcacttgcttctaattactagcattgtttcatttctgatcagtgaagatcagtagatgagattctgtaagggtgtacttttaatttatatgtatatatttaacttctttttctgttatttttaaagtgttgtgggggagtggggtttttttcctacttttttttttttttttttttctttgcttgccttgcactacgtgcctggatagtttgtggatataattattgactggcgtctgggctattgcagtgcgggggggttagggaggaaggaatccacccccacccccccaaacccttttcttctcctttcctggcttcggacattggagcactaaatgaacttgaattgtgtctgtggcgagcaggatggtcgctgttactttgtgatgagatcggggatgaattgctcgctttaaaaatgctgctttggattctgttgctggagacgtctctttgttttgccgctggaaacgttacaggggacgtttgcaaagagaagatctgttcctgcaatgagatagaaggggacctacacgtagactgtgaaaaaaagggcttcacaagtctgcagcgtttcactgccccgacttcccagttttaccatttatttctgcatggcaattccctcactcgacttttccctaatgagttcgctaacttttataatgcggttagtttgcacatggaaaacaatggcttgcatgaaatcgttccgggggcttttctggggctgcagctggtgaaaaggctgcacatcaacaacaacaagatcaagtcttttcgaaagcagacttttctggggctggacgatctggaatatctccaggctgattttaatttattacgagatatagacccgggggccttccaggacttgaacaagctggaggtgctcattttaaatgacaatctcatcagcaccctacctgccaacgtgttccagtatgtgcccatcacccacctcgacctccggggtaacaggctgaaaacgctgccctatgaggaggtcttggagcaaatccctggtattgcggagatcctgctagaggataacccttgggactgcacctgtgatctgctctccctgaaagaatggctggaaaacattcccaagaatgccctgatcggccgagtggtctgcgaagcccccaccagactgcagggtaaagacctcaatgaaaccaccgaacaggacttgtgtcctttgaaaaaccgagtggattctagtctcccggcgccccctgcccaagaagagacctttgctcctggacccctgccaactcctttcaagacaaatgggcaagaggatcatgccacaccagggtctgctccaaacggaggtacaaagatcccaggcaactggcagatcaaaatcagacccacagcagcgatagcgacgggtagctccaggaacaaacccttagctaacagtttaccctgccctgggggctgcagctgcgaccacatcccagggtcgggtttaaagatgaactgcaacaacaggaacgtgagcagcttggctgatttgaagcccaagctctctaacgtgcaggagcttttcctacgagataacaagatccacagcatccgaaaatcgcactttgtggattacaagaacctcattctgttggatctgggcaacaataacatcgctactgtagagaacaacactttcaagaaccttttggacctcaggtggctatacatggatagcaattacctggacacgctgtcccgggagaaattcgcggggctgcaaaacctagagtacctgaacgtggagtacaacgctatccagctcatcctcccgggcactttcaatgccatgcccaaactgaggatcctcattctcaacaacaacctgctgaggtccctgcctgtggacgtgttcgctggggtctcgctctctaaactcagcctgcacaacaattacttcatgtacctcccggtggcaggggtgctggaccagttaacctccatcatccagatagacctccacggaaacccctgggagtgctcctgcacaattgtgcctttcaagcagtgggcagaacgcttgggttccgaagtgctgatgagcgacctcaagtgtgagacgccggtgaacttctttagaaaggatttcatgctcctctccaatgacgagatctgccctcagctgtacgctaggatctcgcccacgttaacttcgcacagtaaaaacagcactgggttggcggagaccgggacgcactccaactcctacctagacaccagcagggtgtccatctcggtgttggtcccgggactgctgctggtgtttgtcacctccgccttcaccgtggtgggcatgctcgtgtttatcctgaggaaccgaaagcggtccaagagacgagatgccaactcctccgcgtccgagattaattccctacagacagtctgtgactcttcctactggcacaatgggccttacaacgcagatggggcccacagagtgtatgactgtggctctcactcgctctcagactaagaccccaaccccaataggggagggcagagggaaggcgatacatccttccccaccgcaggcaccccgggggctggaggggcgtgtacccaaatccccgcgccatcagcctggatgggcataagtagataaataactgtgagctcgcacaaccgaaagggcctgaccccttacttagctccctccttgaaacaaagagcagactgtggagagctgggagagcgcagccagctcgctctttgctgagagccccttttgacagaaagcccagcacgaccctgctggaagaactgacagtgccctcgccctcggccccggggcctgtggggttggatgccgcggttctatacatatatacatatatccacatctatatagagagatagatatctatttttcccctgtggattagccccgtgatggctccctgttggctacgcagggatgggcagttgcacgaaggcatgaatgtattgtaaataagtaactttgacttctgacaaaaaacaaaaagtgctgcatggctcgcatggaatccacgcgctccagggactctgcccgcccccgcgactggagacggcatctcgttcacagcacccaccctcttacctgataagttccatcgtatcaaactttctataaacaaaatacagtataatcagaaagtgccatttcgccattatttgtgatcggtaggcagttcagagcataagttaactgtgaaaaaaatgtaaaggttttatttaggacatttgcatggctagtcatcagtccattttatgagttaacaatgtattttgttgagggaagtttttaggggttgttttgggttcttttattttgatggtgatgttttattttattttatttttttcagggggtcttttttttaatacatatccaataatgccttccatctgaatgtaaaataagtacccatgatttctattatagtatcagtgtaattatttaaaaaatgattttgaggcagttaagcatgaccaattaatgtcactctagtgcttaggctgcgatcctatggtagcaattctgtgctggtataaatcttacttataaagtaggaaaagagaaccgaggaagcacgtgaaacttactaattctattcgaggattttataatggcatattttttcagtattaaagcgaaaatgttttcaactctgggtccttacctttttccagcttcatatttgcaagtggtaaattggatttgcggtggaagagacaggggagggaaacggttggggttagatcccttcctgagctacattaaggctctttctctaatcgccttacttagctttttaccctttaagtagctcctcttccctcgcccccaccctctaccccacccccaccttcgctcagactttaccggctttccccagtccataaaggtcttgccccaacactcaccccttctttttttcccctctccaaatgcagcagtgaatccctttattaatactggaaatccctctctgctgcttttgttggtgctgcccacactgcagatatattaaggatgttaggagagatttgatttaattgactctgcctagataggtctcattaaacagagtggagatttcattggtcagcactcctcaatgaaagacagacctaatgactggcatttgagatgctgctggcattttgaattcaacatctgctgaaaacggtaaaactaattagtgcccacccaccctccccgccccagcaactgcatattgaaatttgttaaagcactcatctttatggaaattaatcattatcctaaagaagtgtttctctcccatcatccggatttctggttgtggcccagcaattaacaaaaacagcttcaactgttcgaattttatgaaccaatgtaactctggcctcaatcatattcctctgggatttctaaacagcagttaagctacaaaaagcaaacaaaaccacacatattgatggagtctgcattccaccacatatccacccttgagaagtatgtcaaaagactgcagactatagatttttttttaatataggattataaatcagctagtgaaagacctcagagcagttgtaagtagatctgccatctagaactcatattctaaagggaagtgatttctcagaacagtgatgttctggaatatgtattatttattttaacacttttttaataaaatctttattataaaccatga

SEQ ID NO: 19882 - DNA, 4318 bp, Homo sapiens
  source 1..4318: mol_type = unassigned DNA
atatgacactggcagattaaaacgctctgatggggaagggcttaaaggctgagtcaaaagccaagaagtctctttatttacgcctacctcccagcccttggcaatctgactaataacaaactgagctaacaagaaatactagaaaaggaggaaggagaacattgctgtagcttggatctacaacctaagaaagcaagagtgatcaatctcagctctgttaaacatcttgtttacttactgcattcagcagcttgcaaatggttaactatatgcaaaaaagtcagcatagctgtgaagtatgccgtgaattttaattgagggaaaaagggacaattgcttcaggatgctctagtatgcactctgcttgaaatattttcaatgaaatgctcagtattctatctttgaccagaggttttaactttatgaagctatgggacttgacaaaaagtgatatttgagaagaaagtacgcagtggttggtgttttcttttttttaataaaggaattgaattactttgaacacctcttccagctgtgcattacagataacgtcaggaagagtctctgctttacagaatcggatttcatcacatgacaacatgaagctgtggattcatctcttttattcatctctccttgcctgtatatctttacactcccaaactccagtgctctcatccagaggctcttgtgattctctttgcaattgtgaggaaaaagatggcacaatgctaataaattgtgaagcaaaaggtatcaagatggtatctgaaataagtgtgccaccatcacgacctttccaactaagcttattaaataacggcttgacgatgcttcacacaaatgacttttctgggcttaccaatgctatttcaatacaccttggatttaacaatattgcagatattgagataggtgcatttaatggccttggcctcctgaaacaacttcatatcaatcacaattctttagaaattcttaaagaggatactttccatggactggaaaacctggaattcctgcaagcagataacaattttatcacagtgattgaaccaagtgcctttagcaagctcaacagactcaaagtgttaattttaaatgacaatgctattgagagtcttcctccaaacatcttccgatttgttcctttaacccatctagatcttcgtggaaatcaattacaaacattgccttatgttggttttctcgaacacattggccgaatattggatcttcagttggaggacaacaaatgggcctgcaattgtgacttattgcagttaaaaacttggttggagaacatgcctccacagtctataattggtgatgttgtctgcaacagccctccattttttaaaggaagtatactcagtagactaaagaaggaatctatttgccctactccaccagtgtatgaagaacatgaggatccttcaggatcattacatctggcagcaacatcttcaataaatgatagtcgcatgtcaactaagaccacgtccattctaaaactacccaccaaagcaccaggtttgataccttatattacaaagccatccactcaacttccaggaccttactgccctattccttgtaactgcaaagtcctatccccatcaggacttctaatacattgtcaggagcgcaacattgaaagcttatcagatctgagacctcctccgcaaaatcctagaaagctcattctagcgggaaatattattcacagtttaatgaagtctgatctagtggaatatttcactttggaaatgcttcacttgggaaacaatcgtattgaagttcttgaagaaggatcgtttatgaacctaacgagattacaaaaactctatctaaatggtaaccacctgaccaaattaagtaaaggcatgttccttggtctccataatcttgaatacttatatcttgaatacaatgccattaaggaaatactgccaggaacctttaatccaatgcctaaacttaaagtcctgtatttaaataacaacctcctccaagttttaccaccacatattttttcaggggttcctctaactaaggtaaatcttaaaacaaaccagtttacccatctacctgtaagtaatattttggatgatcttgatttgctaacccagattgaccttgaggataacccctgggactgctcctgtgacctggttggactgcagcaatggatacaaaagttaagcaagaacacagtgacagatgacatcctctgcacttcccccgggcatctcgacaaaaaggaattgaaagccctaaatagtgaaattctctgtccaggtttagtaaataacccatccatgccaacacagactagttaccttatggtcaccactcctgcaacaacaacaaatacggctgatactattttacgatctcttacggacgctgtgccactgtctgttctaatattgggacttctgattatgttcatcactattgttttctgtgctgcagggatagtggttcttgttcttcaccgcaggagaagatacaaaaagaaacaagtagatgagcaaatgagagacaacagtcctgtgcatcttcagtacagcatgtatggccataaaaccactcatcacactactgaaagaccctctgcctcactctatgaacagcacatggtgagccccatggttcatgtctatagaagtccatcctttggtccaaagcatctggaagaggaagaagagaggaatgagaaagaaggaagtgatgcaaaacatctccaaagaagtcttttggaacaggaaaatcattcaccactcacagggtcaaatatgaaatacaaaaccacgaaccaatcaacagaatttttatccttccaagatgccagctcattgtacagaaacattttagaaaaagaaagggaacttcagcaactgggaatcacagaatacctaaggaaaaacattgctcagctccagcctgatatggaggcacattatcctggagcccacgaagagctgaagttaatggaaacattaatgtactcacgtccaaggaaggtattagtggaacagacaaaaaatgagtattttgaacttaaagctaatttacatgctgaacctgactatttagaagtcctggagcagcaaacatagatggagagtttgagggctttcgcagaaatgctgtgattctgttttaagtccataccttgtaaataagtgccttacgtgagtgtgtcatcaatcagaacctaagcacagcagtaaactatggggaaaaaaaaagaagaagaaaaagaaactcagggatcactgggagaagccatggcattatcttcaggcaatttagtctgtcccaaataaaataaatccttgcatgtaaatcattcaaggattatagtaatatttcatatactgaaaagtgtctcataggagtcctcttgcacatctaaaaaggctgaacatttaagtatcccgaattttcttgaattgctttccctatagattaattacaattggatttcatcatttaaaaaccatacttgtatatgtagttataatatgtaaggaatacattgtttataaccagtatgtacttcaaaaatgtgtattgtcaaacatacctaactttcttgcaataaatgcaaaagaaactggaacttgacaattataaatagtaatagtgaagaaaaaatagaaaggttgcaattatataggccatgggtggctcaaaactttgaacatttgagcttaaacaaatgccactctcatgcattctaaattaaaaagttaaaatgattaatagttcaggtggaagaaataagcatactttttgggttttctacacattttgtgtagacaattttaatgtcagtgctgctgtgaactaaagtatgtcatttatgctcaaagtttaattcttcttcttgggatattttaaaaatgctactgagattctgctgtaaatatgactagagaatatattgggtttgctttatttcataggcttaattctttgtaaatctgaatgaccataatagaaatacatttcttgtggcaagtaattcacagttgtaaagtaaataggaaaaattattttatttttattgatgtacattgatagatgccataaatcagtagcaaaaggcacttctaaaggtaagtggtttaagttgcctcaagagagggacaatgtagctttattttacaagaaggcatagttagatttctatgaaatatttattctgtacagttttatatagttttggttcacaaaagtaattattcttgggtgcctttcaagaaaattaaaaatactactcactacaataaaactaaaatgaaaa

SEQ ID NO: 19883 - DNA, 568 bp, Homo sapiens
  source 1..568: mol_type = unassigned DNA
aaataatccttgcagtgttacaacagtgtgcccgtgtagagaactgttttgcaaagagctcgatcaatgatgtcatctttgccttccgtgacccaggcagctgggtgcagtctcaagatcggagactgaggcttcaacaaagtattgggttcaaattccagctctgccacttggaaccctgagtccctggatggccggttgcaggtgtcccatcggaaggggctccctcatgtcatctactgccgcctgtggcgatggccagacctgcacagccaccacgagctacgggccatggagctgtgtgagttcgccttcaatatgaagaaggacgaggtctgcgtgaatccctaccactaccagagagtagagacaccagttctacctcctgtgttggtgccacgccacacagagatcccggccgagttccccccactggacgactacagccattccatccccgaaaacactaacttccccgcaggcatcgagccccagagcaatattccagagaccccaccccctggctacctgagtgaagatggagaaaccagtgaccaccagatgaacc

SEQ ID NO: 19884 - DNA, 6247 bp, Homo sapiens
  source 1..6247: mol_type = unassigned DNA
acttggagtctcgcggccgccgcctccgccccgcgttcggggccttcccgaccctgcactgctgccgtccgcccgcccggccgctcttctcttcgccgtgggagccgctccgggcgcagggccgcgcgccgagccccgcaggctgcagcgccgcggcccggcccggcgccccggcaacttcgccgagagttgaggcgaagtttgggcgaccgcggcaggccccggccgagctcccctctgcgcccccggcgtcccgtcgagcccagccccgccgggggcgctcctcgccgcccgcgcgccctccccagccatgtcgtccatcctgcctttcactcccccgatcgtgaagcgcctgctgggctggaagaagggcgagcagaacgggcaggaggagaaatggtgcgagaaggcggtcaagagcctggtcaagaaactcaagaagacggggcagctggacgagctggagaaggccatcaccacgcagaacgtcaacaccaagtgcatcaccatccccaggtccctggatggccggttgcaggtgtcccatcggaaggggctccctcatgtcatctactgccgcctgtggcgatggccagacctgcacagccaccacgagctacgggccatggagctgtgtgagttcgccttcaatatgaagaaggacgaggtctgcgtgaatccctaccactaccagagagtagagacaccagttctacctcctgtgttggtgccacgccacacagagatcccggccgagttccccccactggacgactacagccattccatccccgaaaacactaacttccccgcaggcatcgagccccagagcaatattccagagaccccaccccctggctacctgagtgaagatggagaaaccagtgaccaccagatgaaccacagcatggacgcaggttctccaaacctatccccgaatccgatgtccccagcacataataacttggacctgcagccagttacctactgcgagccggccttctggtgctccatctcctactacgagctgaaccagcgcgtcggggagacattccacgcctcgcagccatccatgactgtggatggcttcaccgacccctccaattcggagcgcttctgcctagggctgctctccaatgtcaacaggaatgcagcagtggagctgacacggagacacatcggaagaggcgtgcggctctactacatcggaggggaggtcttcgcagagtgcctcagtgacagcgctatttttgtccagtctcccaactgtaaccagcgctatggctggcacccggccaccgtctgcaagatcccaccaggatgcaacctgaagatcttcaacaaccaggagttcgctgccctcctggcccagtcggtcaaccagggctttgaggctgtctaccagttgacccgaatgtgcaccatccgcatgagcttcgtcaaaggctggggagcggagtacaggagacagactgtgaccagtaccccctgctggattgagctgcacctgaatgggcctttgcagtggcttgacaaggtcctcacccagatgggctccccaagcatccgctgttccagtgtgtcttagagacatcaagtatggtaggggagggcaggcttggggaaaatggccatgcaggaggtggagaaaattggaactctactcaacccattgttgtcaaggaagaagaaatctttctccctcaactgaaggggtgcacccacctgttttctgaaacacacgagcaaacccagaggtggatgttatgaacagctgtgtctgccaaacacatttaccctttggccccactttgaagggcaagaaatggcgtctgctctggtggcttaagtgagcagaacaggtagtattacaccaccggccccctccccccagactctttttttgagtgacagctttctgggatgtcacagtccaaccagaaacacccctctgtctaggactgcagtgtggagttcaccttggaagggcgttctaggtaggaagagcccgcagggccatgcagacctcatgcccagctctctgacgcttgtgacagtgcctcttccagtgaacattcccagcccagccccgccccgccccgccccaccactccagcagaccttgccccttgtgagctggatagacttgggatggggagggagggagttttgtctgtctccctcccctctcagaacatactgattgggaggtgcgtgttcagcagaacctgcacacaggacagcgggaaaaatcgatgagcgccacctctttaaaaactcacttacgtttgtcctttttcactttgaaaagttggaaggatctgctgaggcccagtgcatatgcaatgtatagtgtctattatcacattaatctcaaagagattcgaatgacggtaagtgttctcatgaagcaggaggcccttgtcgtgggatggcatttggtctcaggcagcaccacactgggtgcgtctccagtcatctgtaagagcttgctccagattctgatgcatacggctatattggtttatgtagtcagttgcattcattaaatcaactttatcatatgctcttttaaatgtttggtttatatattttctttaaaaatcctgggctggcacattgactgggaaacctgagtgagacccagcaactgcttctctcccttctctctcctgaggtgaagcttttccaggttttgttgaagagatacctgccagcacttctgcaagctgaaatttacagaagcaaattcaccagaagggaaacatctcaggccaacataggcaaatgaaaagggctattaaaatatttttacacctttgaaaattgcaggcttggtacaaagaggtctgtcatcttccccctgggatataagatgatctagctcccggtagaggatcaccggtgacaactatagcagttgtattgtgtaacaagtactgctcccagcagcaattagggagaaaactagtctaaattatttcaactggaaaaaagaaaaaagagtcctcttcttttcccagccttttgcagaacacagtagacagaactgccaccttcaattggtactttattctttgctgctgtttttgtataaaatgacctatcccacgtttttgcatgaatttatagcaggaaaaatcaagggatttcctatggaagtcctgctttattccaggtgaagggaaggaagtgtatatacttttggcaagtcatacagctcaaatgtgatgagatttctgatgttagagggagatggagaggcttcctgatgcctcatctgcagggtcctgtgcctctgaagttctagccatgaggtttccaggtaggacagctgctccccaagcctcctgaggacacaggaagagacggaaggagcaccttgacagacttgtgtgagtcttctcgaaggagggttgactcagaacccagagacaatacaaaacccctcacttcctctgagagggccaaatgctgtgagtctgaagtatgtgcctggtgtgaaatgatctatggcctgtttcttacacaggaagccccctgaacctcctgtacatgtgttcatgttcccagccagctctgagacccaggaaccaaatattccattttggcttctgctagagcagtcatggttcctctcctaaaagccatgggcagcagtttccgagggcctgcatgatccacctgctgcacgatcctatgagggcttcctgtggcacacagccctctgggtgcttgggaactagcttcaggcacagcctgattctggtgatccagtgatctatggaagtcgtgtcttactccaggtgaagggggaaaaaaaaagcctatactttggcaggttatgaactttgaatgtgatgaaatgacacgtttggctgcatttggatggtgtcttagaaccctcattgctcagacctgaaggctacttctaggagcatgaagtttgagttttgtgtttttccaaaggatacttccttggccctttttctttattgactagaccaccagaggaggatgtgtgggattgtaggcaaacccacctgtggcatcactgaaaataaatttgatcatacctaagaggttaggaaatggtgccattcccaccttagagtgctacataggtgctttgggcgtatgtaacattagtgtccttccttgaagccacaagctagttttcttagttttaaaatcctgttgtatgaatggcatttgtatattaaaacacttttttaaaggacagttgaaaagggcaagaggaaaccagggcagttctagaggagtgctggtgactggatagcagttttaagtggcgttcacctagtcaacacgaccgcgtgtgttgcccctgccctgggctccccgccatgacatcttcaccttgcagcttgtgctgagactgacccaagtgcagctagcactgggacacagatccttgtcttcagcaccttccaaggagccaacttttattccctttcctctctcccctccccacctcgcttcttcccaatttagtaacttagatgcttccagcacatacgtaggtagctaccccagccggtttggattacaggcctgtgctggaacatcatctcagttggccaccttcctggcaggctgtagacctgacattttgagacaagcctagaggagtcaggagcagggactttgactcttaggaagagcacacatgagggcaaggctgctggcagacgtctccattgtccttatgttgtctgtgttgtatttttttttttttattgaccatggtgattatttttttaaaccatcgttaatatactgaagtgagctatagcacatatcatgtgcttagtttgtttatttttctccatctccccttggcttcctagagtttggacatattccaggctaaatgcttttactcaagactacagaaaggtttgaagtagtgtgtgcatggcatgcacgtatgtaagtaatctggggaagaagcaaagatctgtttcattcttagcctcaggcctcatgagggtctccacagggccggagctcaggttacaccactccttcgtccttacaggagatgtagggagaagaatctgcaggctgcttgtaggactgttcaccaagggggataccagcagcaagagagtgcacccgtttagccctggaccctgtttcttactgtgtgacttggctagagttgggagttcccccaaaataaacgtgtccccattttaccagaaccaaacctcaacacagcgaagctgtactgtctttgtgtggcaaagatgttcccttgtaggcccctttcaggtaaccgtcttcacaatgtattttcatcacagtttaaggagcatcagccgcttctcaagtgggtagggaaagcagaaaaacgtacgcaagaggacatggatccaaaatgatgatgaagcatctcccatggggaggtgatggtggggagatgatgggctaaacaggcaacttttcaaaaacacagctatcatagaaaagaaacttgcctcatgtaaactggattgagaaattctcagtgattctgcaatggatttttttttaatgcagaagtaatgtatactctagtattctggtgtttttatatttatgtaataatttcttaaaaccattcagacagataactatttaattttttttaagaaagttggaaaggtctctcctcccaaggacagtggctggaagagttggggcacagccagttctgaatgttggtggagggtgtagtggctttttggctcagcatccagaaacaccaaaccaggctggctaaacaagtggccgcgtgtaaaaacagacagctctgagtcaaatctgggcccttccacaagggtcctctgaaccaagccccactcccttgctaggggtgaaagcattacagagagatggagccatctatccaagaagccttcactcaccttcactgctgctgttgcaactcggctgttctggactctgatgtgtgtggagggatggggaatagaacattgactgtgttgattaccttcactattcggccagcctgaccttttaataactttgtaaaaagcatgtatgtatttatagtgttttagatttttctaacttttatatcttaaaagcagagcacctgtttaagcattgtacccctattgttaaagatttgtgtcctctcattccctctcttcctcttgtaagtgcccttctaataaacttttcatggaaaagctcctgtgccaggagctcagtctga

SEQ ID NO: 19885 - DNA, 579 bp, Homo sapiens
  source 1..579: mol_type = unassigned DNA
tttcctcctcttacccagtggctgttaacagcaggttttctgcccgagttatccaggtccctggatggccggttgcaggtgtcccatcggaaggggctccctcatgtcatctactgccgcctgtggcgatggccagacctgcacagccaccacgagctacgggccatggagctgtgtgagttcgccttcaatatgaagaaggacgaggtctgcgtgaatccctaccactaccagagagtagagacaccagttctacctcctgtgttggtgccacgccacacagagatcccggccgagttccccccactggacgactacagccattccatccccgaaaacactaacttccccgcaggcatcgagccccagagcaatattccagagaccccaccccctggctacctgagtgaagatggagaaaccagtgaccaccagatgaaccacagcatggacgcaggttctccaaacctatccccgaatccgatgtccccagcacataataacttgggtgagtatctccttgtgcacacaactggaaccccctctagctgcagccctggcgagtcgccagtgtgggga

SEQ ID NO: 19886 - DNA, 584 bp, Homo sapiens
  source 1..584: mol_type = unassigned DNA
agcacagaggcaaaccacagagtacatttgaggcccagatctgcttatttcgagggtggggccgcgtttttctcctgccacagtgagctaattaaagaaaacaagcttcgggagttgggagagaactgtccacaggacacttggggaggcttgctttggttgtggaggcctccacagcccccggaaggcaggtggaagtgggcatggagggtcctacgcatccccagcgggggtctgagggcccactgttgctcagctgggggatttggggacggtgggagggcatacatggatgggagggtggactccgttcctgagggggccagtgtggaggagggtcaggcagcccatggagatgggacagtgttctgaaatgcttcacaaatgtggacttttgccccaaactgtggacagagcgtatgtcctgagcgaggatcaactctgtccctggatggccggttgcaggtgtcccatcggaaggggctccctcatgtcatctactgccgcctgtggcgatggccagacctgcacagccaccacgagctacgggccatggagctgtgtgagttcgccttcaatatgaa

SEQ ID NO: 19887 - DNA, 542 bp, Homo sapiens
  source 1..542: mol_type = unassigned DNA
aaaacaagcttcgggagttgggagagaactgtccacaggacacttggggaggcttgctttggttgtggaggcctccacagcccccggaaggtccctggatggccggttgcaggtgtcccatcggaaggggctccctcatgtcatctactgccgcctgtggcgatggccagacctgcacagccaccacgagctacgggccatggagctgtgtgagttcgccttcaatatgaagaaggacgaggtctgcgtgaatccctaccactaccagagagtagagacaccagttctacctcctgtgttggtgccacgccacacagagatcccggccgagttccccccactggacgactacagccattccatccccgaaaacactaacttccccgcaggcatcgagccccagagcaatattccagagaccccaccccctggctacctgagtgaagatggagaaaccagtgaccaccagatgaaccacagcatggacgcaggttctccaaacctatccccgaatccgatgtccccagcacataataacttgg

SEQ ID NO: 19888 - DNA, 1567 bp, Homo sapiens
  source 1..1567: mol_type = unassigned DNA
aaatatgagcttgtgcttgctggaggaggatgacagaggagcctgctgctgagttcactggtgctggggttaggtcactgctgggctgaagcgcactgaccataagagcaacatgtgggcaagagccgcggcactggggtaatttattgccgccgctcgcttcaccaggaaccccacacgctgggttcccacaggatgcgacattcccacaggatgggacaactgcatggaaacccacactcgggcctgtgttgagcaaccacgtttgagtccctggatggccggttgcaggtgtcccatcggaaggggctccctcatgtcatctactgccgcctgtggcgatggccagacctgcacagccaccacgagctacgggccatggagctgtgtgagttcgccttcaatatgaagaaggacgaggtctgcgtgaatccctaccactaccagagagtagagacaccagttctacctcctgtgttggtgccacgccacacagagatcccggccgagttccccccactggacgactacagccattccatccccgaaaacactaacttccccgcaggcatcgagccccagagcaatattccagagaccccaccccctggctacctgagtgaagatggagaaaccagtgaccaccagatgaaccacagcatggacgcaggttctccaaacctatccccgaatccgatgtccccagcacataataacttggacctgcagccagttacctactgcgagccggccttctggtgctccatctcctactacgagctgaaccagcgcgtcggggagacattccacgcctcgcagccatccatgactgtggatggcttcaccgacccctccaattcggagcgcttctgcctagggctgctctccaatgtcaacaggaatgcagcagtggagctgacacggagacacatcggaagaggcgtgcggctctactacatcggaggggaggtcttcgcagagtgcctcagtgacagcgctatttttgtccagtctcccaactgtaaccagcgctatggctggcacccggccaccgtctgcaagatcccaccaggatgcaacctgaagatcttcaacaaccaggagttcgctgccctcctggcccagtcggtcaaccagggctttgaggctgtctaccagttgacccgaatgtgcaccatccgcatgagcttcgtcaaaggctggggagcggagtacaggagacagactgtgaccagtaccccctgctggattgagctgcacctgaatgggcctttgcagtggcttgacaaggtcctcacccagatgggctccccaagcatccgctgttccagtgtgtcttagagacatcaagtatggtaggggagggcaggcttggggaaaatggccatgcaggaggtggagaaaattggaactctactcaacccattgttgtcaaggaagaagaaatctttctccctcaactgaaggggtgcacccacctgttttctgaaacacacgagcaaacccagaggtggatgttatgaacagctgtgtctgccaaacacatttaccctttggccccactttg

SEQ ID NO: 19889 - DNA, 797 bp, Homo sapiens
  source 1..797: mol_type = unassigned DNA
caagccttggccagacgtggatatggttatgcacggactccgttttgtggtccctggatggccggttgcaggtgtcccatcggaaggggctccctcatgtcatctactgccgcctgtggcgatggccagacctgcacagccaccacgagctacgggccatggagctgtgtgagttcgccttcaatatgaagaaggacgaggtctgcgtgaatccctaccactaccagagagtagagacaccagttctacctcctgtgttggtgccacgccacacagagatcccggccgagttccccccactggacgactacagccattccatccccgaaaacactaacttccccgcaggcatcgagccccagagcaatattccagagaccccaccccctggctacctgagtgaagatggagaaaccagtgaccaccagatgaaccacagcatggacgcaggttctccaaacctatccccgaatccgatgtccccagcacataataacttggacctgcagccagttacctactgcgagccggccttctggtgctccatctcctactacgagctgaaccagcgcgtcggggagacattccacgcctcgcagccatccatgactgtggatggcttcaccgacccctccaattcggagcgcttctgcctagggctgctctccaatgtcaacaggaatgcagcagtggagctgacacggagacacatcggatgcaacctgaagatcttcaacaaccaggagttcgctgccctcctggcccagtcggtcaaccagggctttgaggctgtctac

SEQ ID NO: 19890 - DNA, 1530 bp, Homo sapiens
  source 1..1530: mol_type = unassigned DNA
ccctgtgacctcccaacttcacaaacatgtcttgcctgcaccctaggcaaacgtggaaaggcgcagctctggtacaccggaaagcatggtggatggggaggtccctggatggccggttgcaggtgtcccatcggaaggggctccctcatgtcatctactgccgcctgtggcgatggccagacctgcacagccaccacgagctacgggccatggagctgtgtgagttcgccttcaatatgaagaaggacgaggtctgcgtgaatccctaccactaccagagagtagagacaccagttctacctcctgtgttggtgccacgccacacagagatcccggccgagttccccccactggacgactacagccattccatccccgaaaacactaacttccccgcaggcatcgagccccagagcaatattccagagaccccaccccctggctacctgagtgaagatggagaaaccagtgaccaccagatgaaccacagcatggacgcaggttctccaaacctatccccgaatccgatgtccccagcacataataacttggacctgcagccagttacctactgcgagccggccttctggtgctccatctcctactacgagctgaaccagcgcgtcggggagacattccacgcctcgcagccatccatgactgtggatggcttcaccgacccctccaattcggagcgcttctgcctagggctgctctccaatgtcaacaggaatgcagcagtggagctgacacggagacacatcggaagaggcgtgcggctctactacatcggaggggaggtcttcgcagagtgcctcagtgacagcgctatttttgtccagtctcccaactgtaaccagcgctatggctggcacccggccaccgtctgcaagatcccaccaggatgcaacctgaagatcttcaacaaccaggagttcgctgccctcctggcccagtcggtcaaccagggctttgaggctgtctaccagttgacccgaatgtgcaccatccgcatgagcttcgtcaaaggctggggagcggagtacaggagacagactgtgaccagtaccccctgctggattgagctgcacctgaatgggcctttgcagtggcttgacaaggtcctcacccagatgggctccccaagcatccgctgttccagtgtgtcttagagacatcaagtatggtaggggagggcaggcttggggaaaatggccatgcaggaggtggagaaaattggaactctactcaacccattgttgtcaaggaagaagaaatctttctccctcaactgaaggggtgcacccacctgttttctgaaacacacgagcaaacccagaggtggatgttatgaacagctgtgtctgccaaacacatttaccctttggccccactttgaagggcaagaaatggcgtctgctctggtggcttaagtgagcagaacaggtagtattacaccaccggccccctccccccagactctttttttgagtgacagctttctgggatgtcacagtccaaccagaaaca

SEQ ID NO: 19891 - DNA, 586 bp, Homo sapiens
  source 1..586: mol_type = unassigned DNA
aggatgtcaggaagcaactgtaggaaaccccctgtgtgggtgaagcagaggcgtcgctcagggccctctgcctggttctgggctctgggaccctgctcccctcccctgaaccccccctcccccggccccaggatggagcttgcttgccatcgcagtggatttgcggaagagggttccagagtgtggggagagcgtgctggggaggggagctatttgttcctttccagtcatcgctgtactgagcggttccctgggacagttgaacccaggggaactgaattcatctgtgtccctggatggccggttgcaggtgtcccatcggaaggggctccctcatgtcatctactgccgcctgtggcgatggccagacctgcacagccaccacgagctacgggccatggagctgtgtgagttcgccttcaatatgaagaaggacgaggtctgcgtgaatccctaccactaccagagagtagagacaccagttctacctcctgtgttggtgccacgccacacagagatcccggccgagttccccccactggacgactacagccattccatccccgaaaacactaacttccccgca

SEQ ID NO: 19892 - DNA, 1147 bp, Homo sapiens
  source 1..1147: mol_type = unassigned DNA
agtaatcctgctgcgttcctcttagagcattctaatttggacgtgacgttcatcctgggttagtttactgggctgagattggctacaggcctgtgtgcttgggtcagagtgttaaggaggagacccactgtccaaccttctcagatcctttgcgggtagccctggcgtcccgcggagaccccaccccctggctacctgagtgaagatggagaaaccagtgaccaccagatgaaccacagcatggacgcaggttctccaaacctatccccgaatccgatgtccccagcacataataacttggacctgcagccagttacctactgcgagccggccttctggtgctccatctcctactacgagctgaaccagcgcgtcggggagacattccacgcctcgcagccatccatgactgtggatggcttcaccgacccctccaattcggagcgcttctgcctagggctgctctccaatgtcaacaggaatgcagcagtggagctgacacggagacacatcggaagaggcgtgcggctctactacatcggaggggaggtcttcgcagagtgcctcagtgacagcgctatttttgtccagtctcccaactgtaaccagcgctatggctggcacccggccaccgtctgcaagatcccaccaggatgcaacctgaagatcttcaacaaccaggagttcgctgccctcctggcccagtcggtcaaccagggctttgaggctgtctaccagttgacccgaatgtgcaccatccgcatgagcttcgtcaaaggctggggagcggagtacaggagacagactgtgaccagtaccccctgctggattgagctgcacctgaatgggcctttgcagtggcttgacaaggtcctcacccagatgggctccccaagcatccgctgttccagtgtgtcttagagacatcaagtatggtaggggagggcaggcttggggaaaatggccatgcaggaggtggagaaaattggaactctactcaacccattgttgtcaaggaagaagaaatctttctccctcaactgaaggggtgcacccacctgttttctgaaacacacgagcaaacccagaggtggatgttatgaacagctgtgtctgccaaacacatttaccctttggccccactttg

SEQ ID NO: 19893 - DNA, 554 bp, Homo sapiens
  source 1..554: mol_type = unassigned DNA
acacatttcagacttgggagttgatccggtcctgcgtgagcaaaggcagttatgatccaagcgggagtcagaggtggacaggggcgaggacaacagaaccaagagctggaacctctactccaagacctggagctcctacagccacggatgctagcatcatggtgtgcatgtgtgatgtctttgcaaaaggtgtctcagagccaagctgtgaaggccttttaacagaccaccttccttctgattcccagagaccccaccccctggctacctgagtgaagatggagaaaccagtgaccaccagatgaaccacagcatggacgcaggttctccaaacctatccccgaatccgatgtccccagcacataataacttggacctgcagccagttacctactgcgagccggccttctggtgctccatctcctactacgagctgaaccagcgcgtcggggagacattccacgcctcgcagccatccatgactgtggatggcttcaccgacccctccaattcggagcgcttctgcctagggctgctctccaatgtcaacagga

SEQ ID NO: 19894 - DNA, 552 bp, Homo sapiens
  source 1..552: mol_type = unassigned DNA
acacatttcagacttgggagttgatccggtcctgcgtgagcaaaggcagttatgatccaagcgggagtcagaggtggacaggggcgaggacaacagaaccaagagctggaacctctactccaagacctggagctcctacagccacggatgctagcatcatgagaccccaccccctggctacctgagtgaagatggagaaaccagtgaccaccagatgaaccacagcatggacgcaggttctccaaacctatccccgaatccgatgtccccagcacataataacttggacctgcagccagttacctactgcgagccggccttctggtgctccatctcctactacgagctgaaccagcgcgtcggggagacattccacgcctcgcagccatccatgactgtggatggcttcaccgacccctccaattcggagcgcttctgcctagggctgctctccaatgtcaacaggaatgcagcagtggagctgacacggagacacatcggaagaggcgtgcggctctactacatcggaggggaggtcttcgcagagtgcct

SEQ ID NO: 19895 - DNA, 590 bp, Homo sapiens
  source 1..590: mol_type = unassigned DNA
ttggctgaagtcatgccagtggatggatttagtggagaggccgacccagctcaagatggaaagacagccagagatgcgctcgggtggtgggggttccttggagaaggctgaggtcagggggatgatggggtcacagcagctcagaggggaggcaagccctgaaggacagtggctacaagcgggccctgcagagatgcaaaatgagatttaagaagaggccttggatttggcatcagggtttcaagggggagcttttagggagcagtgtgtaggaggggaggggctacttctaggagcatgaagtttgagttttgtgtttttccaaaggatacttccttggccctttttctttattgactagaccaccagaggaggatgtgtgggattgtaggcaaacccacctgtggcatcactgaaaataaatttgatcatacctaagaggttaggaaatggtgccattcccaccttagagtgctacataggtgctttgggcgtatgtaacattagtgtccttccttgaagccacaagctagttttcttagttttaaaatcctgttgtatgaatggcatttgtatattaaaacactttt

SEQ ID NO: 19896 - DNA, 775 bp, Homo sapiens
  source 1..775: mol_type = unassigned DNA
gcctcagtgacagcgctatttttgtccagtctcccaactgtaaccagcgctatggctggcacccggccaccgtctgcaagatcccaccaggaaaggcccccctctccacaccatctccctatttttggaagccctctttgcagacttctccctgctctgggagtcggagcttgtgggccagccttccatctccccttgcaggatgcaacctgaagatcttcaacaaccaggagttcgctgccctcctggcccagtcggtcaaccagggctttgaggctgtctaccagttgacccgaatgtgcaccatccgcatgagcttcgtcaaaggctggggagcggagtacaggagacagactgtgaccagtaccccctgctggattgagctgcacctgaatgggcctttgcagtggcttgacaaggtcctcacccagatgggctccccaagcatccgctgttccagtgtgtcttagagacatcaagtatggtaggggagggcaggcttggggaaaatggccatgcaggaggtggagaaaattggaactctactcaacccattgttgtcaaggaagaagaaatctttctccctcaactgaaggggtgcacccacctgttttctgaaacacacgagcaaacccagaggtggatgttatgaacagctgtgtctgccaaacacatttaccctttggccccactttgaagggcaagaaatggcgtctgctctggtggcttaagtgagcagaacaggtagtattacaccaccggccccctcccccca

SEQ ID NO: 19897 - DNA, 1957 bp, Homo sapiens
  source 1..1957: mol_type = unassigned DNA
tgtctttagttttactgtctggagaatcagatgcacaccttcacttagctgtgaatgtcacctccacccagcccagtgcccagaggccaaaatttggcccagatctctccttacctcctagccccagcaccaggtgtattcatcagaggagcccaggtggagggtgcactgggccctctgccaagcttcctgtggggacggcaggcccagtagcctttcggccagcccgtctctgggggcactgcctgctgtggaacggccagagctcctgttcctaggtgggtgaccagaccccacacagcatgggcaacctggcccaggtcccttatctctctgtcccctggtccctttgcccaaggaaaggcccccctctccacaccatctccctatttttggaagccctctttgcagacttctccctgctctgggagtcggagcttgtgggccagccttccatctccccttgcaggtatgtcagtggcacctcccagtgaggagatgggttcaaggggagggactgggttggccttccctttgcatggtactgagtgtggagtgtgtggcaaatgcatcacacaccatgtgtccctggagctgtataaatgaggctggtctagggggtccaggacttgctttatccaggaggggagcaacggacctggccacttccatccccacagccctgtttctgtgtttttggcaggatgcaacctgaagatcttcaacaaccaggagttcgctgccctcctggcccagtcggtcaaccagggctttgaggctgtctaccagttgacccgaatgtgcaccatccgcatgagcttcgtcaaaggctggggagcggagtacaggagacagactgtgaccagtaccccctgctggattgagctgcacctgaatgggcctttgcagtggcttgacaaggtcctcacccagatgggctccccaagcatccgctgttccagtgtgtcttagagacatcaagtatggtaggggagggcaggcttggggaaaatggccatgcaggaggtggagaaaattggaactctactcaacccattgttgtcaaggaagaagaaatctttctccctcaactgaaggggtgcacccacctgttttctgaaacacacgagcaaacccagaggtggatgttatgaacagctgtgtctgccaaacacatttaccctttggccccactttgaagggcaagaaatggcgtctgctctggtggcttaagtgagcagaacaggtagtattacaccaccggccccctccccccagactctttttttgagtgacagctttctgggatgtcacagtccaaccagaaacacccctctgtctaggactgcagtgtggagttcaccttggaagggcgttctaggtaggaagagcccgcagggccatgcagacctcatgcccagctctctgacgcttgtgacagtgcctcttccagtgaacattcccagcccagccccgccccgccccgccccaccactccagcagaccttgccccttgtgagctggatagacttgggatggggagggagggagttttgtctgtctccctcccctctcagaacatactgattgggaggtgcgtgttcagcagaacctgcacacaggacagcgggaaaaatcgatgagcgccacctctttaaaaactcacttacgtttgtcctttttcactttgaaaagttggaaggatctgctgaggcccagtgcatatgcaatgtatagtgtctattatcacattaatctcaaagagattcgaatgacggtaagtgttctcatgaagcaggaggcccttgtcgtgggatggcatttggtctcaggcagcaccacactgggtgcgtctccagtcatctgtaagagcttgctccagattctgatgcatacggctatattggtttatgtagtcagttgcattcattaaatcaactttatcatatgctctttt

SEQ ID NO: 19898 - DNA, 3087 bp, Homo sapiens
  source 1..3087: mol_type = unassigned DNA
cggagagccgcgcagggcgcgggccgcgcggggtggggcagccggagcgcaggcccccgatccccggcgggcgcccccgggcccccgcgcgcgccccggcctccgggagactggcgcatgccacggagcgcccctcgggccgccgccgctcctgcccgggcccctgctgctgctgctgtcgcctgcgcctgctgccccaactcggcgcccgacttcttcatggtgtgcggaggtcatgttcgctccttagcaggcaaacgacttttctcctcgcctcctcgccccgcatgttcaggaccaaacgatctgcgctcgtccggcgtctctggaggagccgtgcgcccggcggcgaggacgaggaggagggcgcagggggaggtggaggaggaggcgagctgcggggagaaggggcgacggacagccgagcgcatggggccggtggcggcggcccgggcagggctggatgctgcctgggcaaggcggtgcgaggtgccaaaggtcaccaccatccccacccgccagccgcgggcgccggcgcggccgggggcgccgaggcggatctgaaggcgctcacgcactcggtgctcaagaaactgaaggagcggcagctggagctgctgctccaggccgtggagtcccgcggcgggacgcgcaccgcgtgcctcctgctgcccggccgcctggactgcaggctgggcccgggggcgcccgccggcgcgcagcctgcgcagccgccctcgtcctactcgctccccctcctgctgtgcaaagtgttcaggtggccggatctcaggcattcctcggaagtcaagaggctgtgttgctgtgaatcttacgggaagatcaaccccgagctggtgtgctgcaacccccatcaccttagccgactctgcgaactagagtctcccccccctccttactccagatacccgatggattttctcaaaccaactgcagactgtccagatgctgtgccttcctccgctgaaacagggggaacgaattatctggcccctggggggctttcagattcccaacttcttctggagcctggggatcggtcacactggtgcgtggtggcatactgggaggagaagacgagagtggggaggctctactgtgtccaggagccctctctggatatcttctatgatctacctcaggggaatggcttttgcctcggacagctcaattcggacaacaagagtcagctggtgcagaaggtgcggagcaaaatcggctgcggcatccagctgacgcgggaggtggatggtgtgtgggtgtacaaccgcagcagttaccccatcttcatcaagtccgccacactggacaacccggactccaggacgctgttggtacacaaggtgttccccggtttctccatcaaggctttcgactacgagaaggcgtacagcctgcagcggcccaatgaccacgagtttatgcagcagccgtggacgggctttaccgtgcagatcagctttgtgaagggctggggccagtgctacacccgccagttcatcagcagctgcccgtgctggctagaggtcatcttcaacagccggtagccgcgtgcggaggggacagagcgtgagctgagcaggccacacttcaaactactttgctgctaatattttcctcctgagtgcttgcttttcatgcaaactctttggtcgttttttttttgtttgttggttggttttcttcttctcgtcctcgtttgtgttctgttttgtttcgctctttgagaaatagcttatgaaaagaattgttgggggtttttttggaagaaggggcaggtatgatcggcaggacaccctgataggaagaggggaagcagaaatccaagcaccaccaaacacagtgtatgaaggggggcggtcatcatttcacttgtcaggagtgtgtgtgagtgtgagtgtgcggctgtgtgtgcacgcgtgtgcaggagcggcagatggggagacaacgtgctctttgttttgtgtctcttatggatgtccccagcagagaggtttgcagtcccaagcggtgtctctcctgccccttggacacgctcagtggggcagaggcagtacctgggcaagctggcggctggggtcccagcagctgccaggagcacggctctgtccccagcctgggaaagcccctgcccctcctctccctcatcaaggacacgggcctgtccacaggcttctgagcagcgagcctgctagtggccgaaccagaaccaattattttcatccttgtcttattcccttcctgccagcccctgccattgtagcgtctttcttttttggccatctgctcctggatctccctgagatgggcttcccaagggctgccggggcagccccctcacagtattgctcacccagtgccctctcccctcagcctctcccctgcctgccctggtgacatcaggtttttcccggacttagaaaaccagctcagcactgcctgctcccatcctgtgtgttaagctctgctattaggccagcaagcggggatgtccctgggagggacatgcttagcagtccccttccctccaagaaggatttggtccgtcataacccaaggtaccatcctaggctgacacctaactcttctttcatttcttctacaactcatacactcgtatgatacttcgacactgttcttagctcaatgagcatgtttagactttaacataagctatttttctaactacaaaggtttaaatgaacaagagaagcattctcattggaaatttagcattgtagtgctttgagagagaaaggactcctgaaaaaaaacctgagatttattaaagaaaaaaatgtattttatgttatatataaatatattattacttgtaaatataaagacgttttataagcatcattatttatgtattgtgcaatgtgtataaacaagaaaaataaagaaaagatgcactttgctttaatataaatgcaaataacaaatgccaaattaaaaaagataaacacaagattggtgtttttttctatgggtgttatcacctagctgaatgtttttctaaaggagtttatgttccattaaacgatttttaaaatgtacacttga

SEQ ID NO: 19899 - DNA, 2211 bp, Homo sapiens
  source 1..2211: mol_type = unassigned DNA
agtctcattgagcctgactcgagtaatgattaactggctgcccggagcccagacgggtgacaaggtgctgtggtctgtcttacgatgggcagtgaagcctgagcagaccattaataatcagcatcaaggccgcgagtcagccttttggaatgtgtggtttgtctttcatgctgtttagagcgtgcttaaagatggatcttggtgtttttatttgtgtatttatttctttctctccccttttcaaatccacagcagactgtccagatgctgtgccttcctccgctgaaacagggggaacgaattatctggcccctggggggctttcagattcccaacttcttctggagcctggggatcggtcacactggtgcgtggtggcatactgggaggagaagacgagagtggggaggctctactgtgtccaggagccctctctggatatcttctatgatctacctcaggggaatggcttttgcctcggacagctcaattcggacaacaagagtcagctggtgcagaaggtgcggagcaaaatcggctgcggcatccagctgacgcgggaggtggatggtgtgtgggtgtacaaccgcagcagttaccccatcttcatcaagtccgccacactggacaacccggactccaggacgctgttggtacacaaggtgttccccggtttctccatcaaggctttcgactacgagaaggcgtacagcctgcagcggcccaatgaccacgagtttatgcagcagccgtggacgggctttaccgtgcagatcagctttgtgaagggctggggccagtgctacacccgccagttcatcagcagctgcccgtgctggctagaggtcatcttcaacagccggtagccgcgtgcggaggggacagagcgtgagctgagcaggccacacttcaaactactttgctgctaatattttcctcctgagtgcttgcttttcatgcaaactctttggtcgttttttttttgtttgttggttggttttcttcttctcgtcctcgtttgtgttctgttttgtttcgctctttgagaaatagcttatgaaaagaattgttgggggtttttttggaagaaggggcaggtatgatcggcaggacaccctgataggaagaggggaagcagaaatccaagcaccaccaaacacagtgtatgaaggggggcggtcatcatttcacttgtcaggagtgtgtgtgagtgtgagtgtgcggctgtgtgtgcacgcgtgtgcaggagcggcagatggggagacaacgtgctctttgttttgtgtctcttatggatgtccccagcagagaggtttgcagtcccaagcggtgtctctcctgccccttggacacgctcagtggggcagaggcagtacctgggcaagctggcggctggggtcccagcagctgccaggagcacggctctgtccccagcctgggaaagcccctgcccctcctctccctcatcaaggacacgggcctgtccacaggcttctgagcagcgagcctgctagtggccgaaccagaaccaattattttcatccttgtcttattcccttcctgccagcccctgccattgtagcgtctttcttttttggccatctgctcctggatctccctgagatgggcttcccaagggctgccggggcagccccctcacagtattgctcacccagtgccctctcccctcagcctctcccctgcctgccctggtgacatcaggtttttcccggacttagaaaaccagctcagcactgcctgctcccatcctgtgtgttaagctctgctattaggccagcaagcggggatgtccctgggagggacatgcttagcagtccccttccctccaagaaggatttggtccgtcataacccaaggtaccatcctaggctgacacctaactcttctttcatttcttctacaactcatacactcgtatgatacttcgacactgttcttagctcaatgagcatgtttagactttaacataagctatttttctaactacaaaggtttaaatgaacaagagaagcattctcattggaaatttagcattgtagtgctttgagagagaaaggactcctgaaaaaaaacctgagatttattaaagaaaaaaatgtattttatgttatatataaatatattattacttgtaaatataaagacgttttataagcatcattatttatgtattgtgcaatgtgtataaac

SEQ ID NO: 19900 - DNA, 1152 bp, Homo sapiens
  source 1..1152: mol_type = unassigned DNA
agtaaatacggagaatcacgtcgaacaccagtggcccagatactgtcgtggccgcgcacctttggagttttggggcaaagagagttggatggaaggccgaactggagtctcccccccctccttactccagatacccgatggattttctcaaaccaactgcagactgtccagatgctgtgccttcctccgctgaaacagggggaacgaattatctggcccctggggggctttcagattcccaacttcttctggagcctggggatcggtcacactggtgcgtggtggcatactgggaggagaagacgagagtggggaggctctactgtgtccaggagccctctctggatatcttctatgatctacctcaggggaatggcttttgcctcggacagctcaattcggacaacaagagtcagctggtgcagaaggtgcggagcaaaatcggctgcggcatccagctgacgcgggaggtggatggtgtgtgggtgtacaaccgcagcagttaccccatcttcatcaagtccgccacactggacaacccggactccaggacgctgttggtacacaaggtgttccccggtttctccatcaaggctttcgactacgagaaggcgtacagcctgcagcggcccaatgaccacgagtttatgcagcagccgtggacgggctttaccgtgcagatcagctttgtgaagggctggggccagtgctacacccgccagttcatcagcagctgcccgtgctggctagaggtcatcttcaacagccggtagccgcgtgcggaggggacagagcgtgagctgagcaggccacacttcaaactactttgctgctaatattttcctcctgagtgcttgcttttcatgcaaactctttggtcgttttttttttgtttgttggttggttttcttcttctcgtcctcgtttgtgttctgttttgtttcgctctttgagaaatagcttatgaaaagaattgttgggggtttttttggaagaaggggcaggtatgatcggcaggacaccctgataggaagaggggaagcagaaatccaagcaccaccaaacacagtgtatgaaggggggcggtcatcatttcacttgtcaggagtgtgtgtgagtgtgagtgtgcggctgtgtgtgcacgcgtgtgca

SEQ ID NO: 19901 - DNA, 1278 bp, Homo sapiens
  source 1..1278: mol_type = unassigned DNA
atgttcaggaccaaacgatctgcgctcgtccggcgtctctggaggagccgtgcgcccggcggcgaggacgaggaggagggcgcagggggaggtggaggaggaggcgagctgcggggagaaggggcgacggacagccgagcgcatggggccggtggcggcggcccgggcagggctggatgctgcctgggcaaggcggtgcgaggtgccaaaggtcaccaccatccccacccgccagccgcgggcgccggcgcggccgggggcgccgaggcggatctgaaggcgctcacgcactcggtgctcaagaaactgaaggagcggcagctggagctgctgctccaggccgtggagtcccgcggcgggacgcgcaccgcgtgcctcctgctgcccggccgcctggactgcaggctgggcccgggggcgcccgccggcgcgcagcctgcgcagccgccctcgtcctactcgctccccctcctgctgtgcaaagtgttcaggtggccggatctcaggcattcctcggaagtcaagaggctgtgttgctgtgaatcttacgggaagatcaaccccgagctggtgtgctgcaacccccatcaccttagccgactctgcgaactagagtctcccccccctccttactccagatacccgatggattttctcaaaccaactgactgtccagatgctgtgccttcctccgctgaaacagggggaacgaattatctggcccctggggggctttcagattcccaacttcttctggagcctggggatcggtcacactggtgcgtggtggcatactgggaggagaagacgagagtggggaggctctactgtgtccaggagccctctctggatatcttctatgatctacctcaggggaatggcttttgcctcggacagctcaattcggacaacaagagtcagctggtgcagaaggtgcggagcaaaatcggctgcggcatccagctgacgcgggaggtggatggtgtgtgggtgtacaaccgcagcagttaccccatcttcatcaagtccgccacactggacaacccggactccaggacgctgttggtacacaaggtgttccccggtttctccatcaaggctttcgactacgagaaggcgtacagcctgcagcggcccaatgaccacgagtttatgcagcagccgtggacgggctttaccgtgcagatcagctttgtgaagggctggggccagtgctacacccgccagttcatcagcagctgcccgtgctggctagaggtcatcttcaacagccggtag

SEQ ID NO: 19902 - DNA, 549 bp, Homo sapiens
  source 1..549: mol_type = unassigned DNA
aagtacagtgcggccctggcctggccaggccctggtattgggttgtaaaattcccaacttcttctggagcctggggatcggtcacactggtgcgtggtggcatactgggaggagaagacgagagtggggaggctctactgtgtccaggagccctctctggatatcttctatgatctacctcaggggaatggcttttgcctcggacagctcaattcggacaacaagagtcagctggtgcagaaggtgcggagcaaaatcggctgcggcatccagctgacgcgggaggtggatggtgtgtgggtgtacaaccgcagcagttaccccatcttcatcaagtccgccacactggacaacccggactccaggacgctgttggtacacaaggtgttccccggtttctccatcaaggctttcgactacgagaaggcgtacagcctgcagcggcccaatgaccacgagtttatgcagcagccgtggacgggctttaccgtgcagatcagctttgtgaagggctggggccagtgctacacccgccagttcatcagcagc

SEQ ID NO: 19903 - DNA, 563 bp, Homo sapiens
  source 1..563: mol_type = unassigned DNA
tgtcttacgatgggcagtgaagcctgagcagaccattaataatcagcatcaaggccgcgagtcagccttttggaatgtcagactgtccagatgctgtgccttcctccgctgaaacagggggaacgaattatctggcccctggggggctttcagattcccaacttcttctggagcctggggatcggtcacactggtgcgtggtggcatactgggaggagaagacgagagtggggaggctctactgtgtccaggagccctctctggatatcttctatgatctacctcaggggaatggcttttgcctcggacagctcaattcggacaacaagagtcagctggtgcagaaggtgcggagcaaaatcggctgcggcatccagctgacgcgggaggtggatggtgtgtgggtgtacaaccgcagcagttaccccatcttcatcaagtccgccacactggacaacccggactccaggacgctgttggtacacaaggtgttccccggtttctccatcaaggctttcgactacgagaaggcgtacagcctgcagcggcccaatgaccacgag

SEQ ID NO: 19904 - DNA, 574 bp, Homo sapiens
  source 1..574: mol_type = unassigned DNA
gttatcataagtttctatctctcttctcatggctgggcctttattttctcttgcttttttaatttcagagtctcccccccctccttactccagatacccgatggattttctcaaaccaactgcagactgtccagatgctgtgccttcctccgctgaaacagggggaacgaattatctggcccctggggggctttcagattcccaacttcttctggagcctggggatcggtcacactggtgcgtggtggcatactgggaggagaagacgagagtggggaggctctactgtgtccaggagccctctctggatatcttctatgatctacctcaggggaatggcttttgcctcggacagctcaattcggacaacaagagtcagctggtgcagaaggtgcggagcaaaatcggctgcggcatccagctgacgcgggaggtggatggtgtgtgggtgtacaaccgcagcagttaccccatcttcatcaagtccgccacactggacaacccggactccaggacgctgttggtacacaaggtgttccccggtttctccatcaaggctttcgactacgagaag

SEQ ID NO: 19905 - DNA, 401 bp, Homo sapiens
  source 1..401: mol_type = unassigned DNA
atatgccgcggcggctgagtgtgacctagcgcagaacagggcttccctcttgtgtcctccgtggggagtccaggagagggacttggtccttctggctgactccgtgcttggaaggtgtgctcccctctcagattcccaacttcttctggagcctggggatcggtcacactggtgcgtggtggcatactgggaggagaagacgagagtggggaggctctactgtgtccaggagccctctctggatatcttctatgatctacctcaggggaatggcttttgcctcggacagctcaattcggacaacaagagtcagctggtgcagaaggtgcggagcaaaatcggctgcggcatccagctgacgcgggaggtggatggtgtgtgggtgtacaaccgcagcagtt

SEQ ID NO: 19906 - DNA, 1076 bp, Homo sapiens
  source 1..1076: mol_type = unassigned DNA
gtctgcgcagccgcagtcagtgcggcgccagctctgcagagcccagacagggtccggttggggaggtcctcaggttctgaatcttgtgcctggagaaccagagaggaccctggagcaggaggagaaagagaagcttgtctcagaagctccacctcctcctggggcaatgcagagtctcaggcctgagcagacacgggggctgctggagcctgagaggaccaagactctgctgcctcgggagagccgggcctgggagaagcctcctcatcccgcctgcaccaaagactgggaggctgtggaggttggggcctccagccatgacagtgatgagaaagacctgtcttctcaagagactgggctttcccaggagtggagctcggtggaggaagatgacgaatcagagggctcccagggctttgtggagtggtcaaaagctccacaacaaacaaccatagtcttggtagtgtgcgtgctttttttgttcctggttttaacggggatgcctatgatgtttcacatttaactataatggtggctgttgttttaaaagtttaatttaatgaaatagatgccctatgtcatgttaaggaattgtgctagttaaaaatcaggaataggtgttgaatattttcaaatgcctttcaaacatcctttgagatgatttttaaaaaatttttggtgtgagttttcacatactttatttccatgaaatgaagacatcattgattgtaaaacattattttgtataccacggagaaagaaaagtgctaattaatcattaagatgccaccaactggaagatatctcctgactttgagaagatgaaaaaatgtgcaactgaagatcaatgaaatctggtacatttcctaacatcaaaccaactttgcattcttaaggttttggtgcaccagtcttttcatacactagattatatttattgatattttatgtaggattcttgcctctatcttcacatgtgagattggtgctatctttgtgaagttttggtatcatggttaagcttgcatcatagaaagacttgggtaacttttaccttttctatgcttttcaatagt

SEQ ID NO: 19907 - DNA, 573 bp, Homo sapiens
  source 1..573: mol_type = unassigned DNA
agtgcggcgccagctctgcagagcccagacagggtccggttggggaggtcctcaggttctgaatcttgtgcctggagaaccagagaggaccctggagcaggaggagaaagagaagcttgtctcagaagctccacctcctcctggggcaatgcagagtctcaggcctgagcagacacgggggctgctggagcctgagaggaccaagactctgctgcctcgggagagccgggcctgggagaagcctcctcatcccgcctgcaccaaagactgggaggctgtggaggttggggcctccagccatgacagtgatgagaaagggctttgtggagtggtcaaaagctccacaacaaacaaccatagtcttggtagtgtgcgtgctttttttgttcctggttttaacggggatgcctatgatgtttcacatttaactataatggtggctgttgttttaaaagtttaatttaatgaaatagatgccctatgtcatgttaaggaattgtgctagttaaaaatcaggaataggtgttgaatattttcaaatgcctttcaaacatcctttgagatgatttttaa

SEQ ID NO: 19908 - DNA, 570 bp, Homo sapiens
  source 1..570: mol_type = unassigned DNA
agctaatgtctgatcggggggatggctgaggacctcaggttctggtgtccaggtgctctgagctcttaaaaaaggaaggaattacttcaatatgaaatcagatggttcccttccacgtggtgtggtggaaagagcatagactttgaggcccacagactgtaactttaacataccgacttttcagagcgtcataaggataaatgcacttatatggagtctcactctgtcaccaggctggagtgcagtggcacgatctcggctcactgcaacttctgcctccccggttcaagtgattctcctgcctcagcctcctaagtagctgggactacaggtgtgcagcaccacactcaggaaaccactggactttgggaaaaccatgtggcagagtcgggaccacaaacatgtttctaataagtgaccgtgacccacagtgcaacctccactgctccaggactcaacccaaacccatctgtgcctctgatggcaggtcctacgagtccatgtgtgagtaccagcgagccaagtgccgagacccgaccctgggcgtggtgcatcgaggtagatgcaaag

SEQ ID NO: 19909 - DNA, 2040 bp, Homo sapiens
  source 1..2040: mol_type = unassigned DNA
aggcgtccaacctgctgccgcctgggccccgccgagcggagctagcgccgcgcgcagagcacacgctcgcgctccagctcccctcctgcgcggttcatgactgtgtcccctgaccgcagcctctgcgagcccccgccgcaggaccacggcccgctccccgccgccgcgagggccccgagcgaaggaaggaagggaggcgcgctgtgcgccccgcggagcccgcgaaccccgctcgctgccggctgcccagcctggctggcaccatgctgcccgcgcgctgcgcccgcctgctcacgccccacttgctgctggtgttggtgcagctgtcccctgctcgcggccaccgcaccacaggccccaggtttctaataagtgaccgtgacccacagtgcaacctccactgctccaggactcaacccaaacccatctgtgcctctgatggcaggtcctacgagtccatgtgtgagtaccagcgagccaagtgccgagacccgaccctgggcgtggtgcatcgaggtagatgcaaagatgctggccagagcaagtgtcgcctggagcgggctcaagccctggagcaagccaagaagcctcaggaagctgtgtttgtcccagagtgtggcgaggatggctcctttacccaggtgcagtgccatacttacactgggtactgctggtgtgtcaccccggatgggaagcccatcagtggctcttctgtgcagaataaaactcctgtatgttcaggttcagtcaccgacaagcccttgagccagggtaactcaggaaggaaagatgacgggtctaagccgacacccacgatggagacccagccggtgttcgatggagatgaaatcacagccccaactctatggattaaacacttggtgatcaaggactccaaactgaacaacaccaacataagaaattcagagaaagtctattcgtgtgaccaggagaggcagagtgccctggaagaggcccagcagaatccccgtgagggtattgtcatccctgaatgtgcccctgggggactctataagccagtgcaatgccaccagtccactggctactgctggtgtgtgctggtggacacagggcgcccgctgcctgggacctccacacgctacgtgatgcccagttgtgagagcgacgccagggccaagactacagaggcggatgaccccttcaaggacagggagctaccaggctgtccagaagggaagaaaatggagtttatcaccagcctactggatgctctcaccactgacatggttcaggccattaactcagcagcgcccactggaggtgggaggttctcagagccagaccccagccacaccctggaggagcgggtagtgcactggtatttcagccagctggacagcaatagcagcaacgacattaacaagcgggagatgaagcccttcaagcgctacgtgaagaagaaagccaagcccaagaaatgtgcccggcgtttcaccgactactgtgacctgaacaaagacaaggtcatttcactgcctgagctgaagggctgcctgggtgttagcaaagaagtaggacgcctcgtctaaggagcagaaaacccaagggcaggtggagagtccagggaggcaggatggatcaccagacacctaaccttcagcgttgcccatggccctgccacatcccgtgtaacataagtggtgcccaccatgtttgcacttttaataactcttacttgcgtgttttgtttttggtttcattttaaaacaccaatatctaataccacagtgggaaaaggaaagggaagaaagactttattctctctcttattgtaagtttttggatctgctactgacaacttttagagggttttgggggggtgggggagggtgttgttggggctgagaagaaagagatttatatgctgtatataaatatatatgtaaattgtatagttcttttgtacaggcattggcattgctgtttgtttatttctctccctctgcctgctgtgggtggtgggcactctggacacatagtccagctttctaaaatcca

SEQ ID NO: 19910 - DNA, 3666 bp, Homo sapiens
  source 1..3666: mol_type = unassigned DNA
cctgctgccgcctgggccccgccgagcggagctagcgccgcgcgcagagcacacgctcgcgctccagctcccctcctgcgcggttcatgactgtgtcccctgaccgcagcctctgcgagcccccgccgcaggaccacggcccgctccccgccgccgcgagggccccgagcgaaggaaggaagggaggcgcgctgtgcgccccgcggagcccgcgaaccccgctcgctgccggctgcccagcctggctggcaccatgctgcccgcgcgctgcgcccgcctgctcacgccccacttgctgctggtgttggtgcagctgtcccctgctcgcggccaccgcaccacaggccccaggtttctaataagtgaccgtgacccacagtgcaacctccactgctccaggactcaacccaaacccatctgtgcctctgatggcaggtcctacgagtccatgtgtgagtaccagcgagccaagtgccgagacccgaccctgggcgtggtgcatcgaggtagatgcaaagatgctggccagagcaagtgtcgcctggagcgggctcaagccctggagcaagccaagaagcctcaggaagctgtgtttgtcccagagtgtggcgaggatggctcctttacccaggtgcagtgccatacttacactgggtactgctggtgtgtcaccccggatgggaagcccatcagtggctcttctgtgcagaataaaactcctgtatgttcaggttcagtcaccgacaagcccttgagccagggtaactcaggaaggaaagatgacgggtctaagccgacacccacgatggagacccagccggtgttcgatggagatgaaatcacagccccaactctatggattaaacacttggtgatcaaggactccaaactgaacaacaccaacataagaaattcagagaaagtctattcgtgtgaccaggagaggcagagtgccctggaagaggcccagcagaatccccgtgagggtattgtcatccctgaatgtgcccctgggggactctataagccagtgcaatgccaccagtccactggctactgctggtgtgtgctggtggacacagggcgcccgctgcctgggacctccacacgctacgtgatgcccagttgtgagagcgacgccagggccaagactacagaggcggatgaccccttcaaggacagggagctaccaggctgtccagaagggaagaaaatggagtttatcaccagcctactggatgctctcaccactgacatggttcaggccattaactcagcagcgcccactggaggtgggaggttctcagagccagaccccagccacaccctggaggagcgggtagtgcactggtatttcagccagctggacagcaatagcagcaacgacattaacaagcgggagatgaagcccttcaagcgctacgtgaagaagaaagccaagcccaagaaatgtgcccggcgtttcaccgactactgtgacctgaacaaagacaaggtcatttcactgcctgagctgaagggctgcctgggtgttagcaaagaaggacgcctcgtctaaggagcagaaaacccaagggcaggtggagagtccagggaggcaggatggatcaccagacacctaaccttcagcgttgcccatggccctgccacatcccgtgtaacataagtggtgcccaccatgtttgcacttttaataactcttacttgcgtgttttgtttttggtttcattttaaaacaccaatatctaataccacagtgggaaaaggaaagggaagaaagactttattctctctcttattgtaagtttttggatctgctactgacaacttttagagggttttgggggggtgggggagggtgttgttggggctgagaagaaagagatttatatgctgtatataaatatatatgtaaattgtatagttcttttgtacaggcattggcattgctgtttgtttatttctctccctctgcctgctgtgggtggtgggcactctggacacatagtccagctttctaaaatccaggactctatcctgggcctactaaacttctgtttggagactgacccttgtgtataaagacgggagtcctgcaattgtactgcggactccacgagttcttttctggtgggaggactatattgccccatgccattagttgtcaaaattgataagtcacttggctctcggccttgtccagggaggttgggctaaggagagatggaaactgccctgggagaggaagggagtccagatcccatgaatagcccacacaggtaccggctctcagagggtccgtgcattcctgctctccggacccccaaagggcccagcattggtgggtgcaccagtatcttagtgaccctcggagcaaattatccacaaaggatttgcattacgtcactcgaaacgttttcatccatgcttagcatctactctgtataacgcatgagaggggaggcaaagaagaaaaagacacacagaagggcctttaaaaaagtagatatttaatatctaagcaggggaggggacaggacagaaagcctgcactgaggggtgcggtgccaacagggaaactcttcacctccctgcaaacctaccagtgaggctcccagagacgcagctgtctcagtgccaggggcagattgggtgtgacctctccactcctccatctcctgctgttgtcctagtggctatcacaggcctgggtgggtgggttgggggaggtgtcagtcaccttgttggtaacactaaagttgttttgttggttttttaaaaacccaatactgaggttcttcctgttccctcaagttttcttatgggcttccaggctttaagctaattccagaagtaaaactgatcttgggtttcctattctgcctcccctagaagggcaggggtgataacccagctacagggaaatcccggcccagctttccacaggcatcacaggcatcttccgcggattctagggtgggctgcccagccttctggtctgaggcgcagctccctctgcccaggtgctgtgcctattcaagtggccttcaggcagagcagcaagtggcccttagcgccccttcccataagcagctgtggtggcagtgagggaggttgggtagccctggactggtcccctcctcagatcacccttgcaaatctggcctcatcttgtattccaacccgacatccctaaaagtacctccacccgttccgggtctggaaggcgttggcaccacaagcactgtccctgtgggaggagcacaaccttctcgggacaggatctgatggggtcttgggctaaaggaggtccctgctgtcctggagaaagtcctagaggttatctcaggaatgactggtggccctgccccaacgtggaaaggtgggaaggaagccttctcccattagccccaatgagagaactcaacgtgccggagctgagtgggccttgcacgagacactggccccactttcaggcctggaggaagcatgcacacatggagacggcgcctgcctgtagatgtttggatcttcgagatctccccaggcatcttgtctcccacaggatcgtgtgtgtaggtggtgttgtgtggttttcctttgtgaaggagagagggaaactatttgtagcttgttttataaaaaataaaaaatgggtaaatcttg

SEQ ID NO: 19911 - DNA, 551 bp, Homo sapiens
  source 1..551: mol_type = unassigned DNA
gtttctaataagtgaccgtgacccacagtgcaacctccactgctccaggactcaacccaaacccatctgtgcctctgatggcaggtcctacgagtccatgtgtgagtaccagcgagccaagtgccgagacccgaccctgggcgtggtgcatcgaggtagatgcaaagatgctggccagagcaagtgtcgcctggagcgggctcaagccctggagcaagccaagaagcctcaggaagctgtgtttgtcccagagtgtggcgaggatggctcctttacccaggtgcagtgccatacttacactgggtactgctggtgtgtcaccccggatgggaagcccatcagtggctcttctgtgcagaataaaactcctgtatgttcaggttcagtcaccgacaagcccttgagccagggtaactcaggaaggaaaggtgagtggagttttatgctttatctaaatgtttgcttccaaaggtggtccaagcaggatttcttagatgagatagaaggagcctggggtgaaagcctaaggtgtcccgcagaacatcttctcc

SEQ ID NO: 19912 - DNA, 519 bp, Homo sapiens
  source 1..519: mol_type = unassigned DNA
tgtgaggaagggaggggaactgggaggagtggatgtgggagagagctgaagcctcaatgcctcagactttgaaaaatgactattaagaagtctgaggttacacttccactcacatagtctctttgcccagactttttctctctccttttcctcacccctagaaatcacagccccaactctatggattaaacacttggtgatcaaggactccaaactgaacaacaccaacataagaaattcagagaaagtctattcgtgtgaccaggagaggcagagtgccctggaagaggcccagcagaatccccgtgagggtattgtcatccctgaatgtgcccctgggggactctataagccagtgcaatgccaccagtccactggctactgctggtgtgtgctggtggacacagggcgcccgctgcctgggacctccacacgctacgtgatgcccagttgtgagagcgacgccagggccaagactacagaggcggatgaccccttcaaggacagggagctaccagg

SEQ ID NO: 19913 - DNA, 938 bp, Homo sapiens
  source 1..938: mol_type = unassigned DNA
aacacttagccttaacggtttaagttcccctccagccccgagccaggagcagttctcaataccgggagaggcacagagctatttcagccacatgaaaagcatcggaattgagatcgcagctcagaggacaccgggcgccccttccaccttccaaggagctttgtattcttgcatctggctgcctgggacttcccttaggcagtaaacaaatacataaagcagggataagactgcatgaatatgtcgaaacagccagtttccaatgttagagccatccaggcaaatatcaatattccaatgggagcctttcggccaggagcaggtcaaccccccagaagaaaagaatgtactcctgaagtggaggagggtgttcctcccacctcggatgaggagaagaagccaattccaggagcgaagaaacttccaggacctgcagtcaatctatcggaaatccagaatattaaaagtgaactaaaatatgtccccaaagctgaacagtagtaggaagaaaaaaggattgatgtgaagaaataaagaggcagaagatggattcaatagctcactaaaattttatatatttgtatgatgattgtgaacctcctgaatgcctgagactctagcagaaatggcctgtttgtacatttatatctcttccttctagttggctgtatttcttactttatcttcatttttggcacctcacagaacaaattagcccataaattcaacacctggagggtgtggttttgaggagggatatgattttatggagaatgatatggcaatgtgcctaacgattttgatgaaaagtttcccaagctacttcctacagtattttggtcaatatttggaatgcgttttagttcttcaccttttaaattatgtcactaaactttgtatgagttcaaataaatatttgactaaatgtaaaatgtgaa

SEQ ID NO: 19914 - DNA, 533 bp, Homo sapiens
  source 1..533: mol_type = unassigned DNA
ttccaccttccaaggagctttgtattcttgcatctggctgcctgggacttcccttaggcagtaaacaaatacataaagcagggataagactgcatgaatatgtcgaaacagccagtttccaatgttagagccatccaggcaaatatcaatattccaatgggagcctttcggccaggagcaggtcaaccccccagaagaaaagaatgtactcctgaagtggaggagggtgttcctcccacctcggatgaggagaagaagccaattccaggagcgaagaaacttccaggacctgcagtcaatctatcggaaatccagaatattaaaagtgaactaaaatatgtccccaaagctgaacagtagtaggaagaaaaaagtggtaaaagaactcagtgatatcaaagaattgaagaggaacaaaataagtatcaaagtggtaatgacgcatcaattacaagaaaaagaaatgattagcaaaggattgatgtgaagaaataaagaggcagaagatggattcaatagctcactaaaatttt

SEQ ID NO: 19915 - DNA, 2010 bp, Homo sapiens
  source 1..2010: mol_type = unassigned DNA
agttcgtaaaggagccgggtgacttcagaggcgccggcccgtccgtctgccgcacctgagcacggcccctgcccgagcctggcccgccgcgatgctgtagggaccgccgtgtcctcccgccggaccgttatccgcgccgggcgcccgccagacccgctggcaagatgccgcgctccttcctggtcaagaagcatttcaacgcctccaaaaagccaaactacagcgaactggacacacatacagtgattatttccccgtatctctatgagagttactccatgcctgtcataccacaaccagagatcctcagctcaggagcatacagccccatcactgtgtggactaccgctgctccattccacgcccagctacccaatggcctctctcctctttccggatactcctcatctttggggcgagtgagtccccctcctccatctgacacctcctccaaggaccacagtggctcagaaagccccattagtgatgaagaggaaagactacagtccaagctttcagacccccatgccattgaagctgaaaagtttcagtgcaatttatgcaataagacctattcaactttttctgggctggccaaacataagcagctgcactgcgatgcccagtctagaaaatctttcagctgtaaatactgtgacaaggaatatgtgagcctgggcgccctgaagatgcatattcggacccacacattaccttgtgtttgcaagatctgcggcaaggcgttttccagaccctggttgcttcaaggacacattagaactcacacgggggagaagcctttttcttgccctcactgcaacagagcatttgcagacaggtcaaatctgagggctcatctgcagacccattctgatgtaaagaaataccagtgcaaaaactgctccaaaaccttctccagaatgtctctcctgcacaaacatgaggaatctggctgctgtgtagcacactgagtgacgcaatcaatgtttactcgaacagaatgcatttcttcactccgaagccaaatgacaaataaagtccaaaggcattttctcctgtgctgaccaaccaaataatatgtatagacacacacacatatgcacacacacacacacacacccacagagagagagctgcaagagcatggaattcatgtgtttaaagataatcctttccatgtgaagtttaaaattactatatatttgctgatggctagattgagagaataaaagacagtaacctttctcttcaaagataaaatgaaaagcacattgcatcttttcttcctaaaaaaatgcaaagatttacattgctgccaaatcatttcaactgaaaagaacagtattgctttgtaatagagtctgtaataggatttcccataggaagagatctgccagacgcgaactcaggtgccttaaaaagtattccaagtttactccattacatgtcggttgtctggttgccattgttgaactaaagcctttttttgattacctgtagtgctttaaagtatatttttaaaagggaggaaaaaaataacaagaacaaaacacaggagaatgtattaaaagtatttttgttttgttttgtttttgccaattaacagtatgtgccttgggggaggagggaaagattagctttgaacattcctggcgcatgctccattgtcttactattttaaaacattttaataatttttgaaaattaattaaagatgggaataagtgcaaaagaggattcttacaaattcattaatgtacttaaactatttcaaatgcataccacaaatgcaataatacaataccccttccaagtgcctttttaaattgtatagttgatgagtcaatgtaaatttgtgtttatttttatatgattgaatgagttctgtatgaaactgagatgttgtctatagctatgtctataaacaacctgaagacttgtgaaatcaatgtttcttttttaaaaaacaattttcaagttttttttacaataaacagttttgatttaaaa

SEQ ID NO: 19916 - DNA, 626 bp, Homo sapiens
  source 1..626: mol_type = unassigned DNA
tctggaagccaggcgggcagggcagagaccccggctcctgcgcccctcctagctcccagagagcgtggatcgcgggcggggctcaccgagcgagctgtcccagagggaggagctgaaatctgaacctctcagctgtgattggatctttcttgcaaaagagaggaaaaaaaaaccctcccagccaaaacgggctcagttcgtaaaggagccgggtgacttcagaggcgccggcccgtccgtctgccgcacctgagcacggcccctgcccgagcctggcccgccgcgatgctgtagggaccgccgtgtcctcccgccggaccgttatccgcgccgggcgcccgccagacccgctggcaagatgccgcgctccttcctggtcaagaagcatttcaacgcctccaaaaagccaaactacagcgaactggacacacatacagtgattatttccccgtatctctatgagagttactccatgcctgtcataccacaaccagagatcctcagctcaggagcatacagccccatcactgtgtggactaccgctgctccattccacgcccagctacccaatggcctctctcctctttccggatactcctcatctttggggcgagtgagtccccctc

SEQ ID NO: 19917 - DNA, 998 bp, Homo sapiens
  source 1..998: mol_type = unassigned DNA
agggtgcgctcgccaggcctggggcgtggtgttgtctgcgcaggcgccgtgtgcccaggcgcctggcgtccgcgtcggcgatccggggtctgggcgcggcgaggtctggtgtggcagatgtggatagctggaccctcctgggtgcctctgcgttatgtcgtttggttgatgcatttggagagaatctgtgctctccacaactgcaggggcaacatgctttcctggcctcttcagatcagggtggctgttcttgggtgctgcaccaaaactccagcagtgggctttcttcaagtggccggctcacctcattcctgccaagacccaggtccgtgttctcacagtgctgccatctttcctccgtgtgagcgtgggctgtgcggagagtggacctcggtgtgtgcggggctgcgtgcactgccatcgctccctctacacgagccggcgtggacccagggctgagctgtgaccacgagggccatcccgacgagccgccatggacccagggctgagctgtgaccatgagggctatcccgacgagctgccgtggacccagggctgagccgtgaccatgagggccatcccgaaactgtgattgttttctgaatgtggaagcgtcggccgagcgcggtccttggagaacccttgctgcggagaatgacgctcactctgcggcctggcctcgcctccccatcccttctgcaaactcacaggacaggattgatggggagagcccaggcgaaacgaagctgaccctagtgaccagccctactggcggctctggaacaggcccgggaccggtggcctggagacagtggtcctttctggatgggctgcagtctccgaaggcttcccccactggagtcagccctttaggagtttgtccagtgcctccagaaagctgttttttgggggacggaggacttggcctggaattctggaattcccagggggtcagacatggttatgggaagtttaataaaaccggtgaatcacgtgaa

SEQ ID NO: 19918 - DNA, 829 bp, Homo sapiens
  source 1..829: mol_type = unassigned DNA
gcgcaggcgccgtgtgcccaggcgcctggcgtccgcgtcggcgatccggggtctgggcgcggcgaggtctggtgtggcagatgtggatagctggaccctcctgggtgcctctgcgttatgtcgtttggttgatgcatttggagagaatctgtgctctccacaactgcaggggcaacatgctttcctggcctcttcagatcagggtggctgttcttgggtgctgcaccaaaactccagcagtgggctttcttcaaggtgagctgcaagatggaatctgaggcccacccgtcagtaagagtttcctcctggtatccatggaatctactggtctgtctcactttggcctttgacccaggcaggggttcctaacatctacatcggtcattcggacagccttgcttttggttcactgccttacacggggcttccagatgttgacctgcttcattttacagtatcaggaaatcactttcccctcagaaatggccggctcacctcattcctgccaagacccaggtccgtgttctcacagtgctgccatctttcctccgtgtgagcgtgggctgtgcggagagtggacctcggtgtgtgcggggctgcgtgcactgccatcgctccctctacacgagccggcgtggacccagggctgagctgtgaccacgagggccatcccgacgagccgccatggacccagggctgagctgtgaccatgagggctatcccgacgagctgccgtggacccagggctgagccgtgaccatgagggccatcccgaaactgtgattatgaagaaaccaaggctttgtgactaactcaacccctcaagaag

SEQ ID NO: 19919 - DNA, 588 bp, Homo sapiens
  source 1..588: mol_type = unassigned DNA
gcgtcggcgatccggggtctgggcgcggcgaggtctggtgtggcagatgtggatagctggaccctcctgggtgcctctgcgttatgtcgtttggttgatgcatttggagagaatctgtgctctccacaactgcaggggcaacatgctttcctggcctcttcagatcagggtggctgttcttgggtgctgcaccaaaactccagcagtgggctttcttcaagtggccggctcacctcattcctgccaagacccaggtccgtgttctcacagtgctgccatctttcctccgtgtgagcgtgggctgtgcggagagtggacctcggtgtgtgcggggctgcgtgcactgccatcgctccctctacacgagccggcgtggacccagggctgagctgtgaccacgagggccatcccgacgagccgccatggacccagggctgagctgtgaccatgagggctatcccgacgagctgccgtggacccagggctgagccgtgaccatgagggccatcccgaaactgtgattgttttctggtatgtgggggatgtgccagaaccagggctgagctgtgaccacgagggccatcccgg

SEQ ID NO: 19920 - DNA, 2081 bp, Homo sapiens
  source 1..2081: mol_type = unassigned DNA
ccggggtctgggcgcggcgaggtctggtgtggcagatgtggatagctggaccctcctgggtgcctctgcgttatgtcgtttggttgatgcatttggagagaatctgtgctctccacaactgcaggggcaacatgctttcctggcctcttcagatcagggtggctgttcttgggtgctgcaccaaaactccagcagtgggctttcttcaagtggccggctcacctcattcctgccaagacccaggtccgtgttctcacagtgctgccatctttcctccgtgtgagcgtgggctgtgcggagagtggacctcggtgtgtgcggggctgcgtgcactgccatcgctccctctacacgagccggcgtggacccagggctgagctgtgaccacgagggccatcccgacgagccgccatggacccagggctgagctgtgaccatgagggctatcccgacgagctgccgtggacccagggctgagccgtgaccatgagggccatcccgaaactgtgattgttttctgatgaagaaaccaaggctttgtgactaactcaacccctcaagaaggacaaaactagcatcagagccccttgctcctgggtctggcaagaatgcctcttgtttgctgagaggtccacagatttacccggctcaagactgggagatgggaggtgaccaggtcagtgccagcctctctctgagctcctctgagtcgtggcagctgaggtgctcctccgagaatgttctgccatccgtgaggtcgtgtacgcctggaagcttttgttccattgaactctgccagggagctatacttagccacgcgagtggaggccaggagtgggttctctgaatatagatagtagcaagcaggctattttcaaacacctagagaacccccatgattattctgggccaaaatgatatttataggatgctctgggcccttggacatgaaggcaataaccttagcgccttttggcgttcgggataagtttctatcaacggggagtggagagagggacccggtcacccagaggcccgctgtccctcaacacctgtttccaggaggccaggcgtcttctttgcttttacactatgagtcagagaacagcgagaggcacgcagggccctactaattttccttcctgcacaccctggtgtgggtcctgtctgaggcctgccgtgtgctattagggaagacgtcatcaggggactttttctgctgtgaggagggtgcagcccctgcctttcagagctcaggacaccctcttcctcttgtccaggatcctcagggatttcctaggcttccaccctcacccagacatcactggaccgtcactgaaacacccgcttccagtgtgctcaggtcctgcagcctcctgtccatccttgccccgcctcccgcccggaggaaagactctgacactgcccctggaagagggaggagagtggatgtgatgagtgaagatttgggtggggaaaggaaggcctgagtcctgggaggaagagctctccccgccccgagcccccggagactgtgagcaaggctgagacgcctccttcctggtgctcaagctgcaggtgttggataggcctccagaagcccagattttaaatgaccgctccaggttaacctggggatggtcaggcagaacaaggaggagaggccagcagtgaagggcagggctggtgggcagtggctgggggtgtcctgggtggggctggccaccctcgctgcctctgacttgggccagacctgcgttaagtggagtggctcctccattctttacaccccaggcccctggcaggtgccctgcctttcctctgcccctctctctgccaacccatcctctccctcccagcccctgcccgcccagatataaatataagagcattttccatgggctgagacagaagggaaaacattcagctttattttcggcttgtgaaattcctgtccttcattcccaacaggtgcaatcgcctcatttagatattgggacccagaaatagaagacaatttacaatatagcttcctttagggatctggatgctaccaaacaaacaaacaaacaaaaaaagcc

SEQ ID NO: 19921 - DNA, 2096 bp, Homo sapiens
  source 1..2096: mol_type = unassigned DNA
ttgtatttgtagtagaaacagggtttcaccatgttggccaggctggtctcgaactcctggcctcagatgatctatccacctcaacctcccaaaatgctgggattacaggcgtgagccactgcgcccggccagcctttggtttttctatggcttacttggagttctctttaattctgacatagaagttcgcacaatccctcttttacagatgaagaaaccaaggctttgtgactaactcaacccctcaagaaggacaaaactagcatcagagccccttgctcctgggtctggcaagaatgcctcttgtttgctgagaggtccacagatttacccggctcaagactgggagatgggaggtgaccaggtcagtgccagcctctctctgagctcctctgagtcgtggcagctgaggtgctcctccgagaatgttctgccatccgtgaggtcgtgtacgcctggaagcttttgttccattgaactctgccagggagctatacttagccacgcgagtggaggccaggagtgggttctctgaatatagatagtagcaagcaggctattttcaaacacctagagaacccccatgattattctgggccaaaatgatatttataggatgctctgggcccttggacatgaaggcaataaccttagcgccttttggcgttcgggataagtttctatcaacggggagtggagagagggacccggtcacccagaggcccgctgtccctcaacacctgtttccaggaggccaggcgtcttctttgcttttacactatgagtcagagaacagcgagaggcacgcagggccctactaattttccttcctgcacaccctggtgtgggtcctgtctgaggcctgccgtgtgctattagggaagacgtcatcaggggactttttctgctgtgaggagggtgcagcccctgcctttcagagctcaggacaccctcttcctcttgtccaggatcctcagggatttcctaggcttccaccctcacccagacatcactggaccgtcactgaaacacccgcttccagtgtgctcaggtcctgcagcctcctgtccatccttgccccgcctcccgcccggaggaaagactctgacactgcccctggaagagggaggagagtggatgtgatgagtgaagatttgggtggggaaaggaaggcctgagtcctgggaggaagagctctccccgccccgagcccccggagactgtgagcaaggctgagacgcctccttcctggtgctcaagctgcaggtgttggataggcctccagaagcccagattttaaatgaccgctccaggttaacctggggatggtcaggcagaacaaggaggagaggccagcagtgaagggcagggctggtgggcagtggctgggggtgtcctgggtggggctggccaccctcgctgcctctgacttgggccagacctgcgttaagtggagtggctcctccattctttacaccccaggcccctggcaggtgccctgcctttcctctgcccctctctctgccaacccatcctctccctcccagcccctgcccgcccagatataaatataagagcattttccatgggctgagacagaagggaaaacattcagctttattttcggcttgtgaaattcctgtccttcattcccaacaggtgcaatcgcctcatttagatattgggacccagaaatagaagacaatttacaatatagcttcctttagggatctggatgctaccaaacaaacaaacaaacaaaaaaagccctcctgtgagatgccgagacttaatagaaaccgtggttggagctcttgcctttttccaggccggtggagaccctcacccctggcagcctgaccgtgaagcagaggaggcaagagctccgggagacagtcgggagggagggggccctggaggacaggctcctagccctactcctcctcaagacccgggtgctggcctgtcccctgcctttgccccgatggggatgagggagaggagatgggtcagggaacagctatggccattggggaaggtgacttggatgcaacctttgaaagagatgcttccagtaaaccccatcggttaagatc

SEQ ID NO: 19922 - DNA, 2048 bp, Homo sapiens
  source 1..2048: mol_type = unassigned DNA
tccgcacacatgtgtagtcacatgcgcatccacatacacataacagaagccagtgtccttcaccatgagccaggcactccggcagtttctgctctattttattttacaaaattgctgggggtgactgatgaaactgatttcaaaatgcacatttgaaaagcatggtcctagctggcaccccctggtggcagcccgggcctcgggtgtgggtccaggtgggatcccccccatccccaactctgggttctgagctgggataaaggcctcttggcggtgttgctgggggccacagccccaacagcgcccttcctgctctcccccaccggccacagagcgtgagtcccgaccaccgcgtccgccggcgcccctcagtgggcctttgtcccaagaagctgccaagccaggtggggactgctctcaccgcccgtgtggcaggctgtcctctgaaggacagagtcctcttctctcgtgtccctaagcctagcaggcagtgggaatgaacgggcagcccggttgctgggcacccatctccccagcctagccggtgtgtggaggattgcagccctttagcccagcctgcccaggcaagcctgccggggtgagcaggagggcttctggggtgaagggaggtgggggagggagggagaccacgggcggaggctcacctgaactgaatgcaggaggggcagtgcctttgcaccagaaagagcccatgtgtccttctcaccatcccctgtgcttacacccccagtcagcatgctccgggggtccctgagccgggccgccccagacggccctccttccctcccacccaccaccccgcgacccctcccaaacgtgtgcgccaggaagatgactccagggtgcctttagctggggctgtagtggttgggacgggcggctgtatatcaggggtgagttccagggagacttgggggcttagaaaacttagaaaacttctccaagttgggagagaatcccgcccgccctgccggaggcggggctcagtgccctgaagtggaggcgcccgtgggccacctccctccctgcagccgcagccgctgcgcagaggcgctggctccttctcctcccacctgggacaggtgtctccccagcccccgctcccaggggcctctctctctctcccgcccctcagggtcgagtcccggcaggggctcggggatcgggtagtcagtacctctctgcgtctccagccgccggtagttggggaccctgtggctggagtgcgttttcaccaggaaggagcgcggcatgttcccctcccgggcggcaggccggggtgggctggggcgggaggggcgcgcctgggtccggactgctgcgtccgccggcgcttgaaggggtcaggctcattagcatagcgcgccgcctccgccaaccagcgcccggcgcgagtggggcggggccacgggggcggaactgagggcgaggcggggtctcgggcaacacgcccaggacaggtgcgcgggcgggacggggcggggagcgcgtggccgccggtgtcctccccacgggaattctctggcgtgcgcgccgccgagtcacacaccgacccgtcgggcctggccacccactcgccgtgagtgaagggcagagttcaaagctgtgtggaaaccgagcgagaatctcttccacagaatgtggaagcgtcggccgagcgcggtccttggagaacccttgctgcggagaatgacgctcactctgcggcctggcctcgcctccccatcccttctgcaaactcacaggacaggattgatggggagagcccaggcgaaacgaagctgaccctagtgaccagccctactggcggctctggaacaggcccgggaccggtggcctggagacagtggtcctttctggatgggctgcagtctccgaaggcttcccccactggagtcagccctttaggagtttgtccagtgcctccagaaagctgttttttgggggacggaggacttggcctggaattctggaattcccagggggtcagacatggttatgggaagtttaataaaaccggtgaatca

SEQ ID NO: 19923 - DNA, 2656 bp, Homo sapiens
  source 1..2656: mol_type = unassigned DNA
acgccgtagggggcgggccgttcgggcttggtttcctgggcgaccaccgctggctagtccgttagaggcgtgcgggcttcggaggcgtgcgggcttcgggtgccatggggactcctcccggcctgcagaccgactgcgaggcgctgctcagccgcttccaggagacggacagtgtacgcttcgaggacttcacggagctctggagaaacatgaagttcgggactatcttctgtggcagaatgagaaatttagaaaagaacatgtttacaaaagaagctttagctttggcttggcgatattttttacctccatacaccttccagatcagagttggtgctttgtatctgctatatggattatataatacccaactgtgtcaaccaaaacaaaagatcagagttgccctgaaggattgggatgaagttttaaaatttcagcaagatttagtaaatgcacagcattttgatgcagcttatatttttaggaagctacgactagacagagcatttcactttacagcaatgcccaaattgctgtcatataggatgaagaaaaaaattcaccgagctgaagttacagaagaatttaaggacccaagtgatcgtgtgatgaaacttatcacttctgatgtattagaggaaatgctgaatgttcatgatcattatcagaacatgaaacatgtaatttcagttgataagtccaagccagataaagccctcagcttgataaaggatgatttttttgacaatattaagaacatagttttggagcatcagcagtggcacaaagacagaaagaatccatccttaaagtcaaaaactaatgatggagaagaaaaaatggaaggaaattcacaagaaacggagagatgtgaaagggcagaatcattagcgaaaataaaatcaaaggccttttcagttgtcatacaggcatccaaatcaagaaggcatcgtcaagtcaaactcgactcttctgactctgattctgcatctggtcaagggcaagtcaaagcaactaggaaaaaagagaagaaagaaagattgaaaccagcaggaaggaagatgtctctcagaaacaaaggcaatgtgcagaatatacacaaggaagataaacctttaagtctgagtatgcctgtaattacagaagaagaagagaatgaaagtttgagtggaacagagttcactgcatccaagaagaggagaaaacactgaacaaagagcctggtgtagtttttaattttgagttttctgacagaagaaaagattgatattttgtgtattgaacaggaagactgccagtattaaaaaaatccttctgggaatctgtaggttatttcttggaaattgcaatacgtagttctagaataaaagtacaaaaaattagaataagaattctttaacattttctttaatgatttgcataaatggagataaaacttgtatttagtatgtaatagaaaaaattctgttattcgcagattgttactatttcctataaggttttgtgatactatactgtcctaatacagtctggtaatactattctattttatttaaaatattttttattgaaatattaatgtttattacatgcaaataactattttgtatctacagtcggataatggattttttattttgtatatttattctattttgtatattgttaagtgcaataaagtttttgccttgctttattttttaatacataaaacttacattctcataacgtgattgataacttaggaagttcacaatgtattttctacttctgcaattaaatattctttagtgcttgtttattattactaaatactaattaagtactaacaagtacttaaatactaatgtattaagtatttaagtactttctaataaaatctttaacaataataatgtaaatttcagaatgtgtctctggtacagaatagttgatattaacagaaaaaaaaaaatctgtagcttcatgaatatgccactctgttaatttcttgttccagacattttaatagagattgcttgagccatgttgtttgaattgctgccaatagcagaccatatccctatcatgttgttggctcaactgttttttttttttccctaatagagatggagtatcgctatgttgctcaggctggtcttgaactcctgggctcaagctatcctcctgcctcagcctcccaaagtactgggattataggtgtgagctactgtacccagccttaacctgtttcacagttgattatacttcatgctgttttccagcatggtattattaagggatttaaagtttgggttgcatgcctgtaatcccagcattttgggaggccgaggtgggcggatcacgaggtcaggagatcgagaccatcgtgactaacacagtgaaaccccgtctctaataaaaatacgaaaaattagccaggcgtggtggcgggcgcctgtaatcccagctactcgggaagctgaggcaggagaatggtgtgaacccagtgagccgagatcgtgccactgcactccagcctgggcaacagagtgagacttcgtctcaaaaaaaaaaaaaagtttgggttgaagatcaaattcgtgatatctctatatctaatctttaaaaatcagaatgctaatgctgacgcaaataaaattttcatttattagca

SEQ ID NO: 19924 - DNA, 723 bp, Homo sapiens
  source 1..723: mol_type = unassigned DNA
gagcacagaacattccaggcaggcaaagccacccttgccctcctctccttggccacgtcctcaggggtgggcgagcttcggggggaggggtgggggtgaagactccgtgccaacgcaaaatactctgccaaaaggcttctcagacatgagtttcccagggcaatgcccaccttccgttccccgccttcccgagtctcttctcccagtttatgctggaaccctggaatggtctggggaccaatgagatggcagcggttaacgcttggatcacggaatttataagtatttgaccgtactcaaaatgtgcaaggaagaataatggaagcccctgaataccttgatttggatgaaattgactttagtgatgacatatcttattcagtcacatcactcaagacgatcccagaactgtgccgaagatgtgatacgcaaaacgaagacagatcagtttctagctctagctggaattgtggcatctcaactcttattacaaacacgcaaaagcccacaggaatcgctgatgtgtacagtaagttccgcccagtgaagcgggtttcgccactgaaacatcagccagagactctggagaacaatgaaagtgatgaccaaaagaaccagaaagtggttgagtaccagaaagggggtgagtctgacctgggcccccagcctcaggagcttggccctggagatggagtgggcggcccaccaggtaagagctctgag

SEQ ID NO: 19925 - DNA, 2359 bp, Homo sapiens
  source 1..2359: mol_type = unassigned DNA
aaagtgggaagcgcggacaaaaagtaggcggggaggagaggagagccccagctggggaaaagcaacggcagtcgaggtaaaaagagcgaaaggaatttataagtatttgaccgtactcaaaatgtgcaaggaagaataatggaagcccctgaataccttgatttggatgaaattgactttagtgatgacatatcttattcagtcacatcactcaagacgatcccagaactgtgccgaagatgtgatacgcaaaacgaagacagatcagaatggtcagttggagtgcgtacgctggatggtgagcgaaacagaagccattgcagaactgagttgttctaaggattttccaagccttattcattacgcaggttgctatggccagtcagagattcaaggattttcaattcacatctgaatgagaattttctcttgctacggaaaagattcttctgtggcttcttcagtttatgcaagaacagggcatctcgttggatgaagtagaccaggatggcaacagtgccgttcacgtagcctcacagcatggctaccttggatgcatacagaccttggttgaatatggagcaaatgtcaccatgcagaaccacgctggggaaaagccctcccagagcgccgagcggcaggggcacaccctgtgctccaggtacctggtggtggtggagacctgcatgtcgctggcctctcaagtggtgaagttaaccaagcagctaaaggaacaaacagtagaacgtgtcacgctgcagaaccaactccaacaatttctagaagcccagaaatcagagggcaagtcactcccttcttcacccagttcaccatcctcacctgcctccagaaagtcccagtggaaatctccagatgcagatgatgattctgtagccaaaagcaagccaggagtccaagaggggattcaggttcttggaagcctgtcagcctccagccgggctagacccaaagcaaaagatgaagattctgataaaatcttacgccagttattgggaaaggaaatctcagaaaatgtctgcacccaggaaaaactgtccttggaattccaggatgctcaggcttcctctagaaattctaaaaagatcccactggagaagagggaactgaagttagccaggctgagacagctgatgcagaggtcactgagtgagtctgacacagactccaacaactctgaggaccccaagactaccccagtgaggaaggctgaccgaccaaggccgcagcccattgtagaaagcgtagagagtatggacagcgcagaaagcctgcacctgatgattaagaaacacaccttggcatcagggggacgcaggtttcctttcagcatcaaggcctccaaatccctggatggccacagcccatctcccacctcagagagcagcgaaccagacttagaatcccagtatccaggctcagggagtattcctccaaaccagccctctggtgaccctcagcagcccagccctgacagtactgctgcccagaaagttgccacaagtcccaagagtgccctcaagtctccatcttccaagcgtaggacatctcagaacttaaaactgagagttacctttgaggagcctgtggtgcagatggagcagcctagccttgaactgaatggagaaaaagacaaagataagggcaggactctccagcggacctccacaagtaacgaatcgggggatcaactgaaaaggccttttggagcctttcgatctatcatggagacactaagtggcaaccaaaacaataataataactaccaggcagccaaccagctgaaaacctctacattgcccttgacctcacttgggaggaagacagatgccaagggaaaccctgccagctccgctagcaaaggaaagaataaggcagcataatgacatcaatagaaaaatgaagaaatcctacagcataaagcacattgctgagccagagtcaaaagaactcttcttgtaaatcactttttaaattttctctcactgatgccctttggaaattattggaaatttctggactatcctctttggaaagagaaccatgaaaacaatgcctcaccagcagaagaacagaatatcaggatgccttaaatttatagtagtagactgtaaaagattcattttggggtgatatctgtatatataacttgtttttttaaaagatgccgtttaaaagcatgattgggaaaatgtatgttttttaagagtagattgattcaccctacccacaggacattcaccaagccactgataccattttatatttcatcaattgcatgagtatttgctaatgttgattgaacctccctttccccataatgtgggcagatttggctcag

SEQ ID NO: 19926 - DNA, 586 bp, Homo sapiens
  source 1..586: mol_type = unassigned DNA
agctggggaaaagcaacggcagtcgaggtaaaaagagcgaaaggtaaagaaagagcaggaatttataagtatttgaccgtactcaaaatgtgcaaggaagaataatggaagcccctgaataccttgatttggatgaaattgactttagtgatgacatatctgacaataggagtcaagggaacaggctacaaaagcttggattggaggacacagacagggaagatgcaatgggctttggttcccatagggccaaactgacagtagttgctgccctgggagcttgccattgtcctgagaatgagtattcagtcacatcactcaagacgatcccagaactgtgccgaagatgtgatacgcaaaacgaagacagatcagtttctagctctagctggaattgtggcatctcaactcttattacaaacacgcaaaagcccacaggaatcgctgatgtgtacagtaagttccgcccagtgaagcgggtttcgccactgaaacatcagccagagactctggagaacaatgaaagtgatgaccaaaagaaccagaaagtggttgagtaccagaaagggggtgagtctgacctggg

SEQ ID NO: 19927 - DNA, 420 bp, Homo sapiens
  source 1..420: mol_type = unassigned DNA
agtcgaggtaaaaagagcgaaaggtaaagaaagagcaggttcgtggacaggagccggcgggcaggccgggggatccctggaatttataagtatttgaccgtactcaaaatgtgcaaggaagaataatggaagcccctgaataccttgatttggatgaaattgactttagtgatgacatatcttattcagtcacatcactcaagacgatcccagaactgtgccgaagatgtgatacgcaaaacgaagacagatcagtttctagctctagctggaattgtggcatctcaactcttattacaaacacgcaaaagcccacaggaatcgctgatgtgtacagtaagttccgcccagtgaagcgggtttcgccactgaaacatcagccagagactctggagaacaatgaaagtgatgaccaaaaga

SEQ ID NO: 19928 - DNA, 2807 bp, Homo sapiens
  source 1..2807: mol_type = unassigned DNA
aaaaagagcgaaaggtaaagaaagagcaggttcgtggacaggagccggcgggcaggccgggggatccctgagacagggtttcaccatgttgcccaggctggtctcgaactcctggactcaagcagtctgtccatctcagcctcccaaagtgctgggattacaggtgtgagccaccacactggccaaggaatttataagtatttgaccgtactcaaaatgtgcaaggaagaataatggaagcccctgaataccttgatttggatgaaattgactttagtgatgacatatcttattcagtcacatcactcaagacgatcccagaactgtgccgaagatgtgatacgcaaaacgaagacagatcagtttctagctctagctggaattgtggcatctcaactcttattacaaacacgcaaaagcccacaggaatcgctgatgtgtacagtaagttccgcccagtgaagcgggtttcgccactgaaacatcagccagagactctggagaacaatgaaagtgatgaccaaaagaaccagaaagtggttgagtaccagaaagggggtgagtctgacctgggcccccagcctcaggagcttggccctggagatggagtgggcggcccaccaggtaagagctctgagcccagcacatcgctgggtgaactggagcactacgacctcgacatggatgagattctggatgtgccttatattaaatccagtcagcagcttgcctcttttaccaaggtgacttcagaaaaaagaattttgggcttatgcacaaccatcaatggcctttctggcaaagcctgctctacaggaagttctgagagctcatcatccaacatggcaccattttgtgttctttctcccgtgaaaagccctcacttgagaaaagcatcagctgtcatccacgaccagcacaagctgtccactgaagaaaccgagatctcacctcctctggttaaatgtggctctgcatatgagcctgaaaaccagagtaaagacttcctaaacaagacatttagtgatcctcatggtcgaaaagttgagaagacaacaccagactgccagctcagggccttccacctacaatcctcagcagcagaatccaaaccagaagagcaggtcagtggcctaaaccggaccagctcccaaggcccagaagaaaggagtgagtatctgaaaaaagtgaaaagcatcttgaacattgttaaagaaggacagatctctctcctgaatggtcagttggagtgcgtacgctggatggtgagcgaaacagaagccattgcagaactgagttgttctaaggattttccaagccttattcattacgcaggttgctatggccaggaaaagattcttctgtggcttcttcagtttatgcaagaacagggcatctcgttggatgaagtagaccaggatggcaacagtgccgttcacgtagcctcacagcatggctaccttggatgcatacagaccttggttgaatatggagcaaatgtcaccatgcagaaccacgctggggaaaagccctcccagagcgccgagcggcaggggcacaccctgtgctccaggtacctggtggtggtggagacctgcatgtcgctggcctctcaagtggtgaagttaaccaagcagctaaaggaacaaacagtagaacgtgtcacgctgcagaaccaactccaacaatttctagaagcccagaaatcagagggcaagtcactcccttcttcacccagttcaccatcctcacctgcctccagaaagtcccagtggaaatctccagatgcagatgatgattctgtagccaaaagcaagccaggagtccaagaggggattcaggttcttggaagcctgtcagcctccagccgggctagacccaaagcaaaagatgaagattctgataaaatcttacgccagttattgggaaaggaaatctcagaaaatgtctgcacccaggaaaaactgtccttggaattccaggatgctcaggcttcctctagaaattctaaaaagatcccactggagaagagggaactgaagttagccaggctgagacagctgatgcagaggtcactgagtgagtctgacacagactccaacaactctgaggaccccaagactaccccagtgaggaaggctgaccgaccaaggccgcagcccattgtagaaagcgtagagagtatggacagcgcagaaagcctgcacctgatgattaagaaacacaccttggcatcagggggacgcaggtttcctttcagcatcaaggcctccaaatccctggatggccacagcccatctcccacctcagagagcagcgaaccagacttagaatcccagtatccaggctcagggagtattcctccaaaccagccctctggtgaccctcagcagcccagccctgacagtactgctgcccagaaagttgccacaagtcccaagagtgccctcaagtctccatcttccaagcgtaggacatctcagaacttaaaactgagagttacctttgaggagcctgtggtgcagatggagcagcctagccttgaactgaatggagaaaaagacaaagataagggcaggactctccagcggacctccacaagtaacgaatcgggggatcaactgaaaaggccttttggagcctttcgatctatcatggagacactaagtggcaaccaaaacaataataataactaccaggcagccaaccagctgaaaacctctacattgcccttgacctcacttgggaggaagacagatgccaagggaaaccctgccagctccgctagcaaaggaaagaataaggca

SEQ ID NO: 19929 - DNA, 3745 bp, Homo sapiens
  source 1..3745: mol_type = unassigned DNA
gcggccgcccaggctgcccccgcccgcgcgcgcccgttggggggcccggggagcggcgcccgcggccgggccgcattgtgacgtagcggggccgcggcagcgcctccaccgcccgcctacttcggctgaggctgttctgctcctgccgctgcggtccgtcggtcggtcagtcagtcccttcgcgctcctgagccgccggcgcgccgggcgccccgggaatttataagtatttgaccgtactcaaaatgtgcaaggaagaataatggaagcccctgaataccttgatttggatgaaattgactttagtgatgacatatcttattcagtcacatcactcaagacgatcccagaactgtgccgaagatgtgatacgcaaaacgaagacagatcagtttctagctctagctggaattgtggcatctcaactcttattacaaacacgcaaaagcccacaggaatcgctgatgtgtacagtaagttccgcccagtgaagcgggtttcgccactgaaacatcagccagagactctggagaacaatgaaagtgatgaccaaaagaaccagaaagtggttgagtaccagaaagggggtgagtctgacctgggcccccagcctcaggagcttggccctggagatggagtgggcggcccaccaggtaagagctctgagcccagcacatcgctgggtgaactggagcactacgacctcgacatggatgagattctggatgtgccttatattaaatccagtcagcagcttgcctcttttaccaaggtgacttcagaaaaaagaattttgggcttatgcacaaccatcaatggcctttctggcaaagcctgctctacaggaagttctgagagctcatcatccaacatggcaccattttgtgttctttctcccgtgaaaagccctcacttgagaaaagcatcagctgtcatccacgaccagcacaagctgtccactgaagaaaccgagatctcacctcctctggttaaatgtggctctgcatatgagcctgaaaaccagagtaaagacttcctaaacaagacatttagtgatcctcatggtcgaaaagttgagaagacaacaccagactgccagctcagggccttccacctacaatcctcagcagcagaatccaaaccagaagagcaggtcagtggcctaaaccggaccagctcccaaggcccagaagaaaggagtgagtatctgaaaaaagtgaaaagcatcttgaacattgttaaagaaggacagatctctctcctgccacacctagctgcagacaatctagacaaaattcacgacgaaaatggaaacaatctattacatattgcggcgtcacagggacacgcagagtgtctacagcacctcacttctttgatgggagaagactgcctcaatgagcgcaacactgagaagttgactccagcaggcctggccattaagaatggtcagttggagtgcgtacgctggatggtgagcgaaacagaagccattgcagaactgagttgttctaaggattttccaagccttattcattacgcaggttgctatggccaggaaaagattcttctgtggcttcttcagtttatgcaagaacagggcatctcgttggatgaagtagaccaggatggcaacagtgccgttcacgtagcctcacagcatggctaccttggatgcatacagaccttggttgaatatggagcaaatgtcaccatgcagaaccacgctggggaaaagccctcccagagcgccgagcggcaggggcacaccctgtgctccaggtacctggtggtggtggagacctgcatgtcgctggcctctcaagtggtgaagttaaccaagcagctaaaggaacaaacagtagaacgtgtcacgctgcagaaccaactccaacaatttctagaagcccagaaatcagagggcaagtcactcccttcttcacccagttcaccatcctcacctgcctccagaaagtcccagtggaaatctccagatgcagatgatgattctgtagccaaaagcaagccaggagtccaagaggggattcaggttcttggaagcctgtcagcctccagccgggctagacccaaagcaaaagatgaagattctgataaaatcttacgccagttattgggaaaggaaatctcagaaaatgtctgcacccaggaaaaactgtccttggaattccaggatgctcaggcttcctctagaaattctaaaaagatcccactggagaagagggaactgaagttagccaggctgagacagctgatgcagaggtcactgagtgagtctgacacagactccaacaactctgaggaccccaagactaccccagtgaggaaggctgaccgaccaaggccgcagcccattgtagaaagcgtagagagtatggacagcgcagaaagcctgcacctgatgattaagaaacacaccttggcatcagggggacgcaggtttcctttcagcatcaaggcctccaaatccctggatggccacagcccatctcccacctcagagagcagcgaaccagacttagaatcccagtatccaggctcagggagtattcctccaaaccagccctctggtgaccctcagcagcccagccctgacagtactgctgcccagaaagttgccacaagtcccaagagtgccctcaagtctccatcttccaagcgtaggacatctcagaacttaaaactgagagttacctttgaggagcctgtggtgcagatggagcagcctagccttgaactgaatggagaaaaagacaaagataagggcaggactctccagcggacctccacaagtaacgaatcgggggatcaactgaaaaggccttttggagcctttcgatctatcatggagacactaagtggcaaccaaaacaataataataactaccaggcagccaaccagctgaaaacctctacattgcccttgacctcacttgggaggaagacagatgccaagggaaaccctgccagctccgctagcaaaggaaagaataaggcagcataatgacatcaatagaaaaatgaagaaatcctacagcataaagcacattgctgagccagagtcaaaagaactcttcttgtaaatcactttttaaattttctctcactgatgccctttggaaattattggaaatttctggactatcctctttggaaagagaaccatgaaaacaatgcctcaccagcagaagaacagaatatcaggatgccttaaatttatagtagtagactgtaaaagattcattttggggtgatatctgtatatataacttgtttttttaaaagatgccgtttaaaagcatgattgggaaaatgtatgttttttaagagtagattgattcaccctacccacaggacattcaccaagccactgataccattttatatttcatcaattgcatgagtatttgctaatgttgattgaacctccctttccccataatgtgggcagatttggctcagctccttcatgagatcaggtcagtggtattgtttctgtcaagagtgttttttctgtcatttctactttttgtataaaggaaataaaacaatgttaacagccacctataagcttggggcacctactttctaacaaatctgtgatgttctgatttctaagggactttgcaagtattttgattgctgatatttgatttcaggaacaaactgctcagtttagcagttttcccataggcgtcaaataaaacattctatatttcattaagta

SEQ ID NO: 19930 - DNA, 2564 bp, Homo sapiens
  source 1..2564: mol_type = unassigned DNA
cgcccgcggccgggccgcattgtgacgtagcggggccgcggcagcgcctccaccgcccgcctacttcggctgaggctgttctgctcctgccgctgcggtccgtcggtcggtcagtcagtcccttcgcgctcctgagccgccggcgcgccgggcgccccgggaatttataagtatttgaccgtactcaaaatgtgcaaggaagaataatggaagcccctgaataccttgatttggatgaaattgactttagtgatgacatatcttattcagtcacatcactcaagacgatcccagaactgtgccgaagatgtgatacgcaaaacgaagacagatcagaatggtcagttggagtgcgtacgctggatggtgagcgaaacagaagccattgcagaactgagttgttctaaggattttccaagccttattcattacgcaggttgctatggccaggaaaagattcttctgtggcttcttcagtttatgcaagaacagggcatctcgttggatgaagtagaccaggatggcaacagtgccgttcacgtagcctcacagcatggctaccttggatgcatacagaccttggttgaatatggagcaaatgtcaccatgcagaaccacgctggggaaaagccctcccagagcgccgagcggcaggggcacaccctgtgctccaggtacctggtggtggtggagacctgcatgtcgctggcctctcaagtggtgaagttaaccaagcagctaaaggaacaaacagtagaacgtgtcacgctgcagaaccaactccaacaatttctagaagcccagaaatcagagggcaagtcactcccttcttcacccagttcaccatcctcacctgcctccagaaagtcccagtggaaatctccagatgcagatgatgattctgtagccaaaagcaagccaggagtccaagaggggattcaggttcttggaagcctgtcagcctccagccgggctagacccaaagcaaaagatgaagattctgataaaatcttacgccagttattgggaaaggaaatctcagaaaatgtctgcacccaggaaaaactgtccttggaattccaggatgctcaggcttcctctagaaattctaaaaagatcccactggagaagagggaactgaagttagccaggctgagacagctgatgcagaggtcactgagtgagtctgacacagactccaacaactctgaggaccccaagactaccccagtgaggaaggctgaccgaccaaggccgcagcccattgtagaaagcgtagagagtatggacagcgcagaaagcctgcacctgatgattaagaaacacaccttggcatcagggggacgcaggtttcctttcagcatcaaggcctccaaatccctggatggccacagcccatctcccacctcagagagcagcgaaccagacttagaatcccagtatccaggctcagggagtattcctccaaaccagccctctggtgaccctcagcagcccagccctgacagtactgctgcccagaaagttgccacaagtcccaagagtgccctcaagtctccatcttccaagcgtaggacatctcagaacttaaaactgagagttacctttgaggagcctgtggtgcagatggagcagcctagccttgaactgaatggagaaaaagacaaagataagggcaggactctccagcggacctccacaagtaacgaatcgggggatcaactgaaaaggccttttggagcctttcgatctatcatggagacactaagtggcaaccaaaacaataataataactaccaggcagccaaccagctgaaaacctctacattgcccttgacctcacttgggaggaagacagatgccaagggaaaccctgccagctccgctagcaaaggaaagaataaggcagaaatgtacagcagctgcatcaatctttcctctaacatgctgattgaagagcatctgtgtaacgacacacggcataatgacatcaatagaaaaatgaagaaatcctacagcataaagcacattgctgagccagagtcaaaagaactcttcttgtaaatcactttttaaattttctctcactgatgccctttggaaattattggaaatttctggactatcctctttggaaagagaaccatgaaaacaatgcctcaccagcagaagaacagaatatcaggatgccttaaatttatagtagtagactgtaaaagattcattttggggtgatatctgtatatataacttgtttttttaaaagatgccgtttaaaagcatgattgggaaaatgtatgttttttaagagtagattgattcaccctacccacaggacattcaccaagccactgataccattttatatttcatcaattgcatgagtatttgctaatgttgattgaacctccctttccccataatgtgggcagatttggctcagctccttcatgagatcaggtcagtggtattgtttctgtcaagagtgttttttctgtcatttctactttttgtataaaggaaataaaacaatgttaacagccacctataagcttggggcacct

SEQ ID NO: 19931 - DNA, 468 bp, Homo sapiens
  source 1..468: mol_type = unassigned DNA
gcctacttcggctgaggctgttctgctcctgccgctgcggtccgtcggtcggtcagtcagtcccttcgcgctcctgagccgccggcgcgccgggcgccccggagacagggtttcaccatgttgcccaggctggtctcgaactcctggactcaagcagtctgtccatctcagcctcccaaagtgctgggattacaggtgtgagccaccacactggccaaggaatttataagtatttgaccgtactcaaaatgtgcaaggaagaataatggaagcccctgaataccttgatttggatgaaattgactttagtgatgacatatctgacaataggagtcaagggaacaggctacaaaagcttggattggaggacacagacagggaagatgcaatgggctttggttcccatagggccaaactgacagtagttgctgccctgggagcttgccattgtcctgagaatgagtattc

SEQ ID NO: 19932 - DNA, 4986 bp, Homo sapiens
  source 1..4986: mol_type = unassigned DNA
gctcctgccgctgcggtccgtcggtcggtcagtcagtcccttcgcgctcctgagccgccggcgcgccgggcgccccggaaaagagtgcctgagagtgccagaggcttggtggaagggcagacgagagaagaggaggcattgtattggccactgggacaactgcagactcactcttacctgtaaagaagcagttaatgttggggaatgtagtcaggattggaaaaccacggggatttctgcacattataattgagaatgtaaatattcttaaagtggcaccctgaaagagacaagcattgaaaccagacaaaataaattggatcatgaacagaatgagacatcttaaaggagatagcatgtggaggcctgctgggaagtagaggcaaattccagatgcctaggagccttagtctaaggtggggccatccaacccacagaaataaatatgggcagtggcccaagacttcctataatgagctgcacctgttgtaagtcttgtgttcttgcctatagaataaagaacctcactaccatcctgcaagtgcaaattgaaagattcctgttgtgatgccatgagttattatccgctggttatattctattggaatggctacactcaactggatattgctgtctatattgttggagcacctcaaacaggggtgcaatggttatttgttaatttacttaattaagacatgttcatccacattttatagtttcatttatttaaagatccatttggtccccagcttcgatgcatgtttctctgcttcatctccccatatttccatgttcctgctgatgtttataccatatcctggcacccagcatcatctgtgtgttgttcaccaaggccgtgggaacagagtctgtaaatcaatagttcatcacggagtacagatttcatgaaaagaaattggattggaagaaagtctcctagtgaacacgctagtatccaaagagtctggattgtatcagaatccatcacagtaggagagaatgttgttttgagtaatttccaagcagagtacatatattttcctctgaaaatctttgtaaattgaagaaaagtgacatttttataccaagcaatttgtttgataacctattttcagatttctacaaataataaaatttctgattttaaatattttttacaaatacaagttggttttcttttcattgtaagccttactgtgatttcagaagaatttttaacatttgctaaatggataatctcatttaaacatggaagtaacatcctaatcctttcttggatggactctgtatctattgtaattaagactttaaaaatggtatatacatatgggaaaaaaaggagaggaaacaggaaaattaaatcaagtgatgggtttgaggaatttataagtatttgaccgtactcaaaatgtgcaaggaagaataatggaagcccctgaataccttgatttggatgaaattgactttagtgatgacatatctgacaataggagtcaagggaacaggctacaaaagcttggattggaggacacagacagggaagatgcaatgggctttggttcccatagggccaaactgacagtagttgctgccctgggagcttgccattgtcctgagaatgagtattcagtcacatcactcaagacgatcccagaactgtgccgaagatgtgatacgcaaaacgaagacagatcagtttctagctctagctggaattgtggcatctcaactcttattacaaacacgcaaaagcccacaggaatcgctgatgtgtacagtaagttccgcccagtgaagcgggtttcgccactgaaacatcagccagagactctggagaacaatgaaagtgatgaccaaaagaaccagaaagtggttgagtaccagaaagggggtgagtctgacctgggcccccagcctcaggagcttggccctggagatggagtgggcggcccaccaggtaagagctctgagcccagcacatcgctgggtgaactggagcactacgacctcgacatggatgagattctggatgtgccttatattaaatccagtcagcagcttgcctcttttaccaaggtgacttcagaaaaaagaattttgggcttatgcacaaccatcaatggcctttctggcaaagcctgctctacaggaagttctgagagctcatcatccaacatggcaccattttgtgttctttctcccgtgaaaagccctcacttgagaaaagcatcagctgtcatccacgaccagcacaagctgtccactgaagaaaccgagatctcacctcctctggttaaatgtggctctgcatatgagcctgaaaaccagagtaaagacttcctaaacaagacatttagtgatcctcatggtcgaaaagttgagaagacaacaccagactgccagctcagggccttccacctacaatcctcagcagcagaatccaaaccagaagagcaggtcagtggcctaaaccggaccagctcccaaggcccagaagaaaggagtgagtatctgaaaaaagtgaaaagcatcttgaacattgttaaagaaggacagatctctctcctgccacacctagctgcagacaatctagacaaaattcacgacgaaaatggaaacaatctattacatattgcggcgtcacagggacacgcagagtgtctacagcacctcacttctttgatgggagaagactgcctcaatgagcgcaacactgagaagttgactccagcaggcctggccattaagaatggtcagttggagtgcgtacgctggatggtgagcgaaacagaagccattgcagaactgagttgttctaaggattttccaagccttattcattacgcaggttgctatggccaggaaaagattcttctgtggcttcttcagtttatgcaagaacagggcatctcgttggatgaagtagaccaggatggcaacagtgccgttcacgtagcctcacagcatggctaccttggatgcatacagaccttggttgaatatggagcaaatgtcaccatgcagaaccacgctggggaaaagccctcccagagcgccgagcggcaggggcacaccctgtgctccaggtacctggtggtggtggagacctgcatgtcgctggcctctcaagtggtgaagttaaccaagcagctaaaggaacaaacagtagaacgtgtcacgctgcagaaccaactccaacaatttctagaagcccagaaatcagagggcaagtcactcccttcttcacccagttcaccatcctcacctgcctccagaaagtcccagtggaaatctccagatgcagatgatgattctgtagccaaaagcaagccaggagtccaagaggggattcaggttcttggaagcctgtcagcctccagccgggctagacccaaagcaaaagatgaagattctgataaaatcttacgccagttattgggaaaggaaatctcagaaaatgtctgcacccaggaaaaactgtccttggaattccaggatgctcaggcttcctctagaaattctaaaaagatcccactggagaagagggaactgaagttagccaggctgagacagctgatgcagaggtcactgagtgagtctgacacagactccaacaactctgaggaccccaagactaccccagtgaggaaggctgaccgaccaaggccgcagcccattgtagaaagcgtagagagtatggacagcgcagaaagcctgcacctgatgattaagaaacacaccttggcatcagggggacgcaggtttcctttcagcatcaaggcctccaaatccctggatggccacagcccatctcccacctcagagagcagcgaaccagacttagaatcccagtatccaggctcagggagtattcctccaaaccagccctctggtgaccctcagcagcccagccctgacagtactgctgcccagaaagttgccacaagtcccaagagtgccctcaagtctccatcttccaagcgtaggacatctcagaacttaaaactgagagttacctttgaggagcctgtggtgcagatggagcagcctagccttgaactgaatggagaaaaagacaaagataagggcaggactctccagcggacctccacaagtaacgaatcgggggatcaactgaaaaggccttttggagcctttcgatctatcatggagacactaagtggcaaccaaaacaataataataactaccaggcagccaaccagctgaaaacctctacattgcccttgacctcacttgggaggaagacagatgccaagggaaaccctgccagctccgctagcaaaggaaagaataaggcagaaatgtacagcagctgcatcaatctttcctctaacatgctgattgaagagcatctgtgtaacgacacacggcataatgacatcaatagaaaaatgaagaaatcctacagcataaagcacattgctgagccagagtcaaaagaactcttcttgtaaatcactttttaaattttctctcactgatgccctttggaaattattggaaatttctggactatcctctttggaaagagaaccatgaaaacaatgcctcaccagcagaagaacagaatatcaggatgccttaaatttatagtagtagactgtaaaagattcattttggggtgatatctgtatatataacttgtttttttaaaagatgccgtttaaaagcatgattgggaaaatgtatgttttttaagagtagattgattcaccctacccacaggacattcaccaagccactgataccattttatatttcatcaattgcatgagtatttgctaatgttgattgaacctccctttccccataatgtgggcagatttggctcagctccttcatgagatcaggtcagtggtattgtttctgtcaagagtgttttttctgtcatttctactttttgtataaaggaaataaaacaatgttaacagccacctataagcttggggcacctactttct

SEQ ID NO: 19933 - DNA, 2039 bp, Homo sapiens
  source 1..2039: mol_type = unassigned DNA
agtcagtcccttcgcgctcctgagccgccggcgcgccgggcgccccgggaatttataagtatttgaccgtactcaaaatgtgcaaggaagaataatggaagcccctgaataccttgatttggatgaaattgactttagtgatgacatatcttattcagtcacatcactcaagacgatcccagaactgtgccgaagatgtgatacgcaaaacgaagacagatcagtttctagctctagctggaattgtggcatctcaactcttattacaaacacgcaaaagcccacaggaatcgctgatgtgtacagtaagttccgcccagtgaagcgggtttcgccactgaaacatcagccagagactctggagaacaatgaaagtgatgaccaaaagaaccagaaagtggttgagtaccagaaagggggtgagtctgacctgggcccccagcctcaggagcttggccctggagatggagtgggcggcccaccaggtaagagctctgagcccagcacatcgctgggtgaactggagcactacgacctcgacatggatgagattctggatgtgccttatattaaatccagtcagcagcttgcctcttttaccaaggtgacttcagaaaaaagaattttgggcttatgcacaaccatcaatggcctttctggcaaagcctgctctacaggaagttctgagagctcatcatccaacatggcaccattttgtgttctttctcccgtgaaaagccctcacttgagaaaagcatcagctgtcatccacgaccagcacaagctgtccactgaagaaaccgagatctcacctcctctggttaaatgtggctctgcatatgagcctgaaaaccagagtaaagacttcctaaacaagacatttagtgatcctcatggtcgaaaagttgagaagacaacaccagactgccagctcagggccttccacctacaatcctcagcagcagaatccaaaccagaagagcaggtcagtggcctaaaccggaccagctcccaaggcccagaagaaaggagtgagtatctgaaaaaagtgaaaagcatcttgaacattgttaaagaaggacagatctctctcctgccacacctagctgcagacaatctagacaaaattcacgacgaaaatggaaacaatctattacatattgcggcgtcacagggacacgcagagtgtctacagcacctcacttctttgatgggagaagactgcctcaatgagcgcaacactgagaagttgactccagcaggcctggccattaagaatggtcagttggagtgcgtacgctggatggtgagcgaaacagaagccattgcagaactgagttgttctaaggattttccaagccttattcattacgcaggttgctatggccaggaaaagattcttctgtggcttcttcagtttatgcaagaacagggcatctcgttggatgaagtagaccaggatggcaacagtgccgttcacgtagcctcacagcatggctaccttggatgcatacaggtacacaggccctgctgttttgcaatgagaaatgagtatatcaaatattaaacaaaacattaaaattatgttcactaggagaatgtctgaattaattcaccttttgtatggtcgtagacaataaggaattattgctctatttgtgtttccagaaatccacacaaatgtaggtaggcataaatatccataagagtttctctttcagtgtcccagggtgttgaaagggacttttcctgctcccttatcactgctctaaagccccagtgctgaggacaatagacattaaatttccccatgttctcaaggcaccagagaaaccactaccaggcagacatctgtctctcaagtggcaggctgctcttcccctaactagtaaatttcatcctccaggtatatgaagaataagatagatttttcaggaatggattagaattctttgtgtagggagttgtaggctagagagagaatgctgtagttccccctttctctgtagtaggactgagcttctcaaatgcattcaaaa

SEQ ID NO: 19934 - DNA, 1972 bp, Homo sapiens
  source 1..1972: mol_type = unassigned DNA
agtcagtcccttcgcgctcctgagccgccggcgcgccgggcgccccgggaatttataagtatttgaccgtactcaaaatgtgcaaggaagaataatggaagcccctgaataccttgatttggatgaaattgactttagtgatgacatatcttattcagtcacatcactcaagacgatcccagaactgtgccgaagatgtgatacgcaaaacgaagacagatcaggaaaagattcttctgtggcttcttcagtttatgcaagaacagggcatctcgttggatgaagtagaccaggatggcaacagtgccgttcacgtagcctcacagcatggctaccttggatgcatacagaccttggttgaatatggagcaaatgtcaccatgcagaaccacgctggggaaaagccctcccagagcgccgagcggcaggggcacaccctgtgctccaggtacctggtggtggtggagacctgcatgtcgctggcctctcaagtggtgaagttaaccaagcagctaaaggaacaaacagtagaacgtgtcacgctgcagaaccaactccaacaatttctagaagcccagaaatcagagggcaagtcactcccttcttcacccagttcaccatcctcacctgcctccagaaagtcccagtggaaatctccagatgcagatgatgattctgtagccaaaagcaagccaggagtccaagaggggattcaggttcttggaagcctgtcagcctccagccgggctagacccaaagcaaaagatgaagattctgataaaatcttacgccagttattgggaaaggaaatctcagaaaatgtctgcacccaggaaaaactgtccttggaattccaggatgctcaggcttcctctagaaattctaaaaagatcccactggagaagagggaactgaagttagccaggctgagacagctgatgcagaggtcactgagtgagtctgacacagactccaacaactctgaggaccccaagactaccccagtgaggaaggctgaccgaccaaggccgcagcccattgtagaaagcgtagagagtatggacagcgcagaaagcctgcacctgatgattaagaaacacaccttggcatcagggggacgcaggtttcctttcagcatcaaggcctccaaatccctggatggccacagcccatctcccacctcagagagcagcgaaccagacttagaatcccagtatccaggctcagggagtattcctccaaaccagccctctggtgaccctcagcagcccagccctgacagtactgctgcccagaaagttgccacaagtcccaagagtgccctcaagtctccatcttccaagcgtaggacatctcagaacttaaaactgagagttacctttgaggagcctgtggtgcagatggagcagcctagccttgaactgaatggagaaaaagacaaagataagggcaggactctccagcggacctccacaagtaacgaatcgggggatcaactgaaaaggccttttggagcctttcgatctatcatggagacactaagtggcaaccaaaacaataataataactaccaggcagccaaccagctgaaaacctctacattgcccttgacctcacttgggaggaagacagatgccaagggaaaccctgccagctccgctagcaaaggaaagaataaggcagcataatgacatcaatagaaaaatgaagaaatcctacagcataaagcacattgctgagccagagtcaaaagaactcttcttgtaaatcactttttaaattttctctcactgatgccctttggaaattattggaaatttctggactatcctctttggaaagagaaccatgaaaacaatgcctcaccagcagaagaacagaatatcaggatgccttaaatttatagtagtagactgtaaaagattcattttggggtgatatctgtatatataacttgtttttttaaaagatg

SEQ ID NO: 19935 - DNA, 2410 bp, Homo sapiens
  source 1..2410: mol_type = unassigned DNA
cgcgctcctgagccgccggcgcgccgggcgccccgggaatttataagtatttgaccgtactcaaaatgtgcaaggaagaataatggaagcccctgaataccttgatttggatgaaattgactttagtgatgacatatcttattcagtcacatcactcaagacgatcccagaactgtgccgaagatgtgatacgcaaaacgaagacagatcagaatggtcagttggagtgcgtacgctggatggtgagcgaaacagaagccattgcagaactgagttgttctaaggattttccaagccttattcattacgcaggttgctatggccaggaaaagattcttctgtggcttcttcagtttatgcaagaacagggcatctcgttggatgaagtagaccaggatggcaacagtgccgttcacgtagcctcacagcatggctaccttggatgcatacagaccttggttgaatatggagcaaatgtcaccatgcagaaccacgctggggaaaagccctcccagagcgccgagcggcaggggcacaccctgtgctccaggtacctggtggtggtggagacctgcatgtcgctggcctctcaagtggtgaagttaaccaagcagctaaaggaacaaacagtagaacgtgtcacgctgcagaaccaactccaacaatttctagaagcccagaaatcagagggcaagtcactcccttcttcacccagttcaccatcctcacctgcctccagaaagtcccagtggaaatctccagatgcagatgatgattctgtagccaaaagcaagccaggagtccaagaggggattcaggttcttggaagcctgtcagcctccagccgggctagacccaaagcaaaagatgaagattctgataaaatcttacgccagttattgggaaaggaaatctcagaaaatgtctgcacccaggaaaaactgtccttggaattccaggatgctcaggcttcctctagaaattctaaaaagatcccactggagaagagggaactgaagttagccaggctgagacagctgatgcagaggtcactgagtgagtctgacacagactccaacaactctgaggaccccaagactaccccagtgaggaaggctgaccgaccaaggccgcagcccattgtagaaagcgtagagagtatggacagcgcagaaagcctgcacctgatgattaagaaacacaccttggcatcagggggacgcaggtttcctttcagcatcaaggcctccaaatccctggatggccacagcccatctcccacctcagagagcagcgaaccagacttagaatcccagtatccaggctcagggagtattcctccaaaccagccctctggtgaccctcagcagcccagccctgacagtactgctgcccagaaagttgccacaagtcccaagagtgccctcaagtctccatcttccaagcgtaggacatctcagaacttaaaactgagagttacctttgaggagcctgtggtgcagatggagcagcctagccttgaactgaatggagaaaaagacaaagataagggcaggactctccagcggacctccacaagtaacgaatcgggggatcaactgaaaaggccttttggagcctttcgatctatcatggagacactaagtggcaaccaaaacaataataataactaccaggcagccaaccagctgaaaacctctacattgcccttgacctcacttgggaggaagacagatgccaagggaaaccctgccagctccgctagcaaaggaaagaataaggcagcataatgacatcaatagaaaaatgaagaaatcctacagcataaagcacattgctgagccagagtcaaaagaactcttcttgtaaatcactttttaaattttctctcactgatgccctttggaaattattggaaatttctggactatcctctttggaaagagaaccatgaaaacaatgcctcaccagcagaagaacagaatatcaggatgccttaaatttatagtagtagactgtaaaagattcattttggggtgatatctgtatatataacttgtttttttaaaagatgccgtttaaaagcatgattgggaaaatgtatgttttttaagagtagattgattcaccctacccacaggacattcaccaagccactgataccattttatatttcatcaattgcatgagtatttgctaatgttgattgaacctccctttccccataatgtgggcagatttggctcagctccttcatgagatcaggtcagtggtattgtttctgtcaagagtgttttttctgtcatttctactttttgtataaaggaaataaaacaatgttaacagccacctataagcttggggcacctactttctaacaaatctgtgatgttctgatttctaagggact

SEQ ID NO: 19936 - DNA, 559 bp, Homo sapiens
  source 1..559: mol_type = unassigned DNA
attgttcttttcatttgcccgcctcatgtggttcttattcttgctgtcacccgggatcttatcgcaggcagggatgggcagttccgcggctcggaaaagctgagataaggaggggcgaagtaatagtaatagcgacagtactaacaacggtaataatagctgtagaaaagggacgtctggtgttgctgccgcccctcgctcatcagcaccagctccccgactgccctgtccagcccgggctccgccagcctccctctagtgctgttctgcgtcccaggctggtccgcgtggatttcagaggggaatgtttctctcttggccttgtctcttggcgatgactttcatctgcaggtgagacagggtttcaccatgttgcccaggctggtctcgaactcctggactcaagcagtctgtccatctcagcctcccaaagtgctgggattacaggtgtgagccaccacactggccaaggaatttataagtatttgaccgtactcaaaatgtgcaaggaagaataatggaagcccctgaataccttgatttggatgaaattgacttt

SEQ ID NO: 19937 - DNA, 1849 bp, Homo sapiens
  source 1..1849: mol_type = unassigned DNA
atggaagcccctgaataccttgatttggatgaaattgactttagtgatgacatatctgacaataggagtcaagggaacaggctacaaaagcttggattggaggacacagacagggaagatgcaatgggctttggttcccatagggccaaactgacagtagttgctgccctgggagcttgccattgtcctgagaatgagtattcagtcacatcactcaagacgatcccagaactgtgccgaagatgtgatacgcaaaacgaagacagatcagaatggtcagttggagtgcgtacgctggatggtgagcgaaacagaagccattgcagaactgagttgttctaaggattttccaagccttattcattacgcaggttgctatggccaggaaaagattcttctgtggcttcttcagtttatgcaagaacagggcatctcgttggatgaagtagaccaggatggcaacagtgccgttcacgtagcctcacagcatggctaccttggatgcatacagaccttggttgaatatggagcaaatgtcaccatgcagaaccacgctggggaaaagccctcccagagcgccgagcggcaggggcacaccctgtgctccaggtacctggtggtggtggagacctgcatgtcgctggcctctcaagtggtgaagttaaccaagcagctaaaggaacaaacagtagaacgtgtcacgctgcagaaccaactccaacaatttctagaagcccagaaatcagagggcaagtcactcccttcttcacccagttcaccatcctcacctgcctccagaaagtcccagtggaaatctccagatgcagatgatgattctgtagccaaaagcaagccaggagtccaagaggggattcaggttcttggaagcctgtcagcctccagccgggctagacccaaagcaaaagatgaagattctgataaaatcttacgccagttattgggaaaggaaatctcagaaaatgtctgcacccaggaaaaactgtccttggaattccaggatgctcaggcttcctctagaaattctaaaaagatcccactggagaagagggaactgaagttagccaggctgagacagctgatgcagaggtcactgagtgagtctgacacagactccaacaactctgaggaccccaagactaccccagtgaggaaggctgaccgaccaaggccgcagcccattgtagaaagcgtagagagtatggacagcgcagaaagcctgcacctgatgattaagaaacacaccttggcatcagggggacgcaggtttcctttcagcatcaaggcctccaaatccctggatggccacagcccatctcccacctcagagagcagcgaaccagacttagaatcccagtatccaggctcagggagtattcctccaaaccagccctctggtgaccctcagcagcccagccctgacagtactgctgcccagaaagttgccacaagtcccaagagtgccctcaagtctccatcttccaagcgtaggacatctcagaacttaaaactgagagttacctttgaggagcctgtggtgcagatggagcagcctagccttgaactgaatggagaaaaagacaaagataagggcaggactctccagcggacctccacaagtaacgaatcgggggatcaactgaaaaggccttttggagcctttcgatctatcatggagacactaagtggcaaccaaaacaataataataactaccaggcagccaaccagctgaaaacctctacattgcccttgacctcacttgggaggaagacagatgccaagggaaaccctgccagctccgctagcaaaggaaagaataaggcagcataa

SEQ ID NO: 19938 - DNA, 3126 bp, Homo sapiens
  source 1..3126: mol_type = unassigned DNA
atggaagcccctgaataccttgatttggatgaaattgactttagtgatgacatatctgacaataggagtcaagggaacaggctacaaaagcttggattggaggacacagacagggaagatgcaatgggctttggttcccatagggccaaactgacagtagttgctgccctgggagcttgccattgtcctgagaatgagtattcagtcacatcactcaagacgatcccagaactgtgccgaagatgtgatacgcaaaacgaagacagatcagtttctagctctagctggaattgtggcatctcaactcttattacaaacacgcaaaagcccacaggaatcgctgatgtgtacagtaagttccgcccagtgaagcgggtttcgccactgaaacatcagccagagactctggagaacaatgaaagtgatgaccaaaagaaccagaaagtggttgagtaccagaaagggggtgagtctgacctgggcccccagcctcaggagcttggccctggagatggagtgggcggcccaccaggtaagagctctgagcccagcacatcgctgggtgaactggagcactacgacctcgacatggatgagattctggatgtgccttatattaaatccagtcagcagcttgcctcttttaccaaggtgacttcagaaaaaagaattttgggcttatgcacaaccatcaatggcctttctggcaaagcctgctctacaggaagttctgagagctcatcatccaacatggcaccattttgtgttctttctcccgtgaaaagccctcacttgagaaaagcatcagctgtcatccacgaccagcacaagctgtccactgaagaaaccgagatctcacctcctctggttaaatgtggctctgcatatgagcctgaaaaccagagtaaagacttcctaaacaagacatttagtgatcctcatggtcgaaaagttgagaagacaacaccagactgccagctcagggccttccacctacaatcctcagcagcagaatccaaaccagaagagcaggtcagtggcctaaaccggaccagctcccaaggcccagaagaaaggagtgagtatctgaaaaaagtgaaaagcatcttgaacattgttaaagaaggacagatctctctcctgccacacctagctgcagacaatctagacaaaattcacgacgaaaatggaaacaatctattacatattgcggcgtcacagggacacgcagagtgtctacagcacctcacttctttgatgggagaagactgcctcaatgagcgcaacactgagaagttgactccagcaggcctggccattaagaatggtcagttggagtgcgtacgctggatggtgagcgaaacagaagccattgcagaactgagttgttctaaggattttccaagccttattcattacgcaggttgctatggccaggaaaagattcttctgtggcttcttcagtttatgcaagaacagggcatctcgttggatgaagtagaccaggatggcaacagtgccgttcacgtagcctcacagcatggctaccttggatgcatacagactagactcaagattcaagggacttggaatgggagtgagacatgcctttttacacaccactttagctcctatccccctatctcttctgggctgcagtgtcaaggacaagaaggagttctttttattcctgatcaggttggcgcagcaacaaataaacaggtgttatttcaaaaccaattaccagagaccaaatccagttactagagcccaagcaaatgagaacagaccttggttgaatatggagcaaatgtcaccatgcagaaccacgctggggaaaagccctcccagagcgccgagcggcaggggcacaccctgtgctccaggtacctggtggtggtggagacctgcatgtcgctggcctctcaagtggtgaagttaaccaagcagctaaaggaacaaacagtagaacgtgtcacgctgcagaaccaactccaacaatttctagaagcccagaaatcagagggcaagtcactcccttcttcacccagttcaccatcctcacctgcctccagaaagtcccagtggaaatctccagatgcagatgatgattctgtagccaaaagcaagccaggagtccaagaggggattcaggttcttggaagcctgtcagcctccagccgggctagacccaaagcaaaagatgaagattctgataaaatcttacgccagttattgggaaaggaaatctcagaaaatgtctgcacccaggaaaaactgtccttggaattccaggatgctcaggcttcctctagaaattctaaaaagatcccactggagaagagggaactgaagttagccaggctgagacagctgatgcagaggtcactgagtgagtctgacacagactccaacaactctgaggaccccaagactaccccagtgaggaaggctgaccgaccaaggccgcagcccattgtagaaagcgtagagagtatggacagcgcagaaagcctgcacctgatgattaagaaacacaccttggcatcagggggacgcaggtttcctttcagcatcaaggcctccaaatccctggatggccacagcccatctcccacctcagagagcagcgaaccagacttagaatcccagtatccaggctcagggagtattcctccaaaccagccctctggtgaccctcagcagcccagccctgacagtactgctgcccagaaagttgccacaagtcccaagagtgccctcaagtctccatcttccaagcgtaggacatctcagaacttaaaactgagagttacctttgaggagcctgtggtgcagatggagcagcctagccttgaactgaatggagaaaaagacaaagataagggcaggactctccagcggacctccacaagtaacgaatcgggggatcaactgaaaaggccttttggagcctttcgatctatcatggagacactaagtggcaaccaaaacaataataataactaccaggcagccaaccagctgaaaacctctacattgcccttgacctcacttgggaggaagacagatgccaagggaaaccctgccagctccgctagcaaaggaaagaataaggcagcataa

SEQ ID NO: 19939 - DNA, 1888 bp, Homo sapiens
  source 1..1888: mol_type = unassigned DNA
atggaagcccctgaataccttgatttggatgaaattgactttagtgatgacatatcttattcagtcacatcactcaagacgatcccagaactgtgccgaagatgtgatacgcaaaacgaagacagatcagccacacctagctgcagacaatctagacaaaattcacgacgaaaatggaaacaatctattacatattgcggcgtcacagggacacgcagagtgtctacagcacctcacttctttgatgggagaagactgcctcaatgagcgcaacactgagaagttgactccagcaggcctggccattaagaatggtcagttggagtgcgtacgctggatggtgagcgaaacagaagccattgcagaactgagttgttctaaggattttccaagccttattcattacgcaggttgctatggccaggaaaagattcttctgtggcttcttcagtttatgcaagaacagggcatctcgttggatgaagtagaccaggatggcaacagtgccgttcacgtagcctcacagcatggctaccttggatgcatacagaccttggttgaatatggagcaaatgtcaccatgcagaaccacgctggggaaaagccctcccagagcgccgagcggcaggggcacaccctgtgctccaggtacctggtggtggtggagacctgcatgtcgctggcctctcaagtggtgaagttaaccaagcagctaaaggaacaaacagtagaacgtgtcacgctgcagaaccaactccaacaatttctagaagcccagaaatcagagggcaagtcactcccttcttcacccagttcaccatcctcacctgcctccagaaagtcccagtggaaatctccagatgcagatgatgattctgtagccaaaagcaagccaggagtccaagaggggattcaggttcttggaagcctgtcagcctccagccgggctagacccaaagcaaaagatgaagattctgataaaatcttacgccagttattgggaaaggaaatctcagaaaatgtctgcacccaggaaaaactgtccttggaattccaggatgctcaggcttcctctagaaattctaaaaagatcccactggagaagagggaactgaagttagccaggctgagacagctgatgcagaggtcactgagtgagtctgacacagactccaacaactctgaggaccccaagactaccccagtgaggaaggctgaccgaccaaggccgcagcccattgtagaaagcgtagagagtatggacagcgcagaaagcctgcacctgatgattaagaaacacaccttggcatcagggggacgcaggtttcctttcagcatcaaggcctccaaatccctggatggccacagcccatctcccacctcagagagcagcgaaccagacttagaatcccagtatccaggctcagggagtattcctccaaaccagccctctggtgaccctcagcagcccagccctgacagtactgctgcccagaaagttgccacaagtcccaagagtgccctcaagtctccatcttccaagcgtaggacatctcagaacttaaaactgagagttacctttgaggagcctgtggtgcagatggagcagcctagccttgaactgaatggagaaaaagacaaagataagggcaggactctccagcggacctccacaagtaacgaatcgggggatcaactgaaaaggccttttggagcctttcgatctatcatggagacactaagtggcaaccaaaacaataataataactaccaggcagccaaccagctgaaaacctctacattgcccttgacctcacttgggaggaagacagatgccaagggaaaccctgccagctccgctagcaaaggaaagaataaggcagcataa

SEQ ID NO: 19940 - DNA, 1708 bp, Homo sapiens
  source 1..1708: mol_type = unassigned DNA
atggaagcccctgaataccttgatttggatgaaattgactttagtgatgacatatcttattcagtcacatcactcaagacgatcccagaactgtgccgaagatgtgatacgcaaaacgaagacagatcagaatggtcagttggagtgcgtacgctggatggtgagcgaaacagaagccattgcagaactgagttgttctaaggattttccaagccttattcattacgcaggttgctatggccaggaaaagattcttctgtggcttcttcagtttatgcaagaacagggcatctcgttggatgaagtagaccaggatggcaacagtgccgttcacgtagcctcacagcatggctaccttggatgcatacagaccttggttgaatatggagcaaatgtcaccatgcagaaccacgctggggaaaagccctcccagagcgccgagcggcaggggcacaccctgtgctccaggtacctggtggtggtggagacctgcatgtcgctggcctctcaagtggtgaagttaaccaagcagctaaaggaacaaacagtagaacgtgtcacgctgcagaaccaactccaacaatttctagaagcccagaaatcagagggcaagtcactcccttcttcacccagttcaccatcctcacctgcctccagaaagtcccagtggaaatctccagatgcagatgatgattctgtagccaaaagcaagccaggagtccaagaggggattcaggttcttggaagcctgtcagcctccagccgggctagacccaaagcaaaagatgaagattctgataaaatcttacgccagttattgggaaaggaaatctcagaaaatgtctgcacccaggaaaaactgtccttggaattccaggatgctcaggcttcctctagaaattctaaaaagatcccactggagaagagggaactgaagttagccaggctgagacagctgatgcagaggtcactgagtgagtctgacacagactccaacaactctgaggaccccaagactaccccagtgaggaaggctgaccgaccaaggccgcagcccattgtagaaagcgtagagagtatggacagcgcagaaagcctgcacctgatgattaagaaacacaccttggcatcagggggacgcaggtttcctttcagcatcaaggcctccaaatccctggatggccacagcccatctcccacctcagagagcagcgaaccagacttagaatcccagtatccaggctcagggagtattcctccaaaccagccctctggtgaccctcagcagcccagccctgacagtactgctgcccagaaagttgccacaagtcccaagagtgccctcaagtctccatcttccaagcgtaggacatctcagaacttaaaactgagagttacctttgaggagcctgtggtgcagatggagcagcctagccttgaactgaatggagaaaaagacaaagataagggcaggactctccagcggacctccacaagtaacgaatcgggggatcaactgaaaaggccttttggagcctttcgatctatcatggagacactaagtggcaaccaaaacaataataataactaccaggcagccaaccagctgaaaacctctacattgcccttgacctcacttgggaggaagacagatgccaagggaaaccctgccagctccgctagcaaaggaaagaataaggcagcataa

SEQ ID NO: 19941 - DNA, 2303 bp, Homo sapiens
  source 1..2303: mol_type = unassigned DNA
gaccaaatccagttactagagcccaagcaaatgagaacaggtaagattccagtctccccctcttacaggcatctctgactatgagtgattctcttggagcccaaccatgacaagagacagaactccccaccacaaagactgcactgcatatctcataaaggagagcacactatggacagcctcctcctctccttcccagccccctccttatgtgggctgcagatgagcattgatagtagtaggactggctctgctacatcatcatagactctgaagggaggtgtgtgatattgactgctgaaaggtccctagaggctctcttcatactattcaacattctgttacagtcattaaaaaataatgtgtacagagatgtcctgatacacatgtccttcattttctgacagaccttggttgaatatggagcaaatgtcaccatgcagaaccacgctggggaaaagccctcccagagcgccgagcggcaggggcacaccctgtgctccaggtacctggtggtggtggagacctgcatgtcgctggcctctcaagtggtgaagttaaccaagcagctaaaggaacaaacagtagaacgtgtcacgctgcagaaccaactccaacaatttctagaagcccagaaatcagagggcaagtcactcccttcttcacccagttcaccatcctcacctgcctccagaaagtcccagtggaaatctccagatgcagatgatgattctgtagccaaaagcaagccaggagtccaagaggggattcaggttcttggaagcctgtcagcctccagccgggctagacccaaagcaaaagatgaagattctgataaaatcttacgccagttattgggaaaggaaatctcagaaaatgtctgcacccaggaaaaactgtccttggaattccaggatgctcaggcttcctctagaaattctaaaaagatcccactggagaagagggaactgaagttagccaggctgagacagctgatgcagaggtcactgagtgagtctgacacagactccaacaactctgaggaccccaagactaccccagtgaggaaggctgaccgaccaaggccgcagcccattgtagaaagcgtagagagtatggacagcgcagaaagcctgcacctgatgattaagaaacacaccttggcatcagggggacgcaggtttcctttcagcatcaaggcctccaaatccctggatggccacagcccatctcccacctcagagagcagcgaaccagacttagaatcccagtatccaggctcagggagtattcctccaaaccagccctctggtgaccctcagcagcccagccctgacagtactgctgcccagaaagttgccacaagtcccaagagtgccctcaagtctccatcttccaagcgtaggacatctcagaacttaaaactgagagttacctttgaggagcctgtggtgcagatggagcagcctagccttgaactgaatggagaaaaagacaaagataagggcaggactctccagcggacctccacaagtaacgaatcgggggatcaactgaaaaggccttttggagcctttcgatctatcatggagacactaagtggcaaccaaaacaataataataactaccaggcagccaaccagctgaaaacctctacattgcccttgacctcacttgggaggaagacagatgccaagggaaaccctgccagctccgctagcaaaggaaagaataaggcagcataatgacatcaatagaaaaatgaagaaatcctacagcataaagcacattgctgagccagagtcaaaagaactcttcttgtaaatcactttttaaattttctctcactgatgccctttggaaattattggaaatttctggactatcctctttggaaagagaaccatgaaaacaatgcctcaccagcagaagaacagaatatcaggatgccttaaatttatagtagtagactgtaaaagattcattttggggtgatatctgtatatataacttgtttttttaaaagatgccgtttaaaagcatgattgggaaaatgtatgttttttaagagtagattgattcaccctacccacaggacattcaccaagccactgataccattttatatttcatcaattgcatgagtatttgctaatgttgattgaacctccctttccccataatgtgggcagatttggctcagctccttcatgagatcaggtcagtggtattgtttctgtcaagagtgttttttctgtcatttctactttttgtataaaggaaataaaacaatgttaacagcc

SEQ ID NO: 19942 - DNA, 2588 bp, Homo sapiens
  source 1..2588: mol_type = unassigned DNA
cgcccgcggccgggccgcattgtgacgtagcggggccgcggcagcgcctccaccgcccgcctacttcggctgaggctgttctgctcctgccgctgcggtccgtcggtcggtcagtcagtcccttcgcgctcctgagccgccggcgcgccgggcgccccgggaatttataagtatttgaccgtactcaaaatgtgcaaggaagaataatggaagcccctgaataccttgatttggatgaaattgactttagtgatgacatatcttattcagtcacatcactcaagacgatcccagaactgtgccgaagatgtgatacgcaaaacgaagacagatcagaatggtcagttggagtgcgtacgctggatggtgagcgaaacagaagccattgcagaactgagttgttctaaggattttccaagccttattcattacgcaggttgctatggccaggaaaagattcttctgtggcttcttcagtttatgcaagaacagggcatctcgttggatgaagtagaccaggatggcaacagtgccgttcacgtagcctcacagcatggctaccttggatgcatacagaccttggttgaatatggagcaaatgtcaccatgcagaaccacgctggggaaaagccctcccagagcgccgagcggcaggggcacaccctgtgctccaggtacctggtggtggtggagacctgcatgtcgctggcctctcaagtggtgaagttaaccaagcagctaaaggaacaaacagtagaacgtgtcacgctgcagaaccaactccaacaatttctagaagcccagaaatcagagggcaagtcactcccttcttcacccagttcaccatcctcacctgcctccagaaagtcccagtggaaatctccagatgcagatgatgattctgtagccaaaagcaagccaggagtccaagaggggattcaggttcttggaagcctgtcagcctccagccgggctagacccaaagcaaaagatgaagattctgataaaatcttacgccagttattgggaaaggaaatctcagaaaatgtctgcacccaggaaaaactgtccttggaattccaggatgctcaggcttcctctagaaattctaaaaagatcccactggagaagagggaactgaagttagccaggctgagacagctgatgcagaggtcactgagtgagtctgacacagactccaacaactctgaggaccccaagactaccccagtgaggaaggctgaccgaccaaggccgcagcccattgtagaaagcgtagagagtatggacagcgcagaaagcctgcacctgatgattaagaaacacaccttggcatcagggggacgcaggtttcctttcagcatcaaggcctccaaatccctggatggccacagcccatctcccacctcagagagcagcgaaccagacttagaatcccagtatccaggctcagggagtattcctccaaaccagccctctggtgaccctcagcagcccagccctgacagtactgctgcccagaaagttgccacaagtcccaagagtgccctcaagtctccatcttccaagcgtaggacatctcagaacttaaaactgagagttacctttgaggagcctgtggtgcagatggagcagcctagccttgaactgaatggagaaaaagacaaagataagggcaggactctccagcggacctccacaagtaacgaatcgggggatcaactgaaaaggccttttggagcctttcgatctatcatggagacactaagtggcaaccaaaacaataataataactaccaggcagccaaccagctgaaaacctctacattgcccttgacctcacttgggaggaagacagatgccaagggaaaccctgccagctccgctagcaaaggaaagaataaggcagaaatgtacagcagctgcatcaatctttcctctaacatgctgattgaagagcatctgtgtaacgacacacggcataatgacatcaatagaaaaatgaagaaatcctacagcataaagcacattgctgagccagagtcaaaagaactcttcttgtaaatcactttttaaattttctctcactgatgccctttggaaattattggaaatttctggactatcctctttggaaagagaaccatgaaaacaatgcctcaccagcagaagaacagaatatcaggatgccttaaatttatagtagtagactgtaaaagattcattttggggtgatatctgtatatataacttgtttttttaaaagatgccgtttaaaagcatgattgggaaaatgtatgttttttaagagtagattgattcaccctacccacaggacattcaccaagccactgataccattttatatttcatcaattgcatgagtatttgctaatgttgattgaacctccctttccccataatgtgggcagatttggctcagctccttcatgagatcaggtcagtggtattgtttctgtcaagagtgttttttctgtcatttctactttttgtataaaggaaataaaacaatgttaacagccacctataagcttggggcacctactttctaacaaatctgtgatgtt

SEQ ID NO: 19943 - DNA, 1591 bp, Homo sapiens
  source 1..1591: mol_type = unassigned DNA
atggaagcccctgaataccttgatttggatgaaattgactttagtgatgacatatcttattcagtcacatcactcaagacgatcccagaactgtgccgaagatgtgatacgcaaaacgaagacagatcaggaaaagattcttctgtggcttcttcagtttatgcaagaacagggcatctcgttggatgaagtagaccaggatggcaacagtgccgttcacgtagcctcacagcatggctaccttggatgcatacagaccttggttgaatatggagcaaatgtcaccatgcagaaccacgctggggaaaagccctcccagagcgccgagcggcaggggcacaccctgtgctccaggtacctggtggtggtggagacctgcatgtcgctggcctctcaagtggtgaagttaaccaagcagctaaaggaacaaacagtagaacgtgtcacgctgcagaaccaactccaacaatttctagaagcccagaaatcagagggcaagtcactcccttcttcacccagttcaccatcctcacctgcctccagaaagtcccagtggaaatctccagatgcagatgatgattctgtagccaaaagcaagccaggagtccaagaggggattcaggttcttggaagcctgtcagcctccagccgggctagacccaaagcaaaagatgaagattctgataaaatcttacgccagttattgggaaaggaaatctcagaaaatgtctgcacccaggaaaaactgtccttggaattccaggatgctcaggcttcctctagaaattctaaaaagatcccactggagaagagggaactgaagttagccaggctgagacagctgatgcagaggtcactgagtgagtctgacacagactccaacaactctgaggaccccaagactaccccagtgaggaaggctgaccgaccaaggccgcagcccattgtagaaagcgtagagagtatggacagcgcagaaagcctgcacctgatgattaagaaacacaccttggcatcagggggacgcaggtttcctttcagcatcaaggcctccaaatccctggatggccacagcccatctcccacctcagagagcagcgaaccagacttagaatcccagtatccaggctcagggagtattcctccaaaccagccctctggtgaccctcagcagcccagccctgacagtactgctgcccagaaagttgccacaagtcccaagagtgccctcaagtctccatcttccaagcgtaggacatctcagaacttaaaactgagagttacctttgaggagcctgtggtgcagatggagcagcctagccttgaactgaatggagaaaaagacaaagataagggcaggactctccagcggacctccacaagtaacgaatcgggggatcaactgaaaaggccttttggagcctttcgatctatcatggagacactaagtggcaaccaaaacaataataataactaccaggcagccaaccagctgaaaacctctacattgcccttgacctcacttgggaggaagacagatgccaagggaaaccctgccagctccgctagcaaaggaaagaataaggcagta

SEQ ID NO: 19944 - DNA, 1885 bp, Homo sapiens
  source 1..1885: mol_type = unassigned DNA
atggaagcccctgaataccttgatttggatgaaattgactttagtgatgacatatcttattcagtcacatcactcaagacgatcccagaactgtgccgaagatgtgatacgcaaaacgaagacagatcagccacacctagctgcagacaatctagacaaaattcacgacgaaaatggaaacaatctattacatattgcggcgtcacagggacacgcagagtgtctacagcacctcacttctttgatgggagaagactgcctcaatgagcgcaacactgagaagttgactccagcaggcctggccattaagaatggtcagttggagtgcgtacgctggatggtgagcgaaacagaagccattgcagaactgagttgttctaaggattttccaagccttattcattacgcaggttgctatggccaggaaaagattcttctgtggcttcttcagtttatgcaagaacagggcatctcgttggatgaagtagaccaggatggcaacagtgccgttcacgtagcctcacagcatggctaccttggatgcatacagaccttggttgaatatggagcaaatgtcaccatgcagaaccacgctggggaaaagccctcccagagcgccgagcggcaggggcacaccctgtgctccaggtacctggtggtggtggagacctgcatgtcgctggcctctcaagtggtgaagttaaccaagcagctaaaggaacaaacagtagaacgtgtcacgctgcagaaccaactccaacaatttctagaagcccagaaatcagagggcaagtcactcccttcttcacccagttcaccatcctcacctgcctccagaaagtcccagtggaaatctccagatgcagatgatgattctgtagccaaaagcaagccaggagtccaagaggggattcaggttcttggaagcctgtcagcctccagccgggctagacccaaagcaaaagatgaagattctgataaaatcttacgccagttattgggaaaggaaatctcagaaaatgtctgcacccaggaaaaactgtccttggaattccaggatgctcaggcttcctctagaaattctaaaaagatcccactggagaagagggaactgaagttagccaggctgagacagctgatgcagaggtcactgagtgagtctgacacagactccaacaactctgaggaccccaagactaccccagtgaggaaggctgaccgaccaaggccgcagcccattgtagaaagcgtagagagtatggacagcgcagaaagcctgcacctgatgattaagaaacacaccttggcatcagggggacgcaggtttcctttcagcatcaaggcctccaaatccctggatggccacagcccatctcccacctcagagagcagcgaaccagacttagaatcccagtatccaggctcagggagtattcctccaaaccagccctctggtgaccctcagcagcccagccctgacagtactgctgcccagaaagttgccacaagtcccaagagtgccctcaagtctccatcttccaagcgtaggacatctcagaacttaaaactgagagttacctttgaggagcctgtggtgcagatggagcagcctagccttgaactgaatggagaaaaagacaaagataagggcaggactctccagcggacctccacaagtaacgaatcgggggatcaactgaaaaggccttttggagcctttcgatctatcatggagacactaagtggcaaccaaaacaataataataactaccaggcagccaaccagctgaaaacctctacattgcccttgacctcacttgggaggaagacagatgccaagggaaaccctgccagctccgctagcaaaggaaagaataaggcagta

SEQ ID NO: 19945 - DNA, 2729 bp, Homo sapiens
  source 1..2729: mol_type = unassigned DNA
cgcccgcggccgggccgcattgtgacgtagcggggccgcggcagcgcctccaccgcccgcctacttcggctgaggctgttctgctcctgccgctgcggtccgtcggtcggtcagtcagtcccttcgcgctcctgagccgccggcgcgccgggcgccccgggaatttataagtatttgaccgtactcaaaatgtgcaaggaagaataatggaagcccctgaataccttgatttggatgaaattgactttagtgatgacatatctgacaataggagtcaagggaacaggctacaaaagcttggattggaggacacagacagggaagatgcaatgggctttggttcccatagggccaaactgacagtagttgctgccctgggagcttgccattgtcctgagaatgagtattcagtcacatcactcaagacgatcccagaactgtgccgaagatgtgatacgcaaaacgaagacagatcagaatggtcagttggagtgcgtacgctggatggtgagcgaaacagaagccattgcagaactgagttgttctaaggattttccaagccttattcattacgcaggttgctatggccaggaaaagattcttctgtggcttcttcagtttatgcaagaacagggcatctcgttggatgaagtagaccaggatggcaacagtgccgttcacgtagcctcacagcatggctaccttggatgcatacagaccttggttgaatatggagcaaatgtcaccatgcagaaccacgctggggaaaagccctcccagagcgccgagcggcaggggcacaccctgtgctccaggtacctggtggtggtggagacctgcatgtcgctggcctctcaagtggtgaagttaaccaagcagctaaaggaacaaacagtagaacgtgtcacgctgcagaaccaactccaacaatttctagaagcccagaaatcagagggcaagtcactcccttcttcacccagttcaccatcctcacctgcctccagaaagtcccagtggaaatctccagatgcagatgatgattctgtagccaaaagcaagccaggagtccaagaggggattcaggttcttggaagcctgtcagcctccagccgggctagacccaaagcaaaagatgaagattctgataaaatcttacgccagttattgggaaaggaaatctcagaaaatgtctgcacccaggaaaaactgtccttggaattccaggatgctcaggcttcctctagaaattctaaaaagatcccactggagaagagggaactgaagttagccaggctgagacagctgatgcagaggtcactgagtgagtctgacacagactccaacaactctgaggaccccaagactaccccagtgaggaaggctgaccgaccaaggccgcagcccattgtagaaagcgtagagagtatggacagcgcagaaagcctgcacctgatgattaagaaacacaccttggcatcagggggacgcaggtttcctttcagcatcaaggcctccaaatccctggatggccacagcccatctcccacctcagagagcagcgaaccagacttagaatcccagtatccaggctcagggagtattcctccaaaccagccctctggtgaccctcagcagcccagccctgacagtactgctgcccagaaagttgccacaagtcccaagagtgccctcaagtctccatcttccaagcgtaggacatctcagaacttaaaactgagagttacctttgaggagcctgtggtgcagatggagcagcctagccttgaactgaatggagaaaaagacaaagataagggcaggactctccagcggacctccacaagtaacgaatcgggggatcaactgaaaaggccttttggagcctttcgatctatcatggagacactaagtggcaaccaaaacaataataataactaccaggcagccaaccagctgaaaacctctacattgcccttgacctcacttgggaggaagacagatgccaagggaaaccctgccagctccgctagcaaaggaaagaataaggcagaaatgtacagcagctgcatcaatctttcctctaacatgctgattgaagagcatctgtgtaacgacacacggcataatgacatcaatagaaaaatgaagaaatcctacagcataaagcacattgctgagccagagtcaaaagaactcttcttgtaaatcactttttaaattttctctcactgatgccctttggaaattattggaaatttctggactatcctctttggaaagagaaccatgaaaacaatgcctcaccagcagaagaacagaatatcaggatgccttaaatttatagtagtagactgtaaaagattcattttggggtgatatctgtatatataacttgtttttttaaaagatgccgtttaaaagcatgattgggaaaatgtatgttttttaagagtagattgattcaccctacccacaggacattcaccaagccactgataccattttatatttcatcaattgcatgagtatttgctaatgttgattgaacctccctttccccataatgtgggcagatttggctcagctccttcatgagatcaggtcagtggtattgtttctgtcaagagtgttttttctgtcatttctactttttgtataaaggaaataaaacaatgttaacagccacctataagcttggggcacctactttctaacaaatctgtgatgtt

SEQ ID NO: 19946 - DNA, 4538 bp, Homo sapiens
  source 1..4538: mol_type = unassigned DNA
atgcggcacggcgtcgcctgggcgctgctggtggccgcggccctggggcttggggcgcgcggggtgcgcggcgcggtggcccttgccgacttctacccgttcggcgccgagcgcggcgacgccgtcacccccaagcaggacgacggcggctcggggctgcggccgctctcggtgcccttcccgttcttcggtgccgagcactccggactctacgtgaacaacaacgggatcatctccttcctgaaggaggtttctcagttcaccccagtggccttccccattgccaaggaccgctgcgtggtggcagccttctgggcagatgtggacaaccggcgtgcaggcgacgtgtactaccgggaggccaccgacccagccatgctgcgccgagccacggaggacgtcaggcactacttccccgagctcctggacttcaatgccacctgggtttttgttgccacctggtaccgagtgaccttctttggaggcagttcctcatcccctgtcaacacattccagactgtgctcatcacagacggcaagctctccttcaccatcttcaactatgagtccatcgtgtggaccacaggcacacacgccagcagcgggggcaacgccactggcctcgggggcatcgcagcccaggctggcttcaacgcaggcgatgggcagcgttacttcagtatccccggctcgcgcacagcagacatggccgaggtggagaccaccaccaacgtgggtgtgcccgggcgctgggcgttcagaatcgatgatgcccaggtgcgcgtggggggctgcggccatacaacgtccgtgtgcctggccctgcgcccctgcctcaacggcggcaagtgcatcgacgactgcgtcacgggcaacccctcctacacctgctcctgcctctcgggcttcacggggcggaggtgccacctggacgtgaacgaatgtgcctcccagccctgtcagaatggtgggacctgtactcacggcatcaacagtttccgctgccagtgcccggctggctttgggggacccacctgtgagacagcccaatccccctgtgacaccaaagagtgtcaacatggtggccagtgccaggtggagaatggctctgcggtgtgtgtgtgccaggccggatacaccggagcagcctgcgagatggatgtggacgactgcagccctgacccctgcctgaatggaggctcttgtgttgacctagtggggaattacacctgcttgtgtgccgagcccttcaagggacttcgctgtgagacaggagaccatccagtgccagacgcctgcctctcggccccttgccacaatgggggcacctgtgtggatgcggaccagggctacgtgtgcgagtgccccgaaggcttcatgggcctggactgcagggagagagtccccgatgactgtgagtgccgcaacggaggcagatgcctgggcgccaacaccaccctctgccagtgccccctgggattctttgggcttctctgtgaatttgaaatcacagccatgccctgcaacatgaacacacagtgcccagatgggggctactgcatggagcacggcgggagctacctctgcgtctgccacaccgaccacaatgccagccactccctgccatcaccctgcgactcggacccctgcttcaacggaggctcctgcgatgcccatgacgactcctacacctgcgagtgcccgcgcgggttccacggcaagcactgcgagaaagcccggccacacctgtgcagctcagggccctgccggaacgggggcacgtgcaaggaggcgggcggcgagtaccactgcagctgcccctaccgcttcactgggaggcactgtgagatcgggaagccagactcgtgtgcctctggcccctgtcacaacggcggcacctgcttccactacattggcaaatacaagtgtgactgtcccccaggcttctccgggcggcactgcgagatagccccctccccctgcttccggagcccgtgtgtgaatgggggcacctgcgaggaccgggacacggatttcttctgccactgccaagcagggtacatgggacgccggtgccaggcagaggtggactgcggccccccggaggaggtgaagcacgccacactgcgcttcaacggcacgcggctgggcgcggtggccctgtatgcatgtgaccgtggctacagcctgagcgcccccagccgcatccgggtctgccagccacacggtgtctggagtgagcctccccagtgccttgaaatcgatgagtgccggtctcagccgtgcctgcatgggggctcttgtcaggaccgcgttgctgggtacctgtgcctctgcagcacaggctatgagggcgcccactgtgagctggagagggatgagtgccgagctcacccgtgcagaaatggagggtcctgcaggaacctcccaggggcctatgtctgccggtgccctgcaggcttcgttggagtccactgtgagacagaggtggacgcctgcgactccagcccctgccagcatggaggccggtgtgagagcggcggcggggcctacctgtgcgtctgcccagagagcttcttcggctaccactgcgagacagtgagtgacccctgcttctccagcccctgtgggggccgtggctattgcctggccagcaacggctcccacagctgcacctgcaaagtgggctacacgggcgaggactgcgccaaagagctcttcccaccgacggccctcaagatggagagagtggaggagagtggggtctctatctcctggaacccgcccaatggtccagccgccaggcagatgcttgatggctacgcggtcacctacgtctcctccgacggctcctaccgccgcacagactttgtggacaggacccgctcctcgcaccagctccaggccctggcggccggcagggcctacaacatctccgtcttctcagtgaagcgaaacagtaacaacaagaatgacatcagcaggcctgccgtgctgctggcccgcacgcgaccccgccctgtggaaggcttcgaggtcaccaatgtgacggctagcaccatctcagtgcagtgggccctgcacaggatccgccatgccaccgtcagtggggtccgtgtgtccatccgccaccctgaggccctcagggaccaggccaccgatgtggacaggagtgtggacaggttcacctttagggccctgctgcctgggaagaggtacaccatccagctgaccaccctcagtgggctcaggggagaggagcaccccacagagagcctggccaccgcgccgacgcacgtgtggacccggcccctgcctccagcaaacctgaccgccgcccgagtcactgccacctctgcccacgtggtctgggatgccccgactccaggcagcttgctggaggcttatgtcatcaatgtgaccaccagccagagcaccaagagccgctatgtccccaacgggaagctggcgtcctacacggtgcgcgacctgctgccgggacggcggtaccagctctctgtgatagcagtgcagagcacggagctcgggccgcagcacagcgagcccgcccacctctacatcatcacctcccccagggatggcgctgacagacgctggcaccagggaggacaccaccctcgggtgctcaagaacagaccgcccccggcgcgcctgccggagctgcgcctgctcaatgaccacagcgcccccgagacccccacccagccccccaggttctcggagcttgtggacggcagaggaagagtgagcgccaggttcggtggctcacccagcaaagcagccaccgtgagatcacaacccacagcctcggcgcagctcgagaacatggaggaagcccccaagcgggtcagcctggccctccagctccctgaacacggcagcaaggacatcggaagtgagtcagcagcgctggtggggactttgggactgactgactgctctcaggggccttagaggctgcaggcaggagggaccacccacggtgaggaatcaggaggcacagagcctacctgaggggaggctgagcaccaggcaccccggtgtgggaagatggggtgaagctacaccacccaagcagtgggaccccacagacgggaacaggccagggggcaggacccacccaaaccacccagagtctgagctagagagactggctttgatgctgcctcccctcccctctcctccttcgcctccacatgcagcagagcccaccccagcccctgcctctgggcccctcacccctcacttctccaaagaggagcaggcggagtcaggatgggagaagcagagggagcagccactgggcgagccccagcttgaggactagctgggccctgtggacactcaggttatgcaggacctgaactgtctcctagtccggggctctgcctcgtgaggatcgaggccagcacgtccctgcagggcaccaagcatctgctgagcacctgcagtaagagttcccagacgctcacgaggcagttccccttcgggcagcaccaatacatgtgtgttcctca

SEQ ID NO: 19947 - DNA, 7986 bp, Homo sapiens
  source 1..7986: mol_type = unassigned DNA
atgcggcacggcgtcgcctgggcgctgctggtggccgcggccctggggcttggggcgcgcggggtgcgcggcgcggtggcccttgccgacttctacccgttcggcgccgagcgcggcgacgccgtcacccccaagcaggacgacggcggctcggggctgcggccgctctcggtgcccttcccgttcttcggtgccgagcactccggactctacgtgaacaacaacgggatcatctccttcctgaaggaggtttctcagttcaccccagtggccttccccattgccaaggaccgctgcgtggtggcagccttctgggcagatgtggacaaccggcgtgcaggcgacgtgtactaccgggaggccaccgacccagccatgctgcgccgagccacggaggacgtcaggcactacttccccgagctcctggacttcaatgccacctgggtttttgttgccacctggtaccgagtgaccttctttggaggcagttcctcatcccctgtcaacacattccagactgtgctcatcacagacggcaagctctccttcaccatcttcaactatgagtccatcgtgtggaccacaggcacacacgccagcagcgggggcaacgccactggcctcgggggcatcgcagcccaggctggcttcaacgcaggcgatgggcagcgttacttcagtatccccggctcgcgcacagcagacatggccgaggtggagaccaccaccaacgtgggtgtgcccgggcgctgggcgttcagaatcgatgatgcccaggtgcgcgtggggggctgcggccatacaacgtccgtgtgcctggccctgcgcccctgcctcaacggcggcaagtgcatcgacgactgcgtcacgggcaacccctcctacacctgctcctgcctctcgggcttcacggggcggaggtgccacctggacgtgaacgaatgtgcctcccagccctgtcagaatggtgggacctgtactcacggcatcaacagtttccgctgccagtgcccggctggctttgggggacccacctgtgagacagcccaatccccctgtgacaccaaagagtgtcaacatggtggccagtgccaggtggagaatggctctgcggtgtgtgtgtgccaggccggatacaccggagcagcctgcgagatggatgtggacgactgcagccctgacccctgcctgaatggaggctcttgtgttgacctagtggggaattacacctgcttgtgtgccgagcccttcaagggacttcgctgtgagacaggagaccatccagtgccagacgcctgcctctcggccccttgccacaatgggggcacctgtgtggatgcggaccagggctacgtgtgcgagtgccccgaaggcttcatgggcctggactgcagggagagagtccccgatgactgtgagtgccgcaacggaggcagatgcctgggcgccaacaccaccctctgccagtgccccctgggattctttgggcttctctgtgaatttgaaatcacagccatgccctgcaacatgaacacacagtgcccagatgggggctactgcatggagcacggcgggagctacctctgcgtctgccacaccgaccacaatgccagccactccctgccatcaccctgcgactcggacccctgcttcaacggaggctcctgcgatgcccatgacgactcctacacctgcgagtgcccgcgcgggttccacggcaagcactgcgagaaagcccggccacacctgtgcagctcagggccctgccggaacgggggcacgtgcaaggaggcgggcggcgagtaccactgcagctgcccctaccgcttcactgggaggcactgtgagatcgggaagccagactcgtgtgcctctggcccctgtcacaacggcggcacctgcttccactacattggcaaatacaagtgtgactgtcccccaggcttctccgggcggcactgcgagatagccccctccccctgcttccggagcccgtgtgtgaatgggggcacctgcgaggaccgggacacggatttcttctgccactgccaagcagggtacatgggacgccggtgccaggcagaggtggactgcggccccccggaggaggtgaagcacgccacactgcgcttcaacggcacgcggctgggcgcggtggccctgtatgcatgtgaccgtggctacagcctgagcgcccccagccgcatccgggtctgccagccacacggtgtctggagtgagcctccccagtgccttgaaatcgatgagtgccggtctcagccgtgcctgcatgggggctcttgtcaggaccgcgttgctgggtacctgtgcctctgcagcacaggctatgagggcgcccactgtgagctggagagggatgagtgccgagctcacccgtgcagaaatggagggtcctgcaggaacctcccaggggcctatgtctgccggtgccctgcaggcttcgttggagtccactgtgagacagaggtggacgcctgcgactccagcccctgccagcatggaggccggtgtgagagcggcggcggggcctacctgtgcgtctgcccagagagcttcttcggctaccactgcgagacagtgagtgacccctgcttctccagcccctgtgggggccgtggctattgcctggccagcaacggctcccacagctgcacctgcaaagtgggctacacgggcgaggactgcgccaaagagctcttcccaccgacggccctcaagatggagagagtggaggagagtggggtctctatctcctggaacccgcccaatggtccagccgccaggcagatgcttgatggctacgcggtcacctacgtctcctccgacggctcctaccgccgcacagactttgtggacaggacccgctcctcgcaccagctccaggccctggcggccggcagggcctacaacatctccgtcttctcagtgaagcgaaacagtaacaacaagaatgacatcagcaggcctgccgtgctgctggcccgcacgcgaccccgccctgtggaaggcttcgaggtcaccaatgtgacggctagcaccatctcagtgcagtgggccctgcacaggatccgccatgccaccgtcagtggggtccgtgtgtccatccgccaccctgaggccctcagggaccaggccaccgatgtggacaggagtgtggacaggttcacctttagggccctgctgcctgggaagaggtacaccatccagctgaccaccctcagtgggctcaggggagaggagcaccccacagagagcctggccaccgcgccgacgcacgtgtggacccggcccctgcctccagcaaacctgaccgccgcccgagtcactgccacctctgcccacgtggtctgggatgccccgactccaggcagcttgctggaggcttatgtcatcaatgtgaccaccagccagagcaccaagagccgctatgtccccaacgggaagctggcgtcctacacggtgcgcgacctgctgccgggacggcggtaccagctctctgtgatagcagtgcagagcacggagctcgggccgcagcacagcgagcccgcccacctctacatcatcacctcccccagggatggcgctgacagacgctggcaccagggaggacaccaccctcgggtgctcaagaacagaccgcccccggcgcgcctgccggagctgcgcctgctcaatgaccacagcgcccccgagacccccacccagccccccaggttctcggagcttgtggacggcagaggaagagtgagcgccaggttcggtggctcacccagcaaagcagccaccgtgagatcacacgtccctggcaactgttcagaaaacccctgtcagaacggaggcacttgtgtgccgggcgcagacgcccacagctgtgactgcgggccagggttcaaaggcagacgctgcgagctcgcctgtataaaggtgtcccgcccctgcacaaggctgttctccgagacaaaggcctttccagtctgggagggaggcgtctgtcaccacgtgaaacaaagtaagagtcagacactggagaaatcttaaggatttaagacgttcttgttacactccaccaacctcacgagtttctaacacccaggaagatgaggtctaaaaactggatgaaaaaggacaccctgagaaaaggtcctagctggagtcagtcccctctgtgacctctctcctcaggcctctagaggacagatggccaggcctgtgcacacaccagcccaccctgagagacccctctgggaccaaccacctgtgagtcctgcgatgcgtttaagcagcctgtgccctcacccaagctgcagttcctgaaggtgtagtctgtgtctctgcggatgagatgacagctcgccattccccggaatcagtgaggctgtcagtcagccacgcttctgcagtatgcagaaacctgttcttagactccaaagccagagaaagaattctcccttcgaggcccaacaaattgagaaggaactgtgatggaccacttccaaaacagagacgggggcaggggctgaagggcagagaccaggtgatgtcagaaggaaagccgggttgcagacacagccgcccctgctctggtcctccagcgtgtttatgacgctcgtgcaggtcgacgagccatcctatggactagttaacactaaggtggagttcagacttttttagacaacggcgcgactggcagcctttctctatcaagggtcagacggtaaacgttttcagctttgcagaccagaggtccctgtggctacagtagcgcagacacagccacaggcatgtcattgaatggctgcggctatgttccaataaaaacttatttacaataacaggtggtggccaaattggcccatgggccttatttggtgaaccctgttctatgagatcacctaggcttcagccttaaacagtggaagccatcccctgaatgacaagtcacaagggtatcaaagaaagacccctgaattttcatggaaaaagctattcagacccctgcttggaaagctaaggcacactgccacgaagcagcaaggacgccttacaagtctcagtgcaacagagatggacacctgggctgggctggacaatgtttaaggttccttttagtccatgactcaagtgatactgttttaggctatcaggtagtaaacacgatcttagacatccccatctttgtaagcagaacagtacggcacttcaccacatctgcttcccaccatgcttctaagcagctgtcttccccctgctaatgttacaaccaaagcagccaccccacctcctctcgtgttgagcctcacgaccgctgacccagctggaaagccagcgccctgccgcgtcaccctgactctgctcagagccagcattccagccacaaagagggcctccttcctttcctctttcataaaaatgttttttgaagagttagagtatattttaggctttttatctttattaaaatttcatgtgcatgtgtctgtgtattctgcaatttgtcattttcagaaagaaggaacaggcaattcgcgaagtttcacctgtactcccgagctgttccccaggctccagacccacttgagagcagaaggtggagctcaatgaagggtctcgagctcagcgaagggtcactgggtgaactgagagaaaccacgttcacaaacgcgtactgcggacttcctgccgccctgggacctgtcactgtttgtccatgtaagctacagcattactagcagatgctaagatcgagtgatatcactggaaaagtaggtgaatcctactaggaaactttctactccctactaggacctcaagcccctcagccacacagcaaatgctaatatgctccagtgttagcttagaagccttgtgtcaacaagaactggctcctgagtcccaagcttggtgccacacagcaaatgctaatatgctccagtgttagcttagaagccttgtgtcaacaagaactggctcctgagtcccaagcttggtgccacacagcaaatgctaatatgctccagtgttagcttagaagccttgtgtcaacaagaactggctcctgagtcccaagtgctgtcacaggacttgcccattgggatgttttccacattaaatatcaagtaaaaagacttcctggtgctcaggaattacagttcgttcttgaaacattccaaagaggccaccacagcttttcccatgtggcttcttttaaaaactcaaatggcttccttgaaaatactcaaagtccacccaaggaaattagtaataatagaatcagaaaactgtcaggagcataaagatttctgtatcaaaatgaaagaagcaatcctgagttgctgaattacccatctgctaatgaaaccgggatggactgatcatctaaccaagtgcagactgaggattctacttagtcctccgactgggtacaacaacagcctaggttctagggagggtggcagtgaccgggatgccacaatggaagagaaaatgaaaacactggcacagtgaaatgtctcatttccaaacagttttgcctatggccaagcaaggcaataaagacaaactctcccttttccccattgcgtgtgggctgccaggtacaagtaagggaatctttgctgtgcccactgtcctccagtagagaacccaacaggcaagggccccactcaggtatcagctcacctcctgcacctccccttagcaggaactccttccactggcaaaggactgccactgccatctgactcaactgtggcgatgtggacggagtcaccgagctgcttttcttttgcaaaacaaaagtctttttctttgcagtcacgctgtaagacgaggctgctggagaaaacaaaagcacctagatttcagtgctgaatccccacaattgcatgcagctcacacctaccaggggtattccagtgcataggggaaaggaacccggctgaaaaaccagctccttatttttcttttaaataaaataatacgatcctaagtccatttaccatctgaagttgtcacgagtgaacagtcacattactgttgtggaccaggccttagatgagtttctcaggctcagcactgacattctgggccggatcatcctctcttgtgggaccatcctgtgcactgcaggatgtttcacagcacccctggcctctacccactagaatcctacaatctaccagatcctaggatctagttgatcctagaatgctaccaaggagacttgaattttggtcccatcatcaaaaatgccttctgcatcaatcctatgccagtttcccctaaaagagggctaactggaatgttctaggatgtaccaatcctccaggaccctcttagagctcatgccatcagagacaggcctctatctcagggatcaccccggctgacatcaaattcctcttctcttttcccaacatttcaaattgttcttcggactcattgagttccctaaggtgacacgcccccccccccccccacacccaccttggggggtcacggattgctccctgtggccctggcttcagcccacctgctccatgaccctatgctcttctcctctggttctcgaagctgtctgtaaccagggcaggggagataactgtatgggaccattccctggcctccacctgccccagcactctccaggccagcacagtctggcactacagactacagggccggagacaccaggcttggaagtgaccactggccaagagctgacataaaagccaacttccccaaacaggaagggcctgttcttcacaaagataaagaaaactgccagcattttgctggccttaagaagccatgcaaaattaaccagtacatcatgaattaacttcttttactctgctgtgcactgaataccattatgaagcaatatacttttggattaaaaataagcatttttgtggaaaatctgctacatgttttcataaaataaagtgctatgatgtactaaaa

SEQ ID NO: 19948 - DNA, 8174 bp, Homo sapiens
  source 1..8174: mol_type = unassigned DNA
atgcggcacggcgtcgcctgggcgctgctggtggccgcggccctggggcttggggcgcgcggggtgcgcggcgcggtggcccttgccgacttctacccgttcggcgccgagcgcggcgacgccgtcacccccaagcaggacgacggcggctcggggctgcggccgctctcggtgcccttcccgttcttcggtgccgagcactccggactctacgtgaacaacaacgggatcatctccttcctgaaggaggtttctcagttcaccccagtggccttccccattgccaaggaccgctgcgtggtggcagccttctgggcagatgtggacaaccggcgtgcaggcgacgtgtactaccgggaggccaccgacccagccatgctgcgccgagccacggaggacgtcaggcactacttccccgagctcctggacttcaatgccacctgggtttttgttgccacctggtaccgagtgaccttctttggaggcagttcctcatcccctgtcaacacattccagactgtgctcatcacagacggcaagctctccttcaccatcttcaactatgagtccatcgtgtggaccacaggcacacacgccagcagcgggggcaacgccactggcctcgggggcatcgcagcccaggctggcttcaacgcaggcgatgggcagcgttacttcagtatccccggctcgcgcacagcagacatggccgaggtggagaccaccaccaacgtgggtgtgcccgggcgctgggcgttcagaatcgatgatgcccaggtgcgcgtggggggctgcggccatacaacgtccgtgtgcctggccctgcgcccctgcctcaacggcggcaagtgcatcgacgactgcgtcacgggcaacccctcctacacctgctcctgcctctcgggcttcacggggcggaggtgccacctggacgtgaacgaatgtgcctcccagccctgtcagaatggtgggacctgtactcacggcatcaacagtttccgctgccagtgcccggctggctttgggggacccacctgtgagacagcccaatccccctgtgacaccaaagagtgtcaacatggtggccagtgccaggtggagaatggctctgcggtgtgtgtgtgccaggccggatacaccggagcagcctgcgagatggatgtggacgactgcagccctgacccctgcctgaatggaggctcttgtgttgacctagtggggaattacacctgcttgtgtgccgagcccttcaagggacttcgctgtgagacaggagaccatccagtgccagacgcctgcctctcggccccttgccacaatgggggcacctgtgtggatgcggaccagggctacgtgtgcgagtgccccgaaggcttcatgggcctggactgcagggagagagtccccgatgactgtgagtgccgcaacggaggcagatgcctgggcgccaacaccaccctctgccagtgccccctgggattctttgggcttctctgtgaatttgaaatcacagccatgccctgcaacatgaacacacagtgcccagatgggggctactgcatggagcacggcgggagctacctctgcgtctgccacaccgaccacaatgccagccactccctgccatcaccctgcgactcggacccctgcttcaacggaggctcctgcgatgcccatgacgactcctacacctgcgagtgcccgcgcgggttccacggcaagcactgcgagaaagcccggccacacctgtgcagctcagggccctgccggaacgggggcacgtgcaaggaggcgggcggcgagtaccactgcagctgcccctaccgcttcactgggaggcactgtgagatcgggaagccagactcgtgtgcctctggcccctgtcacaacggcggcacctgcttccactacattggcaaatacaagtgtgactgtcccccaggcttctccgggcggcactgcgagatagccccctccccctgcttccggagcccgtgtgtgaatgggggcacctgcgaggaccgggacacggatttcttctgccactgccaagcagggtacatgggacgccggtgccaggcagaggtggactgcggccccccggaggaggtgaagcacgccacactgcgcttcaacggcacgcggctgggcgcggtggccctgtatgcatgtgaccgtggctacagcctgagcgcccccagccgcatccgggtctgccagccacacggtgtctggagtgagcctccccagtgccttgaaatcgatgagtgccggtctcagccgtgcctgcatgggggctcttgtcaggaccgcgttgctgggtacctgtgcctctgcagcacaggctatgagggcgcccactgtgagctggagagggatgagtgccgagctcacccgtgcagaaatggagggtcctgcaggaacctcccaggggcctatgtctgccggtgccctgcaggcttcgttggagtccactgtgagacagaggtggacgcctgcgactccagcccctgccagcatggaggccggtgtgagagcggcggcggggcctacctgtgcgtctgcccagagagcttcttcggctaccactgcgagacagtgagtgacccctgcttctccagcccctgtgggggccgtggctattgcctggccagcaacggctcccacagctgcacctgcaaagtgggctacacgggcgaggactgcgccaaagagctcttcccaccgacggccctcaagatggagagagtggaggagagtggggtctctatctcctggaacccgcccaatggtccagccgccaggcagatgcttgatggctacgcggtcacctacgtctcctccgacggctcctaccgccgcacagactttgtggacaggacccgctcctcgcaccagctccaggccctggcggccggcagggcctacaacatctccgtcttctcagtgaagcgaaacagtaacaacaagaatgacatcagcaggcctgccgtgctgctggcccgcacgcgaccccgccctgtggaaggcttcgaggtcaccaatgtgacggctagcaccatctcagtgcagtgggccctgcacaggatccgccatgccaccgtcagtggggtccgtgtgtccatccgccaccctgaggccctcagggaccaggccaccgatgtggacaggagtgtggacaggttcacctttagggccctgctgcctgggaagaggtacaccatccagctgaccaccctcagtgggctcaggggagaggagcaccccacagagagcctggccaccgcgccgacgcacgtgtggacccggcccctgcctccagcaaacctgaccgccgcccgagtcactgccacctctgcccacgtggtctgggatgccccgactccaggcagcttgctggaggcttatgtcatcaatgtgaccaccagccagagcaccaagagccgctatgtccccaacgggaagctggcgtcctacacggtgcgcgacctgctgccgggacggcggtaccagctctctgtgatagcagtgcagagcacggagctcgggccgcagcacagcgagcccgcccacctctacatcatcacctcccccagggatggcgctgacagacgctggcaccagggaggacaccaccctcgggtgctcaagaacagaccgcccccggcgcgcctgccggagctgcgcctgctcaatgaccacagcgcccccgagacccccacccagccccccaggttctcggagcttgtggacggcagaggaagagtgagcgccaggttcggtggctcacccagcaaagcagccaccgtgagatcacaacccacagcctcggcgcagctcgagaacatggaggaagcccccaagcgggtcagcctggccctccagctccctgaacacggcagcaaggacatcggaaacgtccctggcaactgttcagaaaacccctgtcagaacggaggcacttgtgtgccgggcgcagacgcccacagctgtgactgcgggccagggttcaaaggcagacgctgcgagctcgcctgtataaaggtgtcccgcccctgcacaaggctgttctccgagacaaaggcctttccagtctgggagggaggcgtctgtcaccacgtgtataaaagagtctaccgagttcaccaagacatctgcttcaaagagagctgtgaaagcacaagcctcaagaagaccccaaacaggaaacaaagtaagagtcagacactggagaaatcttaaggatttaagacgttcttgttacactccaccaacctcacgagtttctaacacccaggaagatgaggtctaaaaactggatgaaaaaggacaccctgagaaaaggtcctagctggagtcagtcccctctgtgacctctctcctcaggcctctagaggacagatggccaggcctgtgcacacaccagcccaccctgagagacccctctgggaccaaccacctgtgagtcctgcgatgcgtttaagcagcctgtgccctcacccaagctgcagttcctgaaggtgtagtctgtgtctctgcggatgagatgacagctcgccattccccggaatcagtgaggctgtcagtcagccacgcttctgcagtatgcagaaacctgttcttagactccaaagccagagaaagaattctcccttcgaggcccaacaaattgagaaggaactgtgatggaccacttccaaaacagagacgggggcaggggctgaagggcagagaccaggtgatgtcagaaggaaagccgggttgcagacacagccgcccctgctctggtcctccagcgtgtttatgacgctcgtgcaggtcgacgagccatcctatggactagttaacactaaggtggagttcagacttttttagacaacggcgcgactggcagcctttctctatcaagggtcagacggtaaacgttttcagctttgcagaccagaggtccctgtggctacagtagcgcagacacagccacaggcatgtcattgaatggctgcggctatgttccaataaaaacttatttacaataacaggtggtggccaaattggcccatgggccttatttggtgaaccctgttctatgagatcacctaggcttcagccttaaacagtggaagccatcccctgaatgacaagtcacaagggtatcaaagaaagacccctgaattttcatggaaaaagctattcagacccctgcttggaaagctaaggcacactgccacgaagcagcaaggacgccttacaagtctcagtgcaacagagatggacacctgggctgggctggacaatgtttaaggttccttttagtccatgactcaagtgatactgttttaggctatcaggtagtaaacacgatcttagacatccccatctttgtaagcagaacagtacggcacttcaccacatctgcttcccaccatgcttctaagcagctgtcttccccctgctaatgttacaaccaaagcagccaccccacctcctctcgtgttgagcctcacgaccgctgacccagctggaaagccagcgccctgccgcgtcaccctgactctgctcagagccagcattccagccacaaagagggcctccttcctttcctctttcataaaaatgttttttgaagagttagagtatattttaggctttttatctttattaaaatttcatgtgcatgtgtctgtgtattctgcaatttgtcattttcagaaagaaggaacaggcaattcgcgaagtttcacctgtactcccgagctgttccccaggctccagacccacttgagagcagaaggtggagctcaatgaagggtctcgagctcagcgaagggtcactgggtgaactgagagaaaccacgttcacaaacgcgtactgcggacttcctgccgccctgggacctgtcactgtttgtccatgtaagctacagcattactagcagatgctaagatcgagtgatatcactggaaaagtaggtgaatcctactaggaaactttctactccctactaggacctcaagcccctcagccacacagcaaatgctaatatgctccagtgttagcttagaagccttgtgtcaacaagaactggctcctgagtcccaagcttggtgccacacagcaaatgctaatatgctccagtgttagcttagaagccttgtgtcaacaagaactggctcctgagtcccaagcttggtgccacacagcaaatgctaatatgctccagtgttagcttagaagccttgtgtcaacaagaactggctcctgagtcccaagtgctgtcacaggacttgcccattgggatgttttccacattaaatatcaagtaaaaagacttcctggtgctcaggaattacagttcgttcttgaaacattccaaagaggccaccacagcttttcccatgtggcttcttttaaaaactcaaatggcttccttgaaaatactcaaagtccacccaaggaaattagtaataatagaatcagaaaactgtcaggagcataaagatttctgtatcaaaatgaaagaagcaatcctgagttgctgaattacccatctgctaatgaaaccgggatggactgatcatctaaccaagtgcagactgaggattctacttagtcctccgactgggtacaacaacagcctaggttctagggagggtggcagtgaccgggatgccacaatggaagagaaaatgaaaacactggcacagtgaaatgtctcatttccaaacagttttgcctatggccaagcaaggcaataaagacaaactctcccttttccccattgcgtgtgggctgccaggtacaagtaagggaatctttgctgtgcccactgtcctccagtagagaacccaacaggcaagggccccactcaggtatcagctcacctcctgcacctccccttagcaggaactccttccactggcaaaggactgccactgccatctgactcaactgtggcgatgtggacggagtcaccgagctgcttttcttttgcaaaacaaaagtctttttctttgcagtcacgctgtaagacgaggctgctggagaaaacaaaagcacctagatttcagtgctgaatccccacaattgcatgcagctcacacctaccaggggtattccagtgcataggggaaaggaacccggctgaaaaaccagctccttatttttcttttaaataaaataatacgatcctaagtccatttaccatctgaagttgtcacgagtgaacagtcacattactgttgtggaccaggccttagatgagtttctcaggctcagcactgacattctgggccggatcatcctctcttgtgggaccatcctgtgcactgcaggatgtttcacagcacccctggcctctacccactagaatcctacaatctaccagatcctaggatctagttgatcctagaatgctaccaaggagacttgaattttggtcccatcatcaaaaatgccttctgcatcaatcctatgccagtttcccctaaaagagggctaactggaatgttctaggatgtaccaatcctccaggaccctcttagagctcatgccatcagagacaggcctctatctcagggatcaccccggctgacatcaaattcctcttctcttttcccaacatttcaaattgttcttcggactcattgagttccctaaggtgacacgcccccccccccccccacacccaccttggggggtcacggattgctccctgtggccctggcttcagcccacctgctccatgaccctatgctcttctcctctggttctcgaagctgtctgtaaccagggcaggggagataactgtatgggaccattccctggcctccacctgccccagcactctccaggccagcacagtctggcactacagactacagggccggagacaccaggcttggaagtgaccactggccaagagctgacataaaagccaacttccccaaacaggaagggcctgttcttcacaaagataaagaaaactgccagcattttgctggccttaagaagccatgcaaaattaaccagtacatcatgaattaacttcttttactctgctgtgcactgaataccattatgaagcaatatacttttggattaaaaataagcatttttgtggaaaatctgctacatgttttcataaaataaagtgctatgatgtactaaaacctca

SEQ ID NO: 19949 - DNA, 578 bp, Homo sapiens
  source 1..578: mol_type = unassigned DNA
aagccctgccaagcctggggccgcagtgaggctcgcaccgggacctgccccagactcgcctcccagccgcgagcatctaggctacgagaggggagaggggccgcatctccgcaacactgagtccccagagaacacgacagggcgtccgtgtgcctggccctgcgcccctgcctcaacggcggcaagtgcatcgacgactgcgtcacgggcaacccctcctacacctgctcctgcctctcgggcttcacggggcggaggtgccacctggacgtgaacgaatgtgcctcccagccctgtcagaatggtgggacctgtactcacggcatcaacagtttccgctgccagtgcccggctggctttgggggacccacctgtgagacagcccaatccccctgtgacaccaaagagtgtcaacatggtggccagtgccaggtggagaatggctctgcggtgtgtgtgtgccaggccggatacaccggagcagcctgcgagatggatgtggacgactgcagccctgacccctgcctgaatggaggctcttgtgttgacctagtggggaattacacctgcttgtgtgc

SEQ ID NO: 19950 - DNA, 900 bp, Homo sapiens
  source 1..900: mol_type = unassigned DNA
cagcctgccccatgtttcagacgtgaacgaatgtgcctcccagccctgtcagaatggtgggacctgtactcacggcatcaacagtttccgctgccagtgcccggctggctttgggggacccacctgtgagacagcccaatccccctgtgacaccaaagagtgtcaacatggtggccagtgccaggtggagaatggctctgcggtgtgtgtgtgccaggccggatacaccggagcagcctgcgagatggatgtggacgactgcagccctgacccctgcctgaatggaggctcttgtgttgacctagtggggaattacacctgcttgtgtgccgagcccttcaagggacttcgctgtgagacaggagaccatccagtgccagacgcctgcctctcggccccttgccacaatgggggcacctgtgtggatgcggaccagggctacgtgtgcgagtgccccgaaggcttcatgggcctggactgcagggagagagtccccgatgactgtgagtgccgcaacggaggcagatgcctgggcgccaacaccaccctctgccagtgccccctgggattctttgggcttctctgtgaatttgaaatcacagccatgccctgcaacatgaacacacagtgcccagatgggggctactgcatggagcacggcgggagctacctctgcgtctgccacaccgaccacaatgccagccactccctgccatcaccctgcgactcggacccctgcttcaacggaggctcctgcgatgcccatgacgactcctacacctgcgagtgcccgcgcgggttccacggcaagcactgcgagaaagcccggccacacctgtgcagctcagggccctgccggaacgggggcacgtgcaaggaggcgggcggcgagtaccactg

SEQ ID NO: 19951 - DNA, 816 bp, Homo sapiens
  source 1..816: mol_type = unassigned DNA
gacccacctgtgagacagcccaatccccctgtgacaccaaagagtgtcaacatggtggccagtgccaggtggagaatggctctgcggtgtgtgtgtgccaggccggatacaccggagcagcctgcgagatggatgtggacgactgcagccctgacccctgcctgaatggaggctcttgtgttgacctagtggggaattacacctgcttgtgtgccgagcccttcaagggacttcgctgtgagacaggagaccatccagtgccagacgcctgcctctcggccccttgccacaatgggggcacctgtgtggatgcggaccagggctacgtgtgcgagtgccccgaaggcttcatgggcctggactgcagggagagagtccccgatgactgtgagtgccgcaacggaggcagatgcctgggcgccaacaccaccctctgccagtgccccctgggattctttgggcttctctgtgaatttgaaatcacagccatgccctgcaacatgaacacacagtgcccagatgggggctactgcatggagcacggcgggagctacctctgcgtctgccacaccgaccacaatgccagccactccctgccatcaccctgcgactcggacccctgcttcaacggaggctcctgcgatgcccatgacgactcctacacctgcgagtgcccgcgcgggttccacggcaagcactgcgagaaaggtatggcgggcaggggcgtccgggccggcgtcagcaccctggagagcgcccgcggtccgccgtcctgcttctctgctgtctctctccttgtttcgcgaattgctgacc

SEQ ID NO: 19952 - DNA, 664 bp, Homo sapiens
  source 1..664: mol_type = unassigned DNA
cagtgccaggtggagaatggctctgcggtgtgtgtgtgccaggccggatacaccggagcagcctgcgagatggatgtggacgactgcagccctgacccctgcctgaatggaggctcttgtgttgacctagtggggaattacacctgcttgtgtgccgagcccttcaagggacttcgctgtgagacagttgtgacttgttagaggaattaaaaggccaactggagattgcagcctacagtataaaaatggctttcgtgtctgattgttgcacctgcctccagaggctcacccactgtgccgacttctgtggacgcaccaggtgctgcttctctccagggagatgctaaagacaaactattcaggttatttttagtttaaaaaattcaggaggaaattctgttttacccgtaagacacagagggtcatgggccctccatcagtctttgccgagtgcatgggaggccagggtgtgtcctgaggggagggtggggcaggagcgggaggaggcagcctcacctatttggctgctttaaagtcactgttccgtgtcacagctcactttgcccagattgttatctaaatatcaatgtatttcactaaattcatgtcaggaaacggataagtggtttcaaaaattttttgcaaataaaccgtgttttctaca

SEQ ID NO: 19953 - DNA, 963 bp, Homo sapiens
  source 1..963: mol_type = unassigned DNA
agacgcctgcctctcggccccttgccacaatgggggcacctgtgtggatgcggaccagggctacgtgtgcgagtgccccgaaggcttcatgggcctggactgcagggagagagtccccgatgactgtgagtgccgcaacggaggcagatgcctgggcgccaacaccaccctctgccagtgccccctgggattctttgggcttctctgtgaatttgaaatcacagccatgccctgcaacatgaacacacagtgcccagatgggggctactgcatggagcacggcgggagctacctctgcgtctgccacaccgaccacaatgccagccactccctgccatcaccctgcgactcggacccctgcttcaacggaggctcctgcgatgcccatgacgactcctacacctgcgagtgcccgcgcgggttccacggcaagcactgcgagaaagcccggccacacctgtgcagctcagggccctgccggaacgggggcacgtgcaaggaggcgggcggcgagtaccactgcagctgcccctaccgcttcactgggaggcactgtgagatcgccagactcgtgtgcctctggcccctgtcacaacggcggcacctgcttccactacattggcaaatacaagtgtgactgtcccccaggcttctccgggcggcactgcgagatagccccctccccctgcttccggagcccgtgtgtgaatgggggcacctgcgaggaccgggacacggatttcttctgccactgccaagcagggtacatgggacgccggtgccaggcagaggtggactgcggccccccggaggaggtgaagcacgccacactgcgcttcaacggcacgcggctgggcgcggtggccctgtatgcatgtgaccgtggctacagcctgagcgcccccagccgcatccgggtctgccagccacacggtgtctggagtgagcctccccagtgccttg

SEQ ID NO: 19954 - DNA, 938 bp, Homo sapiens
  source 1..938: mol_type = unassigned DNA
gaactgttaggacccagggaaaatgtggcaatgccaatgcaggtacagaacacacagaaatccagattgactgctggggaccctgatgtcacggcagatgagactcagctgcttcctgtcagatggggaatgcccgtgtgcaggagggagggagtgctgcgcccgctgcagtgttggggccggttctccacaggaagggcccagccattgccagagcctgggcagaaaagaggacaggcaagcaaagggcccacctgtgactgagttggggtctccagcctgtgagccccaccccagcccccaccatgtgtgcggacctgcttggcccctgctgcagccaggccccagggcttcgtcgagaaggccccaccagcaccagaggactgaggagatgccaggagggtatagtggctctgtggggccagcagcctggccccgttcatctgcctctctgtccttccacacagcccggccacacctgtgcagctcagggccctgccggaacgggggcacgtgcaaggaggcgggcggcgagtaccactgcagctgcccctaccgcttcactgggaggcactgtgagatcgggaagccagactcgtgtgcctctggcccctgtcacaacggcggcacctgcttccactacattggcaaatacaagtgtgactgtcccccaggcttctccgggcggcactgcgagataggtaaggtgggtgggaggccaggccagggcggccaggggtgaaccctctctgcagatgtgaaaacaggcccatgggcagggctggtccaggccctggaggcgcaggaggtggagctgggtgcaggaggcaggatgccccacacagtcccgagccttcagggaagacacagtggccaggaccttcctgcattctggcagccccctccccctgcttccggagcccgtgtgtgaatggggg

SEQ ID NO: 19955 - DNA, 2198 bp, Homo sapiens
  source 1..2198: mol_type = unassigned DNA
gtggggctttgccagcaggcagtggaggtggcacgcctcccgaggaggggtgggtttggggctgatggaagaaaaagcacatgtcctgagtagttgctcccagctgggaaaggggtaactgaagccccaggaaatgcacggaatcctgggggcatgtgggcgcctcagacttgagccagcaacacccttgacaccccttctctgtgcagagagggatgagtgccgagctcacccgtgcagaaatggagggtcctgcaggaacctcccaggggcctatgtctgccggtgccctgcaggcttcgttggagtccactgtgagacagaggtggacgcctgcgactccagcccctgccagcatggaggccggtgtgagagcggcggcggggcctacctgtgcgtctgcccagagagcttcttcggctaccactgcgagacagtgagtgacccctgcttctccagcccctgtgggggccgtggctattgcctggccagcaacggctcccacagctgcacctgcaaagtgggctacacgggcgaggactgcgccaaagagctcttcccaccgacggccctcaagatggagagagtggaggagagtggggtctctatctcctggaacccgcccaatggtccagccgccaggcagatgcttgatggctacgcggtcacctacgtctcctccgacggctcctaccgccgcacagactttgtggacaggacccgctcctcgcaccagctccaggccctggcggccggcagggcctacaacatctccgtcttctcagtgaagcgaaacagtaacaacaagaatgacatcagcaggcctgccgtgctgctggcccgcacgcgaccccgccctgtggaaggcttcgaggtcaccaatgtgacggctagcaccatctcagtgcagtgggccctgcacaggatccgccatgccaccgtcagtggggtccgtgtgtccatccgccaccctgaggccctcagggaccaggccaccgatgtggacaggagtgtggacaggttcacctttagggccctgctgcctgggaagaggtacaccatccagctgaccaccctcagtgggctcaggggagaggagcaccccacagagagcctggccaccgcgccgacgcacgtgtggacccggcccctgcctccagcaaacctgaccgccgcccgagtcactgccacctctgcccacgtggtctgggatgccccgactccaggcagcttgctggaggcttatgtcatcaatgtgaccaccagccagagcaccaagagccgctatgtccccaacgggaagctggcgtcctacacggtgcgcgacctgctgccgggacggcggtaccagctctctgtgatagcagtgcagagcacggagctcgggccgcagcacagcgagcccgcccacctctacatcatcacctcccccagggatggcgctgacagacgctggcaccagggaggacaccaccctcgggtgctcaagaacagaccgcccccggcgcgcctgccggagctgcgcctgctcaatgaccacagcgcccccgagacccccacccagccccccaggttctcggagcttgtggacggcagaggaagagtgagcgccaggttcggtggctcacccagcaaagcagccaccgtgagatcacacgtccctggcaactgttcagaaaacccctgtcagaacggaggcacttgtgtgccgggcgcagacgcccacagctgtgactgcgggccagggttcaaaggcagacgctgcgagctcgcctgtataaaggtgtcccgcccctgcacaaggctgttctccgagacaaaggcctttccagtctgggagggaggcgtctgtcaccacgtgtataaaagagtctaccgagttcaccaagacatctgcttcaaagagagctgtgaaagcacaagcctcaagaagaccccaaacaggaaacaaagtaagagtcagacactggagaaatcttaaggatttaagacgttcttgttacactccaccaacctcacgagtttctaacacccaggaagatgaggtctaaaaactggatgaaaaaggacaccctgagaaaaggtcctagctggagtcagtcccctctgtgacctctctcctcaggcctctagaggacagatggccaggcctgtgcacacaccagcccaccctgagagacccctctgggaccaaccac

SEQ ID NO: 19956 - DNA, 4125 bp, Homo sapiens
  source 1..4125: mol_type = unassigned DNA
agggcatctggggaagccacaagcaccttggatgaccacggcccacgcacatgccccccttcccttctccaagcacggctgagtgtgaggggcaccacccatgccacaggggcagggacaggagcagagggcagccccagaccagccccttcctcctgcctgctctgcagcccccagggatggcgctgacagacgctggcaccagggaggacaccaccctcgggtgctcaagaacagaccgcccccggcgcgcctgccggagctgcgcctgctcaatgaccacagcgcccccgagacccccacccagccccccaggttctcggagcttgtggacggcagaggaagagtgagcgccaggttcggtggctcacccagcaaagcagccaccgtgagatcacgtgagtgccagggcctccccacccaccttggtggcccaccctcgtcctcactgccactctcaccaggtcctgtcccctacatgatgagcccacccccaccgccagcgcagtctccagccagtgacccccaccccgactgtgcacaaggcgcggggctcgtgggccgccggcagcatgcacctccatggcaggaggggcagctcgtgagggcctcacgtcagtgtgtgggctggaggcgcaggctgctggtagggcacgcaagagaagataaacattttagaagcaggtctgagacattacagcagctttatttgccaaagtagggctctgagctttgttttagtaaaccatgggcaggaggccatgagggtctaacccgccactccgagtgtggtccggcaaatcctccgccactgtcctggcaagatcttcccggtggcagcaaggctgatgggcccaggtgccttgggcccttcccaccgggtttactgggtgagtgccgctctgggaatctgcctgtgattctgacacagaagccctgagacatgttggcaggagtgaggcaggcgcgaccctgccccagaggggacctctctggcccttgcctctcacctggaaggccaggtggtcatcctcatggaactccccaacagagcctagtcaccagtttaatgaacacgctctgagcaaaaactcctcaggcagaggagggagggaaatgcagcaaggagagtggcaagcagggaccagagccctggggtccctgccgcacggtgagcaggggagagagcccccagcaaggtgtctgaggagagggcaggcagctgcccgggatgcccagtggtgggcaggtgagatctggagtacagaggggggcccgttgtacttgcagctatggaagcggatatgaagtgcccgagggtgcggttgagatccctgcataagaagtgatgcagttgggggcgagggcatgaggaaggtcagtacagactgagggcagctcagaaagagcagggggtgccacagcctccaagaagcaggggtggaaggagaggaatgcagaatttgaccctaagaagaaagcaaccgcatcagccgtgaggatggggcctctcagcatgatcagtggtggctgtccctgaagcagctctgagggggccctgcaaggggaaggccgagcccctccagagggtcagcaggagggtgaggccagcccttcaggggaggcagctctggggccgacaggtgctggggccacgcagggagcctggtccccaccagggacatccgtgctccctgagatatagaagcactcaaaagggtggccccaggaccatcccgggtgcaaagcagctgcgccgtgtggtcaccgcctggcttctcctagaacccacagcctcggcgcagctcgagaacatggaggaagcccccaagcgggtcagcctggccctccagctccctgaacacggcagcaaggacatcggaagtgagtcagcagcgctggtggggactttgggactgactgactgctctcaggggccttagaggctgcaggcaggagggaccacccacggtgaggaatcaggaggcacagagcctacctgaggggaggctgagcaccaggcaccccggtgtgggaagatggggtgaagctacaccacccaagcagtgggaccccacagacgggaacaggccagggggcaggacccacccaaaccacccagagtctgagctagagagactggctttgatgctgcctcccctcccctctcctccttcgcctccacatgcagcagagcccaccccagcccctgcctctgggcccctcacccctcacttctccaaagaggagcaggcggagtcaggatgggagaagcagagggagcagccactgggcgagccccagcttgaggactagctgggccctgtggacactcaggttatgcaggacctgaactgtctcctagtccggggctctgcctcgtgaggatcgaggccagcacgtccctgcagggcaccaagcatctgctgagcacctgcagtaagagttcccagacgctcacgaggcagttccccttcgggcagcaccaatacatgtgtgttcctcaccctgagtcagactctacctttctcctggttctaatcctttggggctgtgtcctctatggacagctctcctagcacccggtgacctgttctcccctgagtcataccatagactcagattgggatcacccctcaacccaaccccaaagaagtcctagtacttggtaaaggtgtgagctgctgagcgtggtctcacccgcaaggccttgcccccagcttctcaaggacatgtgtacacatcaagggcacctgcggtggggtgtgtttgcaagtggcggtttcgctgaaccctaagttcaccatcccccccccgccctcaccatacaaggtctggacttgctgctagcccctgtgagcaccaggaggactggtttgtgcatccgacgcagagagtgaaggattctcttaattcaggtgtggcccattcagagtgaagactctcgtgttgatctttaagtgaactaaaacaaacatttcatcagatgatttgcattatgtcagcccctttaaataccaggtgttcatttcctagaactcagagattggaggggcgtgtgttaccctcctgggtctcttcagcaggagagattcaagatgacccccgggctggccctgaggtcaccacggtcatgtggtgtttgccagcacgagatgctcatgccctggtgggtgcaaaatgattttaagtgataacatgaaaagtagactctttaatggcccctcgatgcgcaaagccagtcatgatctttggttcatgttgcactctcacgctagctaccttttatttagttattagcctttgaataatgactaaatcaagaacccaacctataaacttggatgtgaacgataccttctatcttgccatcatactccctgttctctcccctcagttaaccatgatcctgaactttgtgcctagaattcctttgttttttcagagtggaaggtgcggggagtgattctatggtacatatatgtatggcagaacaataagtgagttttctttgcaagataattatcttgccatgtgtgatcgttagacctgtgttttcactccgcattctcggactgaggttggcccatgcggtctgggcggctgcggcttattcacacctactattgagcacagagtccactgagtgaactgaccggctcttctcccctctctgtgcagagaacatgtaggttgtgtttggtatgagcagtgctgcagtggatgttcctgtacaggttttccagtacgtgtgcgggagtggaaaagctggatctaggatgaggatgtgtgaatgcccaaattacatgagaactaagtcattttctaagaggcgatagcagtctgcgctccctccagcagtgatgaagacatgcagtgaatccagtctctctagaactaggttttgccgggtttgcagatcctacaggcagaacgggtgggatgcacacccctgggatctgggtttgcatctcctgggcactgatgtgactgcgcctctcctcatgggcatccaccaaaggtgtttgcttctgtgaaatgcctgatcacgccttttgactttatgttgggttatttgtactctttttattcatttgtcaaaattcttatatgttttgatactga

SEQ ID NO: 19957 - DNA, 1930 bp, Homo sapiens
  source 1..1930: mol_type = unassigned DNA
gtggggctttgccagcaggcagtggaggtggcacgcctcccgaggaggggtgggtttggggctgatggaagaaaaagcacatgtcctgagtagttgctcccagctgggaaaggggtaactgaagccccaggaaatgcacggaatcctgggggcatgtgggcgcctcagacttgagccagcaacacccttgacaccccttctctgtgcagagagggatgagtgccgagctcacccgtgcagaaatggagggtcctgcaggaacctcccaggggcctatgtctgccggtgccctgcaggcttcgttggagtccactgtgagacagaggtggacgcctgcgactccagcccctgccagcatggaggccggtgtgagagcggcggcggggcctacctgtgcgtctgcccagagagcttcttcggctaccactgcgagacagtgagtgacccctgcttctccagcccctgtgggggccgtggctattgcctggccagcaacggctcccacagctgcacctgcaaagtgggctacacgggcgaggactgcgccaaagagctcttcccaccgacggccctcaagatggagagagtggaggagagtggggtctctatctcctggaacccgcccaatggtccagccgccaggcagatgcttgatggctacgcggtcacctacgtctcctccgacggctcctaccgccgcacagactttgtggacaggacccgctcctcgcaccagctccaggccctggcggccggcagggcctacaacatctccgtcttctcagtgaagcgaaacagtaacaacaagaatgacatcagcaggcctgccgtgctgctggcccgcacgcgaccccgccctgtggaaggcttcgaggtcaccaatgtgacggctagcaccatctcagtgcagtgggccctgcacaggatccgccatgccaccgtcagtggggtccgtgtgtccatccgccaccctgaggccctcagggaccaggccaccgatgtggacaggagtgtggacaggttcacctttagggccctgctgcctgggaagaggtacaccatccagctgaccaccctcagtgggctcaggggagaggagcaccccacagagagcctggccaccgcgccgacgcacgtgtggacccggcccctgcctccagcaaacctgaccgccgcccgagtcactgccacctctgcccacgtggtctgggatgccccgactccaggcagcttgctggaggcttatgtcatcaatgtgaccaccagccagagcaccaagagccgctatgtccccaacgggaagctggcgtcctacacggtgcgcgacctgctgccgggacggcggtaccagctctctgtgatagcagtgcagagcacggagctcgggccgcagcacagcgagcccgcccacctctacatcatcacctcccccagggatggcgctgacagacgctggcaccagggaggacaccaccctcgggtgctcaagaacagaccgcccccggcgcgcctgccggagctgcgcctgctcaatgaccacagcgcccccgagacccccacccagccccccaggttctcggagcttgtggacggcagaggaagagtgagcgccaggttcggtggctcacccagcaaagcagccaccgtgagatcacacgtccctggcaactgttcagaaaacccctgtcagaacggaggcacttgtgtgccgggcgcagacgcccacagctgtgactgcgggccagggttcaaaggcagacgctgcgagctcgcctgtataaaggtgtcccgcccctgcacaaggctgttctccgagacaaaggcctttccagtctgggagggaggcgtctgtcaccacgtgtataaaagagtctaccgagttcaccaagacatctgcttcaaagagagctgtgaaagcacaagcctcaag

SEQ ID NO: 19958 - DNA, 851 bp, Homo sapiens
  source 1..851: mol_type = unassigned DNA
ggagtgtgacatttctgcgagaatgcttaaataccgatttcccgcaggaacaatggcgctgtcttcagtggcacagtggagcagctctgaagatgcaaagatacacgaaaaaacttccagaacatctgggagaatatttaatggaaaatcgcttggttaaaacctgacacttttaacagtgagggtcgctgtctgcccattgatagaggccagattgtcttggaagttccaaagttgcaacgatttctttagttgaatccatggacatgaaacccacagatatagagggttggcccggtgcagtggctcacgcctgtaatcccagcactttgggaggccaaggcgggtggatcacctgaggtcagaagcttgagaccagcctggccaacatgggtactgctttctcttgctgcagcttgcttcctccctcaggtatgaagttaagctactcgggaggctgaggcaggagaatcgcttgaacccgggaggcggaggttgccatgagccgagattgcgccactacactccagcctgggcaacaaaagcgaaactccatctcaaaaaaaaaaaaaaggcatataaaattatagctgggtaggaggaataagttctagtgttctacaccactgtgggatgactatagttaacaataatacatactttcaggtaacatgaaggaggatattgaatgttcctaacacaaagaaatgataaatgtttgagatggtggatgtactaattgccctgatctgatgactatacattatatatattgaaacatcagtatgtaccccatgaatatgtacaattatatgtcaacttaaacacatttaaaagtaaaaaaaaaaaaa

SEQ ID NO: 19959 - DNA, 711 bp, Homo sapiens
  source 1..711: mol_type = unassigned DNA
ggagtgtgacatttctgcgagaatgcttaaataccgatttcccgcaggaacaatggcgctgtcttcagtggcacagtggagcagctctgaagatgcaaagatacacgaaaaaacttccagaacatctgggagaatatttaatggaaaatcgcttggttaaaacctgacacttttaacagtgaacagcgttctgagtgtggacgagtagccagtgaagataatgaatgtcgaatgtgactgactagcagcttcattttgaatgagggtcgctgtctgcccattgatagaggccagattgtcttggaagttccaaagttgcaacgatttctttagttgaatccatggacatgaaacccacagatatagagggttggcccggtgcagtggctcacgcctgtaatcccagcactttgggaggccaaggcgggtggatcacctgaggtcagaagcttgagaccagcctggccaacatgggtactgctttctcttgctgcagcttgcttcctccctcaggtatgaagttaaggtaacatgaaggaggatattgaatgttcctaacacaaagaaatgataaatgtttgagatggtggatgtactaattgccctgatctgatgactatacattatatatattgaaacatcagtatgtaccccatgaatatgtacaattatatgtcaacttaaacacatttaaaagtaaaaaaaaaaaaa

SEQ ID NO: 19960 - DNA, 568 bp, Homo sapiens
  source 1..568: mol_type = unassigned DNA
cttttacgtcggccttcgcgagcgtctgggcgggtggtaggaacaatggcgctgtcttcagtggcacagtggagcagctctgaagatgcaaagatacacgaaaaaacttccagaacatctgggagaatatttaatggaaaatcgcttggttaaaacctgacacttttaacagtgagggtcgctgtctgcccattgatagaggccagattgtcttggaagttccaaagttgcaacgatttctttagttgaatccatggacatgaaacccacagatatagagggttggcccggtgcagtggctcacgcctgtaatcccagcactttgggaggccaaggcgggtggatcacctgaggtcagaagcttgagaccagcctggccaacatgggtactgctttctcttgctgcagcttgcttcctccctcaggtaacatgaaggaggatattgaatgttcctaacacaaagaaatgataaatgtttgagatggtggatgtactaattgccctgatctgatgactatacattatatatattgaaacatcagtatgtaccccatgaatatgtacaat

SEQ ID NO: 19961 - DNA, 753 bp, Homo sapiens
  source 1..753: mol_type = unassigned DNA
ggtcttttacgtcggccttcgcgagcgtctgggcgggtggtaggaacaatggcgctgtcttcagtggcacagtggagcagctctgaagatgcaaagtgagggtcgctgtctgcccattgatagaggccagattgtcttggaagttccaaagttgcaacgatttctttagttgaatccatggacatgaaacccacagatatagagggttggcccggtgcagtggctcacgcctgtaatcccagcactttgggaggccaaggcgggtggatcacctgaggtcagaagcttgagaccagcctggccaacatggtaaaaccccatctctactaataatacaaaacaatttgctgggcatggtggtgcacgcttgtaatccaagctactccagaggctgaggcagaagaatcgcttgaatccgagaggcaaaggttgcagtgagcccagatcacaccactgctctccaacctgggcaacaagagcaaaactccgtcaaaaaaaaaagatacagggtcaactgtacacattaaacacttctatcaactagtgatgtcagtcttgtccattgtattattgcctatcttactaaacagtcatatttcaggaagtacaatatactcaaaaactaagttaatgttctttgtagatttatggttaatggatgattcatataatagaaacttaaatttatttgaccattctatttaatatagaataaatacaactagccaggcatggtggctcatgtctataatg

SEQ ID NO: 19962 - DNA, 886 bp, Homo sapiens
  source 1..886: mol_type = unassigned DNA
ggcggcggaaaaaccaccttaattggggcggagggttagttttaacagcaaagggcctttactaaaatggcgaaggccttccgtcggcgttgttttaaaatgggaagcctcgaccctgtattgaaactgagctgttcgaaggcggcgttgtgtgcaattcggattaatgaaggggaagggttttgtgtggaaaaacgccttggagtgtgacatttctgcgagaatgcttaaataccgatttcccgcaggaacaatggcgctgtcttcagtggcacagtggagcagctctgaagatgcaaagatacacgaaaaaacttccagaacatctgggagaatatttaatggaaaatcgcttggttaaaacctgacacttttaacagttagttgaatccatggacatgaaacccacagatatagagggttggcccggtgcagtggctcacgcctgtaatcccagcactttgggaggccaaggcgggtggatcacctgaggtcagaagcttgagaccagcctggccaacatggtaaaaccccatctctactaataatacaaaacaatttgctgggcatggtggtgcacgcttgtaatccaagctactccagaggctgaggcagaagaatcgcttgaatccgagaggcaaaggttgcagtgagcccagatcacaccactgctctccaacctgggcaacaagagcaaaactccgtcaaaaaaaaaagatacagggtcaactgtacacattaaacacttctatcaactagtgatgtcagtcttgtccattgtattattgcctatcttactaaacagtcatatttcaggaagtacaatatactcaaaaactaagttaatgttctttgtagatttatggttaatggatgattcatataa

SEQ ID NO: 19963 - DNA, 672 bp, Homo sapiens
  source 1..672: mol_type = unassigned DNA
cggaaaaaccaccttaattggggcggagggttagttttaacagcaaagggcctttactaaaatggcgaaggccttccgtcggcgttgttttaaaatgggaagcctcgaccctgtattgaaactgagctgttcgaaggcggcgttgtgtgcaattcggattaatgaaggggaagggttttgtgtggaaaaacgccttggagtgtgacatttctgcgagaatgcttaaataccgatttcccgcaggaacaatggcgctgtcttcagtggcacagtggagcagctctgaagatgcaaagttagttgaatccatggacatgaaacccacagatatagagggttggcccggtgcagtggctcacgcctgtaatcccagcactttgggaggccaaggcgggtggatcacctgaggtcagaagcttgagaccagcctggccaacatggtaaaaccccatctctactaataatacaaaacaatttgctgggcatggtggtgcacgcttgtaatccaagctactccagaggctgaggcagaagaatcgcttgaatccgagaggcaaaggttgcagtgagcccagatcacaccactgctctccaacctgggcaacaagagcaaaactccgtcaaaaaaaaaagatacagggtcaactgtacacattaaacacttctatcaac

SEQ ID NO: 19964 - DNA, 1029 bp, Homo sapiens
  source 1..1029: mol_type = unassigned DNA
cttcgcgagcgtctgggcgggtggtaggtgagtgggtattgcgggctagtatccgagcaaaagatggtggcgcaggccgagttaagagctttaatcctgtgaagacatcttagtgaagagtttagagtgctgagagttgaaagcttgcacgtgggaaacgtgcggccggactgccacatgtactgaggttgagtcgtgacggccacaggctccgagttttggcgtgaggaaccgctgatcggccacgggcgccgaacttgctggcctccggcatgtgcctgagcggcggcggaaaaaccaccttaattggggcggagggttagttttaacagcaaagggcctttactaaaatggcgaaggccttccgtcggcgttgttttaaaatgggaagcctcgaccctgtattgaaactgagctgttcgaaggcggcgttgtgtgcaattcggattaatgaaggggaagggttttgtgtggaaaaacgccttggagtgtgacatttctgcgagaatgcttaaataccgatttcccgcaggaacaatggcgctgtcttcagtggcacagtggagcagctctgaagatgcaaagatacacgaaaaaacttccagaacatctgggagaatatttaatggaaaatcgcttggttaaaacctgacacttttaacagtgagggtcgctgtctgcccattgatagaggccagattgtcttggaagttccaaagttgcaacgatttctttagttgaatccatggacatgaaacccacagatatagagggttggcccggtgcagtggctcacgcctgtaatcccagcactttgggaggccaaggcgggtggatcacctgaggtcagaagcttgagaccagcctggccaacatggtaaaaccccatctctactaataatacaaaacaatttgctgggcatggtggtgcacgcttgtaatccaagctactccagaggctgaggcagaagaatcgcttgaatccgagaggcaaaggttgcagtgagcccagatcacaccactgctctc

SEQ ID NO: 19965 - DNA, 1032 bp, Homo sapiens
  source 1..1032: mol_type = unassigned DNA
ggtcttttacgtcggccttcgcgagcgtctgggcgggtggtaggtgagtgggtattgcgggctagtatccgagcaaaagatggtggcgcaggccgagttaagagctttaatcctgtgaagacatcttagtgaagagtttagagtgctgagagttgaaagcttgcacgtgggaaacgtgcggccggactgccacatgtactgaggttgagtcgtgacggccacaggctccgagttttggcgtgaggaaccgctgatcggccacgggcgccgaacttgctggcctccggcatgtgcctgagcggcggcggaaaaaccaccttaattggggcggagggttagttttaacagcaaagggcctttactaaaatggcgaaggccttccgtcggcgttgttttaaaatgggaagcctcgaccctgtattgaaactgagctgttcgaaggcggcgttgtgtgcaattcggattaatgaaggggaagggttttgtgtggaaaaacgccttggagtgtgacatttctgcgagaatgcttaaataccgatttcccgcaggaacaatggcgctgtcttcagtggcacagtggagcagctctgaagatgcaaagatacacgaaaaaacttccagaacatctgggagaatatttaatggaaaatcgcttggttaaaacctgacacttttaacagtgaacagcgttctgagtgtggacgagtagccagtgaagataatgaatgtcgaatgtgactgactagcagcttcattttgaatgagggtcgctgtctgcccattgatagaggccagattgtcttggaagttccaaagttgcaacgatttctggctagtgccacgaggtttacttgactgttgtgtgaaaagctgataagaaaaccatccagaaaaaagctcttcgttttacaaacatgaaaataaaacatgtaattttggattatgttcctttttgttattacttttaaataggtcctgaaataacatggggagcattaaatggaaaatccactaaccagccttgtaatcaaa

SEQ ID NO: 19966 - DNA, 680 bp, Homo sapiens
  source 1..680: mol_type = unassigned DNA
aatggaaaatcgcttggttaaaacctgacacttttaacaggtatgtgttgttttagtactttatgattgagcatagcatttaatccacacctagactaaatcaaattttttttgtcagtgaacagcgttctgagtgtggacgagtagccagtgaagataatgaatgtcgaatgtgactgactagcagcttcattttgaagtaggttgtatggcttaaaagttctgtagtatttgtactataatacttgccttttagcattaccttggtttgtagtcagtgtcacagaagtgcagtttaatgtattatgtgtacatatacaaggtctgattggtctaatcaatgatgaaacctatcccgaagctgataacctgaagaaaaataagtacggattcggcttctgagattaagaccagtaattcagaggtggagtaaattttgttgccgtgattttataacagttgtgttataaaatcctgggttttttttttttctgccaacagtgagggtcgctgtctgcccattgatagaggccagattgtcttggaagttccaaagttgcaacgatttctggctagtgccacgaggtttacttgactgttgtgtgaaaagctgataagaaaaccatccagaaaaaagctcttcgttttacaaacatgaaaataaaacatgtaattttgga

SEQ ID NO: 19967 - DNA, 696 bp, Homo sapiens
  source 1..696: mol_type = unassigned DNA
ggcgcaggccgagttaagagctttaatcctgtgaagacatcttagtgaagagtttagagtgctgagagttgaaagcttgcacgtgggaaacgtgcggccggactgccacatgtactgaggttgagtcgtgacggccacaggctccgagttttggcgtgaggaaccgctgatcggccacgggcgccgaacttgctggcctccggcatgtgcctgagcggcggcggaaaaaccaccttaattggggcggagggttagttttaacagcaaagggcctttactaaaatggcgaaggccttccgtcggcgttgttttaaaatgggaagcctcgaccctgtattgaaactgagctgttcgaaggcggcgttgtgtgcaattcggattaatgaaggggaagggttttgtgtggaaaaacgccttggagtgtgacatttctgcgagaatgcttaaataccgatttcccgcaggaacaatggcgctgtcttcagtggcacagtggagcagctctgaagatgcaaagtgagggtcgctgtctgcccattgatagaggccagattgtcttggaagttccaaagttgcaacgatttctggctagtgccacgaggtttacttgactgttgtgtgaaaagctgataagaaaaccatccagaaaaaagctcttcgttttacaaacatgaaaataaaacatgtaattttgga

SEQ ID NO: 19968 - DNA, 632 bp, Homo sapiens
  source 1..632: mol_type = unassigned DNA
agggttagttttaacagcaaagggcctttactaaaatggcgaaggccttccgtcggcgttgttttaaaatgggaagcctcgaccctgtattgaaactgagctgttcgaaggcggcgttgtgtgcaattcggattaatgaaggggaagggttttgtgtggaaaaacgccttggagtgtgacatttctgcgagaatgcttaaataccgatttcccgcaggaacaatggcgctgtcttcagtggcacagtggagcagctctgaagatgcaaagatacacgaaaaaacttccagaacatctgggagaatatttaatggaaaatcgcttggttaaaacctgacacttttaacagactaaatcaaattttttttgtcagtgaacagcgttctgagtgtggacgagtagccagtgaagataatgaatgtcgaatgtgactgactagcagcttcattttgaatgagggtcgctgtctgcccattgatagaggccagattgtcttggaagttccaaagttgcaacgatttctggctagtgccacgaggtttacttgactgttgtgtgaaaagctgataagaaaaccatccagaaaaaagctcttcgttttacaaacatgaaaataaaacatgtaattttgg

SEQ ID NO: 19969 - DNA, 257 bp, Homo sapiens
  source 1..257: mol_type = unassigned DNA
ataccgatttcccgcaggaacaatggcgctgtcttcagtggcacagtggagcagctctgaagatgcaaagatacacgaaaaaacttccagaacatctgggagaatatttaatggaaaatcgcttggttaaaacctgacacttttaacagggctagtgccacgaggtttacttgactgttgtgtgaaaagctgataagaaaaccatccagaaaaaagctcttcgttttacaaacatgaaaataaaacatgtaattttg

SEQ ID NO: 19970 - DNA, 631 bp, Homo sapiens
  source 1..631: mol_type = unassigned DNA
ggcggcggaaaaaccaccttaattggggcggagggttagttttaacagcaaagggcctttactaaaatggcgaaggccttccgtcggcgttgttttaaaatgggaagcctcgaccctgtattgaaactgagctgttcgaaggcggcgttgtgtgcaattcggattaatgaaggggaagggttttgtgtggaaaaacgccttggagtgtgacatttctgcgagaatgcttaaataccgatttcccgcaggaacaatggcgctgtcttcagtggcacagtggagcagctctgaagatgcaaagatacacgaaaaaacttccagaacatctgggagaatatttaatggaaaatcgcttggttaaaacctgacacttttaacagcgttctgagtgtggacgagtagccagtgaagataatgaatgtcgaatgtgactgactagcagcttcattttgaatgagggtcgctgtctgcccattgatagaggccagattgtcttggaagttccaaagttgcaacgatttctggctagtgccacgaggtttacttgactgttgtgtgaaaagctgataagaaaaccatccagaaaaaagctcttcgttttacaaacatgaaaataaaacatgtaattttg

SEQ ID NO: 19971 - DNA, 641 bp, Homo sapiens
  source 1..641: mol_type = unassigned DNA
ggccacaggctccgagttttggcgtgaggaaccgctgatcggccacgggcgccgaacttgctggcctccggcatgtgcctgagcggcggcggaaaaaccaccttaattggggcggagggttagttttaacagcaaagggcctttactaaaatggcgaaggccttccgtcggcgttgttttaaaatgggaagcctcgaccctgtattgaaactgagctgttcgaaggcggcgttgtgtgcaattcggattaatgaaggggaagggttttgtgtggaaaaacgccttggagtgtgacatttctgcgagaatgcttaaataccgatttcccgcaggaacaatggcgctgtcttcagtggcacagtggagcagctctgaagatgcaaagatacacgaaaaaacttccagaacatctgggagaatatttaatggaaaatcgcttggttaaaacctgacacttttaacagtgagggtcgctgtctgcccattgatagaggccagattgtcttggaagttccaaagttgcaacgatttctggctagtgccacgaggtttacttgactgttgtgtgaaaagctgataagaaaaccatccagaaaaaagctcttcgttttacaaacatgaaaataaaacatgtaattttg

SEQ ID NO: 19972 - DNA, 401 bp, Homo sapiens
  source 1..401: mol_type = unassigned DNA
cacgtgggaaacgtgcggccggactgccacatgtactgaggttgagtcgtgacggccacaggctccgagttttggcgtgaggaaccgctgatcggccacgggcgccgaacttgctggcctccggcatgtgcctgagcggcggcggaaaaaccaccttaattggggcggagggaacaatggcgctgtcttcagtggcacagtggagcagctctgaagatgcaaagtgagggtcgctgtctgcccattgatagaggccagattgtcttggaagttccaaagttgcaacgatttctggctagtgccacgaggtttacttgactgttgtgtgaaaagctgataagaaaaccatccagaaaaaagctcttcgttttacaaacatgaaaataaaacatgtaattttg

SEQ ID NO: 19973 - DNA, 1002 bp, Homo sapiens
  source 1..1002: mol_type = unassigned DNA
gccttcgcgagcgtctgggcgggtggtaggtgagtgggtattgcgggctagtatccgagcaaaagatggtggcgcaggccgagttaagagctttaatcctgtgaagacatcttagtgaagagtttagagtgctgagagttgaaagcttgcacgtgggaaacgtgcggccggactgccacatgtactgaggttgagtcgtgacggccacaggctccgagttttggcgtgaggaaccgctgatcggccacgggcgccgaacttgctggcctccggcatgtgcctgagcggcggcggaaaaaccaccttaattggggcggagggttagttttaacagcaaagggcctttactaaaatggcgaaggccttccgtcggcgttgttttaaaatgggaagcctcgaccctgtattgaaactgagctgttcgaaggcggcgttgtgtgcaattcggattaatgaaggggaagggttttgtgtggaaaaacgccttggagtgtgacatttctgcgagaatgcttaaataccgatttcccgcaggaacaatggcgctgtcttcagtggcacagtggagcagctctgaagatgcaaagatacacgaaaaaacttccagaacatctgggagaatatttaatggaaaatcgcttggttaaaacctgacacttttaacaggtatgtgttgttttagtactttatgattgagcatagcatttaatccacacctagactaaatcaaattttttttgtcagtgaacagcgttctgagtgtggacgagtagccagtgaagataatgaatgtcgaatgtgactgactagcagcttcattttgaatgagggtcgctgtctgcccattgatagaggccagattgtcttggaagttccaaagttgcaacgatttctggctagtgccacgaggtttacttgactgttgtgtgaaaagctgataagaaaaccatccagaaaaaagctcttcgttttacaaacatgaaaataaaacatgtaattttg

SEQ ID NO: 19974 - DNA, 430 bp, Homo sapiens
  source 1..430: mol_type = unassigned DNA
cttttacgtcggccttcgcgagcgtctgggcgggtggtaggaacaatggcgctgtcttcagtggcacagtggagcagctctgaagatgcaaagatacacgaaaaaacttccagaacatctgggagaatatttaatggaaaatcgcttggttaaaacctgacacttttaacagtgaacagcgttctgagtgtggacgagtagccagtgaagataatgaatgtcgaatgtgactgactagcagcttcattttgaatgagggtcgctgtctgcccattgatagaggccagattgtcttggaagttccaaagttgcaacgatttctggctagtgccacgaggtttacttgactgttgtgtgaaaagctgataagaaaaccatccagaaaaaagctcttcgttttacaaacatgaaaataaaacatgtaattttg

SEQ ID NO: 19975 - DNA, 374 bp, Homo sapiens
  source 1..374: mol_type = unassigned DNA
tggggcggagggttagttttaacagcaaagggcctttactaaaatggcgaaggccttccgtcggcgttgttttaaaatgggaagcctcgaccctgtattgaaactgagctgttcgaaggcggcgttgtgtgcaattcggattaatgaaggggaagggttttgtgtggaaaaacgccttggagtgtgacatttctgcgagaatgcttaaataccgatttcccgcaggaacaatggcgctgtcttcagtggcacagtggagcagctctgaagatgcaaagggctagtgccacgaggtttacttgactgttgtgtgaaaagctgataagaaaaccatccagaaaaaagctcttcgttttacaaacatgaaaataaaa

SEQ ID NO: 19976 - DNA, 598 bp, Homo sapiens
  source 1..598: mol_type = unassigned DNA
tggggcggagggttagttttaacagcaaagggcctttactaaaatggcgaaggccttccgtcggcgttgttttaaaatgggaagcctcgaccctgtattgaaactgagctgttcgaaggcggcgttgtgtgcaattcggattaatgaaggggaagggttttgtgtggaaaaacgccttggagtgtgacatttctgcgagaatgcttaaataccgatttcccgcaggaacaatggcgctgtcttcagtggcacagtggagcagctctgaagatgcaaagatacacgaaaaaacttccagaacatctgggagaatatttaatggaaaatcgcttggttaaaacctgacacttttaacagtgaacagcgttctgagtgtggacgagtagccagtgaagataatgaatgtcgaatgtgactgactagcagcttcattttgaagtagtgagggtcgctgtctgcccattgatagaggccagattgtcttggaagttccaaagttgcaacgatttctggctagtgccacgaggtttacttgactgttgtgtgaaaagctgataagaaaaccatccagaaaaaagctcttcgttttacaaacatg

SEQ ID NO: 19977 - DNA, 998 bp, Homo sapiens
  source 1..998: mol_type = unassigned DNA
cttttacgtcggccttcgcgagcgtctgggcgggtggtaggaacaatggcgctgtcttcagtggcacagtggagcagctctgaagatgcaaagatacacgaaaaaacttccagaacatctgggagaatatttaatggaaaatcgcttggttaaaacctgacacttttaacaggtatgtgttgttttagtactttatgattgagcatagcatttaatccacacctagactaaatcaaattttttttgtcagtgaacagcgttctgagtgtggacgagtagccagtgaagataatgaatgtcgaatgtgactgactagcagcttcattttgaagtaggttgtatggcttaaaagttctgtagtatttgtactataatacttgccttttagcattaccttggtttgtagtcagtgtcacagaagtgcagtttaatgtattatgtgtacatatacaaggtctgattggtctaatcaatgatgaaacctatcccgaagctgataacctgaagaaaaataagtacggattcggcttctgagattaagaccagtaattcagaggtggagtaaattttgttgccgtgattttataacagttgtgttataaaatcctgggttttttttttttctgccaacagtgagggtcgctgtctgcccattgatagaggccagattgtcttggaagttccaaagttgcaacgatttctgtaagtggagtttttctgtttgcttagagatcagtgaatattgtgtccttggtcttatctgtgatgatcttatcccgaacctgaacttctgttgaaaaaaaaaaacttttacggatctggcttctgagatggaccgttataaggacaatatttttttttaatacttttaatgcttttacatatgttgtaatgtttgtagtcttgtaagaatctcgtgtttttccttttctagggctagtgccacgaggtttacttgactgttgtgtgaaaagctgataagaaaaccatccagaaaa

SEQ ID NO: 19978 - DNA, 388 bp, Homo sapiens
  source 1..388: mol_type = unassigned DNA
atttcccgcaggaacaatggcgctgtcttcagtggcacagtggagcagctctgaagatgcaaagatacacgaaaaaacttccagaacatctgggagaatatttaatggaaaatcgcttggttaaaacctgacacttttaacagtgaacagcgttctgagtgtggacgagtagccagtgaagataatgaatgtcgaatgtgactgactagcagcttcattttgaatgagggtcgctgtctgcccattgatagaggccagattgtcttggaagttccaaagttgcaacgatttctgtaagtggagtttttctgtttgcttagagatcagtgaatattgtgtccttggtcttatctgtgatgatcttatcccgaacctgaacttctgttga

SEQ ID NO: 19979 - DNA, 489 bp, Homo sapiens
  source 1..489: mol_type = unassigned DNA
gggttttgtgtggaaaaacgccttggagtgtgacatttctgcgagaatgcttaaataccgatttcccgcaggaacaatggcgctgtcttcagtggcacagtggagcagctctgaagatgcaaaggtaagagcttagttaagcttagtttccaaactaaaggagtaaacctgttgatttacaggaataggaactgttgcatcgtttgaaatttacttttttttgttagatacacgaaaaaacttccagaacatctgggagaatatttaatggaaaatcgcttggttaaaacctgacacttttaacaggtatgtgttgttttagtactttatgattgagcatagcatttaatccacacctagactaaatcaaattttttttgtcagtgaacagcgttctgagtgtggacgagtagccagtgaagataatgaatgtcgaatgtgactgactagcagcttcattttgaatgagggtcgctgtctgcccattga

SEQ ID NO: 19980 - DNA, 5164 bp, Homo sapiens
  source 1..5164: mol_type = unassigned DNA
gtgttgtgtttggagagagggtagacagcagtgggaaggggacgtaactgagaagcatgaaacaccttgagtggaccatgagacctgcttagagttaggggaaagcttgagaggttcaaggatagaagaactcagggtggttcaggtgtgacatgggttatgtgggcatttctggattgctctgggaaggttgctccaccccggtcaggatcaggcgagggggaaccagcctgagtgcagctgccaactcccgccgagtgcgtctgcgaactcccggagcggagtcccgcgtgccgccacctccccgcgggacgcactctcctcgctcccccgggccccgcgtcctccccccggccacccttccccacttttccccccttttccaatcacatggcattttaagaatgccggaaagatggcggtagcggcggcggcggcggcggctgggccggctggcgcgggaggcggccgggcgcagcggagcgggctgctggaagttttggtgcgggatcgctggcacaaagttctggtgaacttgagcgaggacgccctggttctgagcagcgaggagggcgctgcggcgtacaacggcatcgggaccgccaccaatggctcgttctgcaggggcgccggggctgggcacccgggcgcgggcggcgcgcagcccccggactcgcccgccggggtccgcaccgctttcaccgacctgcccgagcaggtgcccgagtccatctcgaaccagaagcgtggcgtgaaggtgctgaagcaggagctgggcgggctggggatcagcatcaaggggggcaaggagaacaagatgcccatcctcatcagcaagatcttcaaggggctggcggcggaccagacccaagccctgtacgtgggcgacgccatcctgtccgtgaacggagccgacctgcgggacgccacccacgacgaggcggtgcaggcgttgaagcgcgcgggcaaggaagtgctgctggaagtgaagtacatgcgagaagccacgccctatgtgaagaaaggatccccagtatccgagattgggtgggaaacacctccgcctgaatcccctcggttagggggcagcacctcagaccccccgtcatcgcagtccttctccttccacagagaccggaaaagcatccccctcaaaatgtgctacgtcactcggagtatggccttggccgaccctgagaacaggcagcttgaaatccactctccagatgctaagcacacggtgatcctaaggagcaaggactcagccacggcccaggcatggttcagtgccatccattccaacgttaatgacctgctgacccgagtgattgctgaggtcagagagcagctggggaaaacaggcattgctgggagccgagagattaggcatcttggctggcttgcagaaaaggtgccaggggagagcaagaaacagtggaaaccagccctggttgtgctgactgagaaagaccttttaatctatgacagcatgccacggaggaaggaagcctggttcagcccagttcacacataccctcttcttgccaccaggctggtccattcaggtccaggaaagggatcaccccaggctggtgtggatctgtcctttgcaacgcgaactggtaccaggcaagggattgaaacacatctcttcagagcagagaccagcagggacctctcccactggacaaggagcatagtacagggttgccacaattctgctgaactcattgctgaaatcagcactgcttgcacctacaaaaaccaggagtgccgtttgaccatacattatgagaatggattttctattaccactgaaccacaggagggtgcctttcccaagaccatcatacagtctccttatgaaaagctcaaaatgtcttcagatgatggaatcaggatgctgtatttagattttggaggcaaagatggagagattcaactggaccttcattcctgccccaagccaattgttttcatcattcattccttcctgtcagctaagattacaagactgggcttggtggcctgaagacaggggtgacttgcctttgagaaaagaagggctgcaatgccaccagagaacgtgatgtcagacaccatctgtagtgagcagcgcaccagatgtagcgtgctacagtcagctttagctctcaagagtcgtatgtaactgtcccagactcctctgtcagtttcagcaactacaagggataccctgcgaaagtaccatgagaaatatcagagtaaaactttctagaacagtacaaggttaaagaggtgaggtgacgggaaatacacagcatagctttgaaataatgacaaccaaggacatgaccattagaacagcatgtgcagatcttaatcatcccagttcctaggcaacttgttcaccaggtacgcaagggccgaatagttgagaaatggacattcttacctactcctcctagccccctatccccagtaacagtgatcccttttcttattgtgatttatttcctaattcttgctgagttgactttcccttgtaggaaaagaaaaatatttcaaatagaaacccaccttttatttaagtatgaagcagctgttactttttaaaaaatgaattatctttcaatggtgtagaatgattccaaagtgtctccattagcatatactgagcaggaattaaataaagcatcagatactgatctgagctgtaagctggtagaatctgagccaaagtagactgcttaaattgataagctttgctaaagagttgtatgcacaaaggatgattaattctgggactatactcacaccaaggtctgctgtcttatagccaagaattacagctttatttatagagagtgaattatgggtattttttcagaaaatattgtcatctgatatacacataaaacaactcacattgttggagttaactaattatccccatttcatggttttcagtggcaacttactgacccttgtttttgcctgtgcttgtatgcatgcattttcaagcaagtaataaagcagcctcatttaattctggataatgctgggttttacatatagactgaatgctataatcaaatctattgacagtatctgcagttctttcagaattccagggaaataatataacgacctgatatctttctacaggaatattttcagacattatatagcacattactgatttaatgcttttacttttatctttcaaaacaaattcactaaaaataacacctattgattttgaagtcacttttctcaaaccttgaaaatgagctctaggatctctataaacatttctaacacttttcctgtagtttacatagacagacatctgttgttagacctgtgtgtttttaaagaatcatatgttaacaaatacccatgcaaagagcttcaaaaagtgaaaccgtgttaaaggaacacaatttttctcactcagacatatttgtttattgaattgcaaagttttattttaaatcagcatttccccaaagaatatatcatatgacgctagttccaaggggcttgactgagtggtgttttgctggggggagacaggggtttgttaatacactttactaaatactgagctgaaaaatgttaaatagatttcacgattgcctccttgaagattttaaagttcattgtggttcttcaaggcgaaatccggtgaaccattcctcacacttacctacaggactcttttctaatggagcatcttgtgaagctagtgggtttttttgttgttgttatttgttttttttttttaatgctttagaaaacacagctttaggatattgactttttgtttatttctattttcaaatgctgaaaagtcaagtcccagtttgaataccatagaaaagctttgatgcatttgtaaattatattgcactctttcactatatattttcaaaatcactggaatgttgttatacaagagaattataattgtgtattgtaaataacatattaaaatacatatattaatgccaatagttaaattcaacaatatgtaatctaaggtgctcggttctacatgaagtatgagttaactgctcataattaagttgccaagattctattatatatttatagacaaattaaaatgatcataattacaaatatgatttctttatcacttaagctttgggctgattaatatctgtgtgggggtcaatggaaactacattctctacatttataaacatttaatttaattatttatattttaggaaaatatatttgaataaaattaatgcattttctagagtaaattaaaatgttattagcaagaaatagaaaatttgactaagataattgtgtatatgaatcatttttcccccaagttaaaatgtatcataatagagaggctctaatgaatcaatttccaatactcatttctttcttattttgaattcaagttacaatgactttacactgtagattttaatcttgtctgatgtgtgctggtgtgtatgacacaaactcataagtctggatcatgcttgggtacagtcaatgaatcaaccgagtcactttgaggaatttgtttttgtccaatttgctctgtgctcaatcccatgaattattaaatttacaatgtttgtccccaaatgaaaaccaatataaatgaatgatgttttaatctgtactttatgggaagttgcctatttgtcagtagatgtggttaagtgagtcctctggtgcagtgacatccttttaagccatctcatagggatttaaagaaggccaataggaatatagatattggtttttctttctctgacttgaactaagtaggagaaaccaaaccataaacctattacaaactacccaggcagaggcatttacttaattcatcaactagtgcaattaaaaccctgaaaacacatgatccttgttgactctgcttggttgaagcaggaaagaatggtcttgatggtcagaaagttttaaaattaatgggcagggcctttctggaccctgttttccaaacacgttagatattccgtcttgaggggattggagtaggctacagtgagggggtaatttttggatgtatctggacttttaaaaaatgtgcctatatttatagcaccatgaatattatgtaaaatttatatatgaattaaataaatattcacctctgatttccagtgca

SEQ ID NO: 19981 - DNA, 2273 bp, Homo sapiens
  source 1..2273: mol_type = unassigned DNA
cttgctttggggttttgcaactggctgctggcttttttcccctcccctgtctcggtctctccttcttcttttaggttgctccaccccggtcaggatcaggcgagggggaaccagcctgagtgcagctgccaactcccgccgagtgcgtctgcgaactcccggagcggagtcccgcgtgccgccacctccccgcgggacgcactctcctcgctcccccgggccccgcgtcctccccccggccacccttccccacttttccccccttttccaatcacatggcattttaagaatgccggaaagatggcggtagcggcggcggcggcggcggctgggccggctggcgcgggaggcggccgggcgcagcggagcgggctgctggaagttttggtgcgggatcgctggcacaaagttctggtgaacttgagcgaggacgccctggttctgagcagcgaggagggcgctgcggcgtacaacggcatcgggaccgccaccaatggctcgttctgcaggggcgccggggctgggcacccgggcgcgggcggcgcgcagcccccggactcgcccgccggggtccgcaccgctttcaccgacctgcccgagcaggtgcccgagtccatctcgaaccagaagcgtggcgtgaaggtgctgaagcaggagctgggcgggctggggatcagcatcaaggggggcaaggagaacaagatgcccatcctcatcagcaagatcttcaaggggctggcggcggaccagacccaagccctgtacgtgggcgacgccatcctgtccgtgaacggagccgacctgcgggacgccacccacgacgaggcggtgcaggcgttgaagcgcgcgggcaaggaagtgctgctggaagtgaagtacatgcgagaagccacgccctatgtgaagaaaggatccccagtatccgagattgggtgggaaacacctccgcctgaatcccctcggttagggggcagcacctcagaccccccgtcatcgcagtccttctccttccacagagaccggaaaagcatccccctcaaaatgtgctacgtcactcggagtatggccttggccgaccctgagaacaggcagcttgaaatccactctccagatgctaagcacacggtgatcctaaggagcaaggactcagccacggcccaggcatggttcagtgccatccattccaacgttaatgacctgctgacccgagtgattgctgaggtcagagagcagctggggaaaacaggcattgctgggagccgagagattaggcatcttggctggcttgcagaaaaggtgccaggggagagcaagaaacagtggaaaccagccctggttgtgctgactgagaaagaccttttaatctatgacagcatgccacggaggaaggaagcctggttcagcccagttcacacataccctcttcttgccaccaggctggtccattcaggtccaggaaagggatcaccccaggctggtgtggatctgtcctttgcaacgcgaactggtaccaggcaagggattgaaacacatctcttcagagcagagaccagcagggacctctcccactggacaaggagcatagtacagggttgccacaattctgctgaactcattgctgaaatcagcactgcttgcacctacaaaaaccaggagtgccgtttgaccatacattatgagaatggattttctattaccactgaaccacaggagggtgcctttcccaagaccatcatacagtctccttatgaaaagctcaaaatgtcttcagatgatggaatcaggatgctgtatttagattttggaggcaaagatggagagattcaactggaccttcattcctgccccaagccaattgttttcatcattcattccttcctgtcagctaagattacaagactgggcttggtggcctgaagacaggggtgacttgcctttgagaaaagaagggctgcaatgccaccagagaacgtgatgtcagacaccatctgtagtgagcagcgcaccagatgtagcgtgctacagtcagctttagctctcaagagtcgtatgtaactgtcccagactcctctgtcagtttcagcaactacaagggataccctgcgaaagtaccatgagaaatatcagagtaaaactttctagaacagtacaaggttaaagaggtgaggtgacgggaaatacacagcatagctttgaaataatgacaaccaaggacatgaccattagaacagcatgtgcagatcttaatcatcccagttcctaggcaacttgtt

SEQ ID NO: 19982 - DNA, 1962 bp, Homo sapiens
  source 1..1962: mol_type = unassigned DNA
ctttcaccgacctgcccgagcaggtgcccgagtccatctcgaaccagaagcgtggcgtgaaggtgctgaagcaggagctgggcgggctggggatcagcatcaaggggggcaaggagaacaagatgcccatcctcatcagcaagatcttcaaggggctggcggcggaccagacccaagccctgtacgtgggcgacgccatcctgtccgtgaacggagccgacctgcgggacgccacccacgacgaggcggtgcaggcgttgaagcgcgcgggcaaggaagtgctgctggaagtgaagtacatgcgagaagccacgccctatgtgaagaaaggatccccagtatccgagattgggtgggaaacacctccgcctgaatcccctcggttagggggcagcacctcagaccccccgtcatcgcagtccttctccttccacagagaccggaaaagcatccccctcaaaatgtgctacgtcactcggagtatggccttggccgaccctgagaacaggcagcttgaaatccactctccagatgctaagcacacggtgatcctaaggagcaaggactcagccacggcccaggcatggttcagtgccatccattccaacgttaatgacctgctgacccgagtgattgctgaggtcagagagcagctggggaaaacaggcattgctgggagccgagagattaggcatcttggctggcttgcagaaaaggtgccaggggagagcaagaaacagtggaaaccagccctggttgtgctgactgagaaagaccttttaatctatgacagcatgccacggaggaaggaagcctggttcagcccagttcacacataccctcttcttgccaccagtcctcatccgtgaacattatcttcagattctgagacattcccgcaacagaaaccaaagaaagattagaccacagtcactggattccagttactaagaagcaaagttggacccaagcatcttgaaatgattctcagaaacaaaagttgaaataaggtagtttctgcaactctcaggcaacatgaaaataaaatttaccctcgtacatagccttgttctcacagtttctgggcattatgaacaatggggactgctttttcattcattcattcattcatcagtcaacatttataaatcatctactatgtgccaggagttataattgggacaagggataaagaggtgaaaaaaattcaaacttgtgaacctagcattatctggaacaaagtgtgttgatgtgcaggaacacataaggaaccatttgcagtaaagacaacaaaaaatgccaaactctgcctggacagtggtggaggactccttgcagtagaagtcatgttgaattgaagcctgagggaaaactcaccagaggaacaagggaagggagcccagagaggggcatgagcattccagacttagggaagatccaagcacagagctcgtgcactgctgcatggcccagttagagcaccacatacggccctggggaatgaggggaaatgaatcagatactcactaagtacccagcacttgacacaagttaccacttacaacgtgtgtatccattctgcaaggccggtattagtgtgcccattttgcagattaggtacctgaggctcaaaagagttcaggaatcaccccaggtggtgtagcttctgagagatggaggtgggattccagttccgggactgtgtgtcacttgcatacctgtgccttggtaccacagggggttgacacagaggtgggagatggggaggaagacttttcactagcgtatccttttctaccttttgaaattggaaccatggggaacagcaggagtctttggggatgataagagtcatggatgtgatctgggtagatatttttatatttggtgtcaaataacaaatgtccaaggagtgactgctgaatccaattttgcagtgatcctgattccattgtaaagaaa

SEQ ID NO: 19983 - DNA, 414 bp, Homo sapiens
  source 1..414: mol_type = unassigned DNA
tgaagtacatgcgagaagccacgccctatgtgaagaaaggatccccagtatccgagattgggtgggaaacacctccgcctgaatcccctcggttagggggcagcacctcagaccccccgtcatcgcagtccttctccttccacagagaccggaaaagcatccccctcaaaatgtgctacgtcactcggagtatggccttggccgaccctgagaacagccataggaatcacagatttgaggaactgaaggcgaccataatgaccatgtggtttgaattctcctggattccccgaagttgctgcaagccagcaagacttcatcctcctgactagtttcatctgtgttttctccagagtcacttggaggggaaaggcagcttgaaatccactctccagatgctaagcacacggtgat

SEQ ID NO: 19984 - DNA, 559 bp, Homo sapiens
  source 1..559: mol_type = unassigned DNA
aacatttgtccctggggtctgaggcaggcatgacctgttgaaaaccccaggccagcagagacacctgtccagggctcgatagaaaacatttcttgcatttaaggacaggaggtttaagccactcgggctacgttgactcttcattctagaatcttgggacagcgtattcccttttaactcctggggagcccagggccttggtctgagtttagcttcctccagggaacccgggtggaaaggagagacaggttgctccaccccggtcaggatcaggcgagggggaaccagcctgagtgcagctgccaactcccgccgagtgcgtctgcgaactcccggagcggagtcccgcgtgccgccacctccccgcgggacgcactctcctcgctcccccgggccccgcgtcctccccccggccacccttccccacttttccccccttttccaatcacatggcattttaagaatgccggaaagatggcggtagcggcggcggcggcggcggctgggccggctggcgcgggaggcggccgggcgcagcggagcgggctgctggaagttt

SEQ ID NO: 19985 - DNA, 3713 bp, Homo sapiens
  source 1..3713: mol_type = unassigned DNA
ccgctccgggagagttagggctccgagccgagcgcgcggagcagctggggccggggcgcggatgctggaagttcacatcccgtcggtggggcccgaggccgaggggcccaggcagagcccggagaaaagccacatgatcaagaagctgtacaaagtgcccgacttcccctcgaaacgcctgcccaactggaggaccagagggttggaacagcgccggcagggcttggaggcttacatccagggcatcctgtacctgaaccaggaggtgcccaaggagttactggaattcctgagacttcggcacttccccacagaccccaaggctagcaactggggcaccctgagggagttcctgcctggcgacagcagctcccagcagcaccagcggcctgtcctgagcttccatgtggatccctatgtttgcaacccctccccaggtgaggaggtgcctagatatggggctacagggctgggttgtgggctttgcatttctcggctcctgggaccctcagacagcatctccttcctgctgcccacctctggagccactacctcctgctcctgtcccctggagcctgctttgtagacacaaggaaaacaagtttggcttccctggtctccatttcttcagcagcctgacttctttaccaagctgatgtgaaaagaatgtgacctgggaatgcggaggcttcatttggggtggacagctgctgtctgctgccttggcaggggctcctactcccaagtgggggctgagcccatgagcaggagctcaaggagctgcaggtctgaggccagacctgtttaattctatcccacagagtcgctgcccaacgtggtggtgaatggtgtgctccagggcctctacagcttcagcatcagcccagataaagcccagccaaaggcggcctgtcaccctgctcctctgccaccgatgccctgatcagtccagaggcctttggctgcctcctaagaaagtcatgtgcctctgtcctatgaactccatataaggctgggtcctcctttggcctggacccaggacttaattacccagtgcccagttgtgccacattcccactcaaggctcagaacttggctcgcattggtagctggaggtggtagaatttgtatgctcttagagcccaacagccaaggcagggtcaagaagataagtaataaaagaggaagtcagccaggcgcggtggctcatgcctgtaatcccagcactttgggaggccaagatgggtggatcacctgaagtcaggagttcgagaccagcctgaccaccatggagaaaccccgtctctactaaaaatacaaaattagccgggcattgtggcatccgccaccatgcccggctaatttttgtatttttaatagagatgggtttcaccacgttggccaggctggtcttgtactcctgacgtcaggtgatccacccgcctcggcttcccaaagtgctgggattacgggcgtgagccaccgtgctcggcccaaggcaggagaatctcttgaagccaggaggcggaagttgtggtgagccgagatcgcgccactgcactccagcctgggcaacaagagtgaaactccgtctcaaaataaataaataataaaggaagaagtcagctgggtgcagaggctcatgcctgtaatcccaatactttaggaggccaaggcaggaggatgcttgggtctggaagtttgagaccagccagcgcaacatagtgagacctgtctctaccaaaaaaaaaaaaaaaaaaaaaaaatcaatttagaggtaggctatgaaaaagtacagatacatcccttaacatagactggagggtggtggcaaggggagcaaatgtggaggcccagtagctggcaaagtttagaagcagggggcaaaagctcctgcctgacttttcctgggtagctcctgggtcaaaatttcaggcaggatcccagggaaggggcaggcacccattgccacaggagagttgcaggcatgttgggatgtaggcctaggggaggtgctgcaggctcaagaaccaggcccacacattatatattaaaaaaaaaaaaacccacatttttttttattggtcagtgttggtaggagtttgttacaaaagtgagtccatgggcctgtggaatgtgaggggagtgggtccgctccaccagatgccagcaccggggccagtgcagctcagagccctgtggcggactacagggcctgcacagacggtcactcaaagaaagatgtccctgtgccctactccttggcgatggcaaagggcttctccacctcgatcttgccgcagtctgcgatgatcacatccttcaggggtttatcccggctgtctgtcttggtgctctccaccttccgcaccacctcctggaaaagaaaggtggaagcaggagggcatggtggatcaggaggtccaccgctcaggagaaaggccccagcgtatggctcaggagggctaagacccacaagtgatcaacagcacacaaaactggaggcaccaaaattctaacagactcctggccagagcagggagaatgcagatttgacgagggggtacaggaattttgttcctttgaagtaagacccaggttgggccaagggtgaggaggaggaagagggtgaccagggcatgtggcttctcagggacattgcgttcagctgcactctgtatacctcaggggtgggaccagcacgtcactgagtgaaggaggggagggaggctctggcagttgtgcagccttcctggctgggctctgagggggctggaagaatttagaaccttggaggcatggaggtacagggtttattctggacaggagcactgggctgcatctgtgggttgggtccttttgggaaagggatggacacatggagctcctgccctggggtctgtgttgaatccccggtgaggattgcccagtagtagcccttgcttccacaactcaccatgccctctagaactttgccaaacaccacatgcttgccatctagccaggctgtcttgactgtcgtgatgaagaactgggagccgttggtgtctttgcctgcgttggccatgctcacccagccaggcccgtagtgcttcagtttgaagttctcatcggggaagcgctcaccgtagatgctctttcctgggaaaaaagacagagcaggtcaggggcgctggattgcgccaaaccaagcagacattcggggccaggactgagggggcttaacctgtcctctgtgccaggctaggctggagtggactacaaggacataaaagcagcgtccttcctatcttctggcctcagagccaagccatgctgactgaggccaagtggggcatcaggccaggctgatgtggtgaacagctcacagaaggattactttgagaagatagttttgtggcttttaaataaggcgcatgttatcagctccccttagctatggcccaggcctgccacggagggactttggtggagggaagtgccgtgcaggatgcaggggagtcaacagggtcggaactctccagaaaaggaggactgctgtggctgaccagcctgttttcctatgagcacaaaagacacaggcatagctgcagaggagaaagcagccagagatgtgtggggaggggcagaaaagaggggctgccccttggattctggagagtcaaagcctcttaacaaggaatgaacaggaataaaagacagctgtgagtgtg

SEQ ID NO: 19986 - DNA, 3614 bp, Homo sapiens
  source 1..3614: mol_type = unassigned DNA
gctccgggagagttagggctccgagccgagcgcgcggagcagctggggccggggcgcggatgctggaagttcacatcccgtcggtggggcccgaggccgaggggcccaggcagagcccggagaaaagccacatggtgttccgagtggaggtgctgtgcagcgggcgcagacacacggtgccaaggcgctacagcgagttccacgcgctgcacaagcggatcaagaagctgtacaaagtgcccgacttcccctcgaaacgcctgcccaactggaggaccagagggttggaacagcgccggcagggcttggaggcttacatccagggcatcctgtacctgaaccaggaggtgcccaaggagttactggaattcctgagacttcggcacttccccacagaccccaaggctagcaactggggcaccctgagggagttcctgcctggcgacagcagctcccagcagcaccagcggcctgtcctgagcttccatgtggatccctatgtttgcaacccctccccagagtcgctgcccaacgtggtggtgaatggtgtgctccagggcctctacagcttcagcatcagcccagataaagcccagccaaaggcggcctgtcaccctgctcctctgccaccgatgccctgatcagtccagaggcctttggctgcctcctaagaaagtcatgtgcctctgtcctatgaactccatataaggctgggtcctcctttggcctggacccaggacttaattacccagtgcccagttgtgccacattcccactcaaggctcagaacttggctcgcattggtagctggaggtggtagaatttgtatgctcttagagcccaacagccaaggcagggtcaagaagataagtaataaaagaggaagtcagccaggcgcggtggctcatgcctgtaatcccagcactttgggaggccaagatgggtggatcacctgaagtcaggagttcgagaccagcctgaccaccatggagaaaccccgtctctactaaaaatacaaaattagccgggcattgtggtggtgcatgcctgtaatcccagctactcgggaagctgaggtaggagaatctcttttttttttttttttttttttttgagacggagtttcactcttgttgcccaggctggaatgcaatggcacgatctcggctcacggcaacccccgcttcccgggttcaagcaattctcctgcctcagcctctcgagtagctgggattacaggcatccgccaccatgcccggctaatttttgtatttttaatagagatgggtttcaccacgttggccaggctggtcttgtactcctgacgtcaggtgatccacccgcctcggcttcccaaagtgctgggattacgggcgtgagccaccgtgctcggcccaaggcaggagaatctcttgaagccaggaggcggaagttgtggtgagccgagatcgcgccactgcactccagcctgggcaacaagagtgaaactccgtctcaaaataaataaataataaaggaagaagtcagctgggtgcagaggctcatgcctgtaatcccaatactttaggaggccaaggcaggaggatgcttgggtctggaagtttgagaccagccagcgcaacatagtgagacctgtctctaccaaaaaaaaaaaaaaaaaaaaaaaatcaatttagaggtaggctatgaaaaagtacagatacatcccttaacatagactggagggtggtggcaaggggagcaaatgtggaggcccagtagctggcaaagtttagaagcagggggcaaaagctcctgcctgacttttcctgggtagctcctgggtcaaaatttcaggcaggatcccagggaaggggcaggcacccattgccacaggagagttgcaggcatgttgggatgtaggcctaggggaggtgctgcaggctcaagaaccaggcccacacattatatattaaaaaaaaaaaaacccacatttttttttattggtcagtgttggtaggagtttgttacaaaagtgagtccatgggcctgtggaatgtgaggggagtgggtccgctccaccagatgccagcaccggggccagtgcagctcagagccctgtggcggactacagggcctgcacagacggtcactcaaagaaagatgtccctgtgccctactccttggcgatggcaaagggcttctccacctcgatcttgccgcagtctgcgatgatcacatccttcaggggtttatcccggctgtctgtcttggtgctctccaccttccgcaccacctcctggaaaagaaaggtggaagcaggagggcatggtggatcaggaggtccaccgctcaggagaaaggccccagcgtatggctcaggagggctaagacccacaagtgatcaacagcacacaaaactggaggcaccaaaattctaacagactcctggccagagcagggagaatgcagatttgacgagggggtacaggaattttgttcctttgaagtaagacccaggttgggccaagggtgaggaggaggaagagggtgaccagggcatgtggcttctcagggacattgcgttcagctgcactctgtatacctcaggggtgggaccagcacgtcactgagtgaaggaggggagggaggctctggcagttgtgcagccttcctggctgggctctgagggggctggaagaatttagaaccttggaggcatggaggtacagggtttattctggacaggagcactgggctgcatctgtgggttgggtccttttgggaaagggatggacacatggagctcctgccctggggtctgtgttgaatccccggtgaggattgcccagtagtagcccttgcttccacaactcaccatgccctctagaactttgccaaacaccacatgcttgccatctagccaggctgtcttgactgtcgtgatgaagaactgggagccgttggtgtctttgcctgcgttggccatgctcacccagccaggcccgtagtgcttcagtttgaagttctcatcggggaagcgctcaccgtagatgctctttcctgggaaaaaagacagagcaggtcaggggcgctggattgcgccaaaccaagcagacattcggggccaggactgagggggcttaacctgtcctctgtgccaggctaggctggagtggactacaaggacataaaagcagcgtccttcctatcttctggcctcagagccaagccatgctgactgaggccaagtggggcatcaggccaggctgatgtggtgaacagctcacagaaggattactttgagaagatagttttgtggcttttaaataaggcgcatgttatcagctccccttagctatggcccaggcctgccacggagggactttggtggagggaagtgccgtgcaggatgcaggggagtcaacagggtcggaactctccagaaaaggaggactgctgtggctgaccagcctgttttcctatgagcacaaaagacacaggcatagctgcagaggagaaagcagccagagatgtgtggggaggggcagaaaagaggggctgccccttggattctggagagtcaaagcctcttaacaaggaatgaacaggaataaaagacagctgtgagtgtg

SEQ ID NO: 19987 - DNA, 2789 bp, Homo sapiens
  source 1..2789: mol_type = unassigned DNA
gagccgagcgcgcggagcagctggggccggggcgcggatgctggaagttcacatcccgtcggtggggcccgaggccgaggggcccaggcagagcccggagaaaagccacatggtgttccgagtggaggtgctgtgcagcgggcgcagacacacggtgccaaggcgctacagcgagttccacgcgctgcacaagcgggtgaggcggcgccgacctcccaccggccccggcccagcctctgtccagcccccgcccaggccctgtgaggcgggcgggcgagccccagcctccgccacccccattactgcctcagtccctgcgcagccggtcagcccccgggcctctgtgggtgggttggggccttcctcgccctcggccggtccaccactcaccagggtctgtcccagtagagcccgaaggcgggggcgcgggagggcttctggctggggcgaagagggcttgagggctcagtcgggatgctgtgatcgcacgcggtaaacctccagtagatcaagaagctgtacaaagtgcccgacttcccctcgaaacgcctgcccaactggaggaccagagggttggaacagcgccggcagggcttggaggcttacatccaggtatgcgagagcacagttggttgccccccggccttctgtgccaggggtgtggcccagacagagaggtgtgggggcatggcagggagggaacccacaacttggggatgttattcaccacctcaagcatcaattttctgagtctaatataggtccaaacacccccctctggcttgttgaaaggactgaaagaggtaacggacacaggtagtcccagctccatgaaacccaggtcctgtcccctccatggtgaggtcctgtgctgccctcctgatggcatgtagggtgagggtccttcccccaacagcaaagctatgccgcgtcatggggtacaacctgtgcacacagcgcccagcgcccagaagggccctgagcctggttcaacgctctgctgtcattgtcgtgaaattctttttttggaacaaagagccctgcattttcactggcactgcgctatgcaaattagtagctgggtctgattgcaggtctcctctgtcctctccagggcatcctgtacctgaaccaggaggtgcccaaggagttactggaattcctgagacttcggcacttccccacagaccccaaggctagcaactgggggtaaggggggccgatggcgggggccaggggctgtcagcagtgagcaggtgaggaaaggtgttggagggcaagccctttcttttcacatctgccaggatccagcatgaccgccctcaccagctctcttgacctgggtggaggggcttttttttggacagacttggttacccccgccacctccggaactggggcttgttacaaatagaagcagtggtcccctgggaggtgcagttctgggctctggtgtctccaccccttcctcacgctcccccggcatccccaggcagcttacagtgtttctcttctcttcagcaccctgagggagttcctgcctggcgacagcaggcaagtcaaagccctagcccgcgcttggcccctgctgccccctagtggccatatgctaggaggcaggcctgctgcctgggcctgtctggcctgggccctgaagtctgttttccctttggtgcctcctgagcccatttcccactcaccttttccttcatgggtccctggtgatggcaaccccgtctccacccctctgtgggattctgccctgcctcccgcacccatggttcatgaccctgtttcctcccagctcccagcagcaccagcggcctgtcctgagcttccatgtggatccctatgtttgcaacccctccccaggtgaggaggtgcctagatatggggctacagggctgggttgtgggctttgcatttctcggctcctgggaccctcagacagcatctccttcctgctgcccacctctggagccactacctcctgctcctgtcccctggagcctgctttgtagacacaaggaaaacaagtttggcttccctggtctccatttcttcagcagcctgacttctttaccaagctgatgtgaaaagaatgtgacctgggaatgcggaggcttcatttggggtggacagctgctgtctgctgccttggcaggggctcctactcccaagtgggggctgagcccatgagcaggagctcaaggagctgcaggtctgaggccagacctgtttaattctatcccacagagtcgctgcccaacgtggtggtgaatggtgtgctccagggcctctacagcttcagcatcagcccagataaagcccagccaaaggcggcctgtcaccctgctcctctgccaccgatgccctgatcagtccagaggcctttggctgcctcctaagaaagtcatgtgcctctgtcctatgaactccatataaggctgggtcctcctttggcctggacccaggacttaattacccagtgcccagttgtgccacattcccactcaaggctcagaacttggctcgcattggtagctggaggtggtagaatttgtatgctcttagagcccaacagccaaggcagggtcaagaagataagtaataaaagaggaagtcagccaggcgcggtggctcatgcctgtaatcccagcactttgggaggccaagatgggtggatcacctgaagtcaggagttcgagaccagcctgaccaccatggagaaaccccgtctctactaaaaatacaaaattagccgggcattgtggtggtgcatgcctgta

SEQ ID NO: 19988 - DNA, 1353 bp, Homo sapiens
  source 1..1353: mol_type = unassigned DNA
gagccgagcgcgcggagcagctggggccggggcgcggatgctggaagttcacatcccgtcggtggggcccgaggccgaggggcccaggcagagcccggagaaaagccacatggtgttccgagtggaggtgctgtgcagcgggcgcagacacacggtgccaaggcgctacagcgagttccacgcgctgcacaagcggatcaagaagctgtacaaagtgcccgacttcccctcgaaacgcctgcccaactggaggaccagagggttggaacagcgccggcagggcttggaggcttacatccagggcatcctgtacctgaaccaggaggtgcccaaggagttactggaattcctgagacttcggcacttccccacagaccccaaggctagcaactgggggtaaggggggccgatggcgggggccaggggctgtcagcagtgagcagcaccctgagggagttcctgcctggcgacagcagctcccagcagcaccagcggcctgtcctgagcttccatgtggatccctatgtttgcaacccctccccagagtcgctgcccaacgtggtggtgaatggtgtgctccagggcctctacagcttcagcatcagcccagataaagcccagccaaaggcggcctgtcaccctgctcctctgccaccgatgccctgatcagtccagaggcctttggctgcctcctaagaaagtcatgtgcctctgtcctatgaactccatataaggctgggtcctcctttggcctggacccaggacttaattacccagtgcccagttgtgccacattcccactcaaggctcagaacttggctcgcattggtagctggaggtggtagaatttgtatgctcttagagcccaacagccaaggcagggtcaagaagataagtaataaaagaggaatcagctgggtgcagaggctcatgcctgtaatcccaatactttaggaggccaaggcaggaggatgcttgggtctggaagtttgagaccagccagcgcaacatagtgagacctgtctctaccaaaaaaaaaaaaaaaaaaaaaaaatcaatttagaggtaggctatgaaaaagtacagatacatcccttaacatagactggagggtggtggcaaggggagcaaatgtggaggcccagtagctggcaaagtttagaagcagggggcaaaagctcctgcctgacttttcctgggtagctcctgggtcaaaatttcaggcaggatcccagggaaggggcaggcacccattgccacaggagagttgcaggcatgttgggatgtaggcctaggggaggtgctgcaggctcaagaaccaggcccacacattatatattaaaaaaaaaaaaa

SEQ ID NO: 19989 - DNA, 1182 bp, Homo sapiens
  source 1..1182: mol_type = unassigned DNA
gccgagcgcgcggagcagctggggccggggcgcggatgctggaagttcacatcccgtcggtggggcccgaggccgaggggcccaggcagagcccggagaaaagccacatggtgttccgagtggaggtgctgtgcagcgggcgcagacacacggtgccaaggcgctacagcgagttccacgcgctgcacaagcgggtgaggcggcgccgacctcccaccggccccggcccagcctctgtccagcccccgcccaggccctgtgaggcgggcgggcgagccccagcctccgccacccccattactgcctcagtccctgcgcagccggtcagcccccgggcctctgtgggtgggttggggccttcctcgccctcggccggtccaccactcaccagggtctgtcccagtagagcccgaaggcgggggcgcgggagggcttctggctggggcgaagagggcttgagggctcagtcgggatgctgtgatcgcacgcggtaaacctccagtagatcaagaagctgtacaaagtgcccgacttcccctcgaaacgcctgcccaactggaggaccagagggttggaacagcgccggcagggcttggaggcttacatccagggcatcctgtacctgaaccaggaggtgcccaaggagttactggaattcctgagacttcggcacttccccacagaccccaaggctagcaactggggcaccctgagggagttcctgcctggcgacagcagctcccagcagcaccagcggcctgtcctgagcttccatgtggatccctatgtttgcaacccctccccagagtcgctgcccaacgtggtggtgaatggtgtgctccagggcctctacagcttcagcatcagcccagataaagcccagccaaaggcggcctgtcaccctgctcctctgccaccgatgccctgatcagtccagaggcctttggctgcctcctaagaaagtcatgtgcctctgtcctatgaactccatataaggctgggtcctcctttggcctggacccaggacttaattacccagtgcccagttgtgccacattcccactcaaggctcagaacttggctcgcattggtagctggaggtggtagaatttgtatgctcttagagcccaacagccaaggcagggtcaagaagataagtaataaaagaggaagtcagccagg

SEQ ID NO: 19990 - DNA, 1807 bp, Homo sapiens
  source 1..1807: mol_type = unassigned DNA
gagcgcgcggagcagctggggccggggcgcggatgctggaagttcacatcccgtcggtggggcccgaggccgaggggcccaggcagagcccggagaaaagccacatggtgagcgcggcccctggatggggaggggcgccgggacccgcaggatttccccgcgctgcgctcagtggggacccggggcccgggcctgggtgaacgagcgctgcgggctggaccgtcgggggaaaccttgtcgagggtttgggggccgcttggatttgccagcctcgcggaccatggttcgagctcttgagggaccccagggctccgaggggcaggtccgccagccggttctcccaggtgtgcgggagcggagagtccccgggcagccgcggcgccgcaaggccgctttgtgcctttgagagcgggagggtgggcacgtcgccaggcgcaggtgctgcggcgtcctcccgcggggcctcacgcgcagacccgctgcccgcccgcgccgccaggtgttccgagtggaggtgctgtgcagcgggcgcagacacacggtgccaaggcgctacagcgagttccacgcgctgcacaagcgggtgaggcggcgccgacctcccaccggccccggcccagcctctgtccagcccccgcccaggccctgtgaggcgggcgggcgagccccagcctccgccacccccattactgcctcagtccctgcgcagccggtcagcccccgggcctctgtgggtgggttggggccttcctcgccctcggccggtccaccactcaccagggtctgtcccagtagagcccgaaggcgggggcgcgggagggcttctggctggggcgaagagggcttgagggctcagtcgggatgctgtgatcgcacgcggtaaacctccagtagatcaagaagctgtacaaagtgcccgacttcccctcgaaacgcctgcccaactggaggaccagagggttggaacagcgccggcagggcttggaggcttacatccagggcatcctgtacctgaaccaggaggtgcccaaggagttactggaattcctgagacttcggcacttccccacagaccccaaggctagcaactggggcaccctgagggagttcctgcctggcgacagcagctcccagcagcaccagcggcctgtcctgagcttccatgtggatccctatgtttgcaacccctccccaggtgaggaggtgcctagatatggggctacagggctgggttgtgggctttgcatttctcggctcctgggaccctcagacagcatctccttcctgctgcccacctctggagccactacctcctgctcctgtcccctggagcctgctttgtagacacaaggaaaacaagtttggcttccctggtctccatttcttcagcagcctgacttctttaccaagctgatgtgaaaagaatgtgacctgggaatgcggaggcttcatttggggtggacagctgctgtctgctgccttggcaggggctcctactcccaagtgggggctgagcccatgagcaggagctcaaggagctgcaggtctgaggccagacctgtttaattctatcccacagagtcgctgcccaacgtggtggtgaatggtgtgctccagggcctctacagcttcagcatcagcccagataaagcccagccaaaggcggcctgtcaccctgctcctctgccaccgatgccctgatcagtccagaggcctttggctgcctcctaagaaagtcatgtgcctctgtcctatgaactccatataaggctgggtcctcctttggcctggacccaggacttaatta

SEQ ID NO: 19991 - DNA, 3367 bp, Homo sapiens
  source 1..3367: mol_type = unassigned DNA
gggcttttttttggacagacttggttacccccgccacctccggaactggggcttgttacaaatagaagcagtggtcccctgggaggtgcagttctgggctctggtgtctccaccccttcctcacgctcccccggcatccccaggcagcttacagtgtttctcttctcttcagcaccctgagggagttcctgcctggcgacagcagctcccagcagcaccagcggcctgtcctgagcttccatgtggatccctatgtttgcaacccctccccagagtcgctgcccaacgtggtggtgaatggtgtgctccagggcctctacagcttcagcatcagcccagataaagcccagccaaaggcggcctgtcaccctgctcctctgccaccgatgccctgatcagtccagaggcctttggctgcctcctaagaaagtcatgtgcctctgtcctatgaactccatataaggctgggtcctcctttggcctggacccaggacttaattacccagtgcccagttgtgccacattcccactcaaggctcagaacttggctcgcattggtagctggaggtggtagaatttgtatgctcttagagcccaacagccaaggcagggtcaagaagataagtaataaaagaggaagtcagccaggcgcggtggctcatgcctgtaatcccagcactttgggaggccaagatgggtggatcacctgaagtcaggagttcgagaccagcctgaccaccatggagaaaccccgtctctactaaaaatacaaaattagccgggcattgtggtggtgcatgcctgtaatcccagctactcgggaagctgaggtaggagaatctcttttttttttttttttttttttttgagacggagtttcactcttgttgcccaggctggaatgcaatggcacgatctcggctcacggcaacccccgcttcccgggttcaagcaattctcctgcctcagcctctcgagtagctgggattacaggcatccgccaccatgcccggctaatttttgtatttttaatagagatgggtttcaccacgttggccaggctggtcttgtactcctgacgtcaggtgatccacccgcctcggcttcccaaagtgctgggattacgggcgtgagccaccgtgctcggcccaaggcaggagaatctcttgaagccaggaggcggaagttgtggtgagccgagatcgcgccactgcactccagcctgggcaacaagagtgaaactccgtctcaaaataaataaataataaaggaagaagtcagctgggtgcagaggctcatgcctgtaatcccaatactttaggaggccaaggcaggaggatgcttgggtctggaagtttgagaccagccagcgcaacatagtgagacctgtctctaccaaaaaaaaaaaaaaaaaaaaaaaatcaatttagaggtaggctatgaaaaagtacagatacatcccttaacatagactggagggtggtggcaaggggagcaaatgtggaggcccagtagctggcaaagtttagaagcagggggcaaaagctcctgcctgacttttcctgggtagctcctgggtcaaaatttcaggcaggatcccagggaaggggcaggcacccattgccacaggagagttgcaggcatgttgggatgtaggcctaggggaggtgctgcaggctcaagaaccaggcccacacattatatattaaaaaaaaaaaaacccacatttttttttattggtcagtgttggtaggagtttgttacaaaagtgagtccatgggcctgtggaatgtgaggggagtgggtccgctccaccagatgccagcaccggggccagtgcagctcagagccctgtggcggactacagggcctgcacagacggtcactcaaagaaagatgtccctgtgccctactccttggcgatggcaaagggcttctccacctcgatcttgccgcagtctgcgatgatcacatccttcaggggtttatcccggctgtctgtcttggtgctctccaccttccgcaccacctcctggaaaagaaaggtggaagcaggagggcatggtggatcaggaggtccaccgctcaggagaaaggccccagcgtatggctcaggagggctaagacccacaagtgatcaacagcacacaaaactggaggcaccaaaattctaacagactcctggccagagcagggagaatgcagatttgacgagggggtacaggaattttgttcctttgaagtaagacccaggttgggccaagggtgaggaggaggaagagggtgaccagggcatgtggcttctcagggacattgcgttcagctgcactctgtatacctcaggggtgggaccagcacgtcactgagtgaaggaggggagggaggctctggcagttgtgcagccttcctggctgggctctgagggggctggaagaatttagaaccttggaggcatggaggtacagggtttattctggacaggagcactgggctgcatctgtgggttgggtccttttgggaaagggatggacacatggagctcctgccctggggtctgtgttgaatccccggtgaggattgcccagtagtagcccttgcttccacaactcaccatgccctctagaactttgccaaacaccacatgcttgccatctagccaggctgtcttgactgtcgtgatgaagaactgggagccgttggtgtctttgcctgcgttggccatgctcacccagccaggcccgtagtgcttcagtttgaagttctcatcggggaagcgctcaccgtagatgctctttcctgggaaaaaagacagagcaggtcaggggcgctggattgcgccaaaccaagcagacattcggggccaggactgagggggcttaacctgtcctctgtgccaggctaggctggagtggactacaaggacataaaagcagcgtccttcctatcttctggcctcagagccaagccatgctgactgaggccaagtggggcatcaggccaggctgatgtggtgaacagctcacagaaggattactttgagaagatagttttgtggcttttaaataaggcgcatgttatcagctccccttagctatggcccaggcctgccacggagggactttggtggagggaagtgccgtgcaggatgcaggggagtcaacagggtcggaactctccagaaaaggaggactgctgtggctgaccagcctgttttcctatgagcacaaaagacacaggcatagctgcagaggagaaagcagccagagatgtgtggggaggggcagaaaagaggggctgccccttggattctggagagtcaaagcctcttaacaaggaatgaacaggaataaaagacagctgtgagtgt

SEQ ID NO: 19992 - DNA, 8008 bp, Homo sapiens
  source 1..8008: mol_type = unassigned DNA
ggaatcgcctttttgttttggagctgccttctcgctggcggagcggagggtctgcgagcgccggggaaggcaggctgggggcgcagcccgccccccactggccgggccccgcagggcggagaggaggacggacggacagacggctggccgcgccatctgctcgccggagctcactctccaaactccaaactgttgagtgtgtgcgtgcacgcgagggtggtgatcgggggtcgtaagtcccgggtgaggaaccggtttctgctggggttacctttggacggggttcctgggattcagagcagggtcagcgtcaggctcagaaactgctgaggaattaggcaaacaaaagagaccactcagcgagtggctagaagtcgcccgacagcctcgtcgcgccccctccttcctccggggttggggctggccacttctggggcggggagagggcgcccgagccggcgggggctccggctgcgcagccggggtcgaagagttggcggcctgttgtgtaagcctcagtccttgttttcccggcctggctcgttgtgaagccggacacatccacccttggactcgattcaggcggctgctgcttttctccttgcccctcttggattttccggatttttgaaaacccagtggcccaggagcaagaggaggaaggaggaaggggcagatctgcagaggaatgtgagagcctcccaaagcgagagccgccaaaagaatctgggagccagagggacagccgagccctgcccgggtttctggaatggtggtttcagagtgagtctcttctattttagaacgttgttccagtggaaagtgtcgaatttttcccctcgcagggcagatttctccaggtcacttgacttttcttctgggagtaggagttaggagagattcccctctaaccccccagaggctgctaagggaggaggagactgtggacatgagccctccctgctcacaagcatatgcccggagacctgatagggcagtttctgggccatggacattgctttgaagagggggagactggacagcatctgtgggtgctgagaccccaccttaggacctgagagattgaactgtgtaagcgccattcagctgcgagtgcattcttggactgccttgtgagcatccccggtctgggcaggaccctctccttcccatctttctataccacccagcccagccatggcactgaaaggccgagccctctatgactttcacagtgagaacaaggaggaaatcagcatccagcaggatgaggacctggtcatctttagcgagacctcactggatggctggctgcagggccagaacagccgtggggagacagggctctttcctgcctcttatgtggagatcgtccgttctggcatcagcaccaaccatgctgactactccagcagccctgcaggctctcccggagcccaggtgagcttgtacaacagccccagtgtggccagcccagctaggagtggtgggggcagtggcttcctctcaaaccagggtagctttgaggaggatgatgatgatgactgggatgactgggacgacggatgcacagtggtggaggagccacgggctggtgggctgggcaccaacgggcaccctcccctcaacctctcctaccctggtgcctaccccagccagcacatggccttccggcccaagccaccactggagcggcaggacagcctggcatctgccaagcgaggcagtgtggtgggccgtaacctcaaccgtttctcatgctttgtgcgttctggagtggaggccttcatcctgggtgatgtgcccatgatggccaagatcgctgagacatactccattgaaatgggccctcgtggcccccagtggaaggccaatccccacccatttgcctgctctgtggaggaccccacaaaacagaccaaattcaagggcatcaaaagctacatctcctacaagctcacacccacccatgctgcctcacccgtctaccggcgctacaaacactttgactggctctataaccgcctgctacacaagttcactgtcatctcggtgccccacctgcctgagaagcaggccactggccgcttcgaggaggacttcatcgaaaagcggaagcggagactcatcctctggatggaccacatgaccagccaccctgtgctctcccagtacgaaggcttccagcatttcctcagctgcctggatgacaagcagtggaagatgggcaaacgccgggcggagaaggatgagatggtgggtgccagcttcctgctcaccttccagatccccaccgagcaccaggacttgcaggacgtggaagatcgcgtggacactttcaaggccttcagtaagaagatggacgacagcgtcctgcagctcagcactgtggcatcagagctggtgcgtaaacatgtggggggcttccgcaaggaattccagaagctgggcagtgccttccaggccatcagtcattccttccagatggacccccccttttgctctgaggccctcaacagtgccatttctcacacgggccgtacctatgaagccatcggggagatgtttgctgagcagcccaagaatgacctcttccagatgctggacacactgtctctctaccagggcctgctctccaacttccctgacatcatccatctacaaaaaggcgccttcgccaaggtgaaggagagccaacgcatgagtgacgagggccgcatggtgcaggacgaggcagacggcattcgcaggcgctgccgcgtggtgggtttcgccctgcaggccgagatgaaccacttccaccagcgccgtgagctcgacttcaagcacatgatgcagaactacttgcgccagcagatcctcttctaccagcgggtgggccagcagctggagaagaccctgcgcatgtatgacaacctctgaccgcgtgtgcctgggccccctccttcccctgggcctggtcactgcagtgtaccccactttcccgacctccctataccagcagtgactgggggaggggtcagcggtgggggagataagcggcctgtcctgcctcctgggagaaggagctttcaaggagtcatgggtgcccctgggaaattccccactccttagaagtggggcacagcaggggtgagaatagagtcaggagccctcgaggccaaggcctgggctgccggtcagtcagtgaaggtcaggccagggtctcagcctcccctagagcctattttgcttgctcacctggccactgctgccttatccattcagcagacaccgaggcctgctgcacccttgggtcggatgctgggcacccagggctgtgacatgcctgctcttcaggagtcctcagtgaaggtcggggtcagacacagacagagtcaatgcagtatgactgatgtttaagtgagggatttctggaagctcatagaagggaccacagcattccactggtcagggaagactccatagagtaggcaacatttgggcagtgttttgaagaatgacaagggcctgccagacagtacatgggggagaaggactttcaggggagaggaacagcatgggcaaagttatggaggcatgcaaacatctccctcttctctcccttactttccaagcaagttaggtacgctttccatggggattctggcctgtgtggtaggaagggatctcccttgctcccatgttgctggctgtccgtacatcaccctgtcccctgcaggagggggctacaggccatctccctcctgtaggcctctgactcccctccacttttgggccctcagcttatctcgggcaggggaccattgcagcatcctcccctcctcggactcaaggtgctgaggtataagccctgggccccagatccctggtgacaccttcctggagaagactctcaaaagtgactgtatatttgagttcaccagcaataactccccacactcgaagcaggtccaaacccaggatctcagggtccttgggctctgtggcactgtcttcccaagatccttcctgttgcacaatgggaaacctaagaggaaaaagacaggggcctgcttgcccagccatgcgagggattccatgcccacctgccctctgtctgcctcgctggaatgtgggcccctgctccccgtcaggttgtgctgtctctgacctatgtttacatccccgaggggtttctgcctcctccccacccaggtcagggtgtggtccagcagcttgctgtggggtgctgacatgtgtcaccactgccccccttgcccccgggggggtcatggtctcctcctggatgctgctccttgaatcttttttcttgataaaccttttacaattaagataacacaagcatgactttttctgtttggatcccagaaaggcggagggcaggagaaggatagagccctaattgctcctgagagccattggatgagattctgaggtcgtggtgggcacaaattttccacagaacctcaaaagttcaggggagggctatgctggtggaaggtgccagcaggcaggaggagctagaggcggctgtggacccctgggtggatccatccctccctagaacgcactcttgtctctaaaacaggtggagtgctgcccaggggactggctgtactgccttgtgatctggggctgagggttgtatgaggaagggacaggacgctgtgccctaggacaattaatagatggtggctcctctccccaaggagccatgccctggccttgcccttgaaaagccctagtccaggggagggaagtgggggactcagaagctgtgtctcttccccaaaccgtcctgggtacccagccctgcggaggctcccacattggaaactgaagaggacgctggctgttgggggtgccctgatcaggatgagcggaccttgctcttggatctgttcatccacagatgagaggagggtactggttgagacttggctctcctttggaggcaatggggacttggtggagggagggcttccagggtcaaggccgtcagggaaggttggctagaccagggaccagggagcttgtgcaggaagatggagaagggccagcaggtgcggtgggggaaggggcgggcaggactccctgttcagggcatagcgtcctcagaggaacttctggaatgggtccccctggcccttggtcaacattaggtcagatttgggactttctgaggaattttcccctctctccaccctgccccattttctaacccatccgaggaacttcccgcccttaacctcttctcagctctgccatccatgtagccatctgcagaaggggctctgagcagtgggggctgggccaggccgaggcagggctggtgggaatgctcctcctaacccatggtgcctggaaagtcccctgctcatgcttcctgctctgggaacagtgttgtcctctgtgtgccttccttgagaggggaccacctcccaggccttccatcctcagggtgaggccatcagtctgatacttttctcaggagggacttggatccaggagaagcatcaggaagtggagtcttgggataatgccaggcctgctcctggtatcctgaggtctctgggctggggcaggtgtgtgtgtggcagggagggaggctgtcctggccctcctctctcttttctttctgcctctatgggggtgggggtattgggggaacttggggccgttctggggtagctaagcccctttcagcaggagattgggggaccagtgttgggggcatcctggtgatggccgattcctgcctcgtcacatgccaggcagatgttcccgactcggctggacccagctgcctcgtttcctcccttactttgctctgagggggtggaaaacaaggcttctctttctgccctggacagctaccagcacccggggtaggggatcccctggtcaccagtcttggcccagtacaggaaaaggaatccgctttgtggccacagatgggggctggggatggaagcagacctcagatcctgcatctcttcacccgctggacacaggagggctatgaaccactgtgccgtggctgcaccactggctggagcagagccaggcctgggagaggcaggtggccccatcggcccctgctctgcaccacccctcccagatgacagagccatatgtcttccacgtgtctacacactcacagactcacgaatgtaatcgctcagtctcacaacaagcacacgcagtcacacacctgcccacaggcacatacgccacataagcatgcctgtatgctcacacagtcatactgccacacgctattacacattcacagccacagccacacatgccttgccatccattcaaagcaccagtggctactttgtcagacacagccacaccacagtcctatgcacatggtcatagcctcacacagtgacacatactcgggcacacaccgccacaaagccatgcttgcacagagcaaaggtgtcataagcatctctgtgcctggactgcacctgcatgacctcccagggtccccacctcatcagagattaaggagagctttgcttggagacaccacccctggagggggtgtctccaagggggagtagagccagtcacaagcaccacatacaggcacacagcctgaggtctagggatgcaattgggatgactggataccaccaagttcagctccttattgaacagatgggcgcctgaggcccagggagcagtggtggctggccttatcacccagcagggcaggggatactctggggccagagcctggctctgggcagactctgtttcctggccctgccctcccctgggccaatcctctgggccaggctgcctctgaaggcccctggctgaaccgatccagcagagctccaggcagctcccttctcaagctagagctgagctgcagtggccacgggagccggagccaggatgcggtgggcagggcctaggcctgggcgggaggaacattcctgcaccatctcctccccaagcatgtgaggacccagcccgccctgcccgcctgcccgctgactcaggcctccaggagccaagcctgctcagctcccccacccaccctaacctgcttccccactagttcggctctggttcccctctccactggctggggcaggagaagacggtgagccctggtaggaagaccatggggaaaaatcaaacctcaccaccccccgacatagctcagaagggctgattgtgaaacccagctctgttcaacatagttgaacacaaactttttttttcttttggtttggttttgttttgttggtcaaaccccagtgcagtgcagtctgtttaagaagtagtgtcgcatagctgtggcctggatctgctcagcagccccagtaggcagcatttattccctttcgcaacaaagagactgagacttggccagagggaagatgggacctgcctaggttcacacagggaatctctggcggggctggactcaaacccagctccctgccatcactccttagagtcacactgatgaactcatttagggccaaaggaagaaggggaggcagatttcccctctagatgagtgaagggataggaggctggtgaacccaacggctgaaatgtgaagggtgagagggtagggtgagtccccccagccctgagggatgaagggtctgaagatggcactgcacggtgacagctgcagtgactcaggagctccgtttacaaaggaacatgagtgaggaacataacttaatttttttttatatctgacctgaatttctgttttcctcccccattccccacatggtagaagtgtaatctcacatcaatttggggaccctttctttccccagggatgtgtagaacttttggggatggcacatttgaagaccttagggagctttgcattttaaaggctgaatcccacactctatcatacatattaatatttacctgcattccacattaaagggttcagtttatgacttgtgtcctgtcttgtagatacttaattaaacggtattaattttga

SEQ ID NO: 19993 - DNA, 2265 bp, Homo sapiens
  source 1..2265: mol_type = unassigned DNA
tcgtggcccccagtggaaggccaatccccacccatttgcctgctctgtggaggaccccacaaaacagaccaaattcaagggcatcaaaagctacatctcctacaagctcacacccacccatgctgcctcacccgtctaccggcgctacaaacactttgactggctctataaccgcctgctacacaagttcactgtcatctcggtgccccacctgcctgagaagcaggccactggccgcttcgaggaggacttcatcgaaaagcggaagcggagactcatcctctggatggaccacatgaccagccaccctgtgctctcccagtacgaaggcttccagcatttcctcagctgcctggatgacaagcagtggaagatgggcaaacgccgggcggagaaggatgagatggtgggtgccagcttcctgctcaccttccagatccccaccgagcaccaggacttgcaggacgtggaagatcgcgtggacactttcaaggccttcagtaagaagatggacgacagcgtcctgcagctcagcactgtggcatcagagctgggcctgctctccaacttccctgacatcatccatctacaaaaaggcgccttcgccaaggtgaaggagagccaacgcatgagtgacgagggccgcatggtgcaggacgaggcagacggcattcgcaggcgctgccgcgtggtgggtttcgccctgcaggccgagatgaaccacttccaccagcgccgtgagctcgacttcaagcacatgatgcagaactacttgcgccagcagatcctcttctaccagcgggtgggccagcagctggagaagaccctgcgcatgtatgacaacctctgaccgcgtgtgcctgggccccctccttcccctgggcctggtcactgcagtgtaccccactttcccgacctccctataccagcagtgactgggggaggggtcagcggtgggggagataagcggcctgtcctgcctcctgggagaaggagctttcaaggagtcatgggtgcccctgggaaattccccactccttagaagtggggcacagcaggggtgagaatagagtcaggagccctcgaggccaaggcctgggctgccggtcagtcagtgaaggtcaggccagggtctcagcctcccctagagcctattttgcttgctcacctggccactgctgccttatccattcagcagacaccgaggcctgctgcacccttgggtcggatgctgggcacccagggctgtgacatgcctgctcttcaggagtcctcagtgaaggtcggggtcagacacagacagagtcaatgcagtatgactgatgtttaagtgagggatttctggaagctcatagaagggaccacagcattccactggtcagggaagactccatagagtaggcaacatttgggcagtgttttgaagaatgacaagggcctgccagacagtacatgggggagaaggactttcaggggagaggaacagcatgggcaaagttatggaggcatgcaaacatctccctcttctctcccttactttccaagcaagttaggtacgctttccatggggattctggcctgtgtggtaggaagggatctcccttgctcccatgttgctggctgtccgtacatcaccctgtcccctgcaggagggggctacaggccatctccctcctgtaggcctctgactcccctccacttttgggccctcagcttatctcgggcaggggaccattgcagcatcctcccctcctcggactcaaggtgctgaggtataagccctgggccccagatccctggtgacaccttcctggagaagactctcaaaagtgactgtatatttgagttcaccagcaataactccccacactcgaagcaggtccaaacccaggatctcagggtccttgggctctgtggcactgtcttcccaagatccttcctgttgcacaatgggaaacctaagaggaaaaagacaggggcctgcttgcccagccatgcgagggattccatgcccacctgccctctgtctgcctcgctggaatgtgggcccctgctccccgtcaggttgtgctgtctctgacctatgtttacatccccgaggggtttctgcctcctccccacccaggtcagggtgtggtccagcagcttgctgtggggtgctgacatgtgtcaccactgccccccttgcccccgggggggtcatggtctcctcctggatgctgctccttgaatcttttttcttgataaaccttttacaattaagat

SEQ ID NO: 19994 - DNA, 6835 bp, Homo sapiens
  source 1..6835: mol_type = unassigned DNA
agcttagcaggcgacgttgcgggccctgggcgccaggagagcttcccggagtcgaccttcctgctggctgctctgtgaccgcttcccggctctgccctcttggccgaagtgcccgctgccgggcgcgggcctcagacaatacaatggtgggtgaagagaagatgtctctaagaaaccggctgtcaaagtccagggaaaatcctgaggaagatgaagaccagagaaaccctgcaaaggagtccctagagacacctagtaatggtcgaattgacataaaacagttgatagcaaagaagataaagttgacagcagaggcagaggaattgaagccattttttatgaaggaagttggcagtcactttgatgattttgtgaccaatctcattgaaaagtcagcatcattagataatggtgggtgcgctctcacaaccttttctgttcttgaaggagagaaaaacaaccatagagcgaaggatttgagagcacctccagaacaaggaaagatttttattgcaaggcgctctctcttagatgaactgcttgaagtggaccacatcagaacaatatatcacatgtttattgccctcctcattctctttatcctcagcacacttgtagtagattacattgatgaaggaaggctggtgcttgagttcagcctcctgtcttatgcttttggcaaatttcctaccgttgtttggacctggtggatcatgttcctgtctacattttcagttccctattttctgtttcaacattgggccactggctatagcaagagttctcatccgctgatccgttctctcttccatggctttcttttcatgatcttccagattggagttctaggttttggaccaacatatgttgtgttagcatatacactgccaccagcttcccggttcatcattatattcgagcagattcgttttgtaatgaaggcccactcatttgtcagagagaacgtgcctcgggtactaaattcagctaaggagaaatcaagcactgttccaatacctacagtcaaccagtatttgtacttcttatttgctcctacccttatctaccgtgacagctatcccaggaatcccactgtaagatggggttatgtcgctatgaagtttgcacaggtctttggttgctttttctatgtgtactacatctttgaaaggctttgtgcccccttgtttcggaatatcaaacaggagcccttcagcgctcgtgttctggtcctatgtgtatttaactccatcttgccaggtgtgctgattctcttccttactttttttgcctttttgcactgctggctcaatgcctttgctgagatgttacgctttggtgacaggatgttctataaggattggtggaactccacgtcatactccaactattatagaacctggaatgtggtggtccatgactggctatattactatgcttacaaggactttctctggtttttctccaagagattcaaatctgctgccatgttagctgtctttgctgtatctgctgtagtacacgaatatgccttggctgtttgcttgagctttttctatcccgtgctcttcgtgctcttcatgttctttggaatggctttcaacttcattgtcaatgatagtcggaaaaagccgatttggaatgttctgatgtggacttctcttttcttgggcaatggagtcttactctgcttttattctcaagaatggtatgcacgtcagcactgtcctctgaaaaatcccacatttttggattatgtccggccacgttcctggacttgtcgttacgtgttttagaagcttggactttgtttcctccttgtcactgaagattgggtagctccctgatttggagccagctgtttccagttgttactgaagttatctgtgttatttggaccactccaggctttacagatgactcactccattcctaggtcacttgaagccaaactgttggaagttcactggagtcttgtacacttaagcagagcagaactttttttgtggggctgggtggggggagaagaccgactaacagctgaagtaatgacagattgttgctgggtcatatcagctttatcccttggtaattatatctgttttgtttcttgactctgtccaatcagagaataaacatcatagtttcttggccactgaattagccaaaacacttaggaagaaatcacttaaatacctctggcttagaaattttttcatgcacactgttggaatgtatgctaattgaacatgcaattggggaagaaaaaatgtagaatgatttttgctatttctagtagaaagaaaatgtctgttttccaaagataatgttatacatcctattttgtaatttttttgaaaaaagttcaatgttcagttttccttagtttttaccttgttttctctataggtcatgatttctgtgaagcaaaaagatgccttttaccatgaattcttgagtttacatcaataatattgtatattaaggggatcagaagtaggaaggaaaaaataagagatagcagaggaaaaagaaaaacatttcctcttataacttctgaagtaatttgtaaaaaagatttgtagagtcaatcatgtgtttaaattattttatcacaaacttaacatggaagatattcctttttaactttgtggtaacttctttgaagttatttagaaatatcctttggaacaattattttattgtctaataaatattgacttctcttgaattattttgcagactagtgagtctgtaccataagtattaatcacctccactcatattaaagtgatcattaagaatccagaagctggcttctgcatttgctcagttatacttttaatggtagtatgtttttaggtggaataaattaatatgtgattggtttcaaggaaatgtactctattatgtaatacttccattttataagatgcccatttctaatacaatgtgtgtaggaattatttgtatgtatgaggtatgattgtaaagattgagcattggaaggggtatcagagaccatgtagttcaactttccactcaaagtaagatttatgaattatttaaatgatagttgttacttggaacagccacttgagaggctctcttggtattgtttggaattgttttaaagtcagtttgagtctcacaagaaggtaagtagagtttcttaatagtcacaacttaatttgaaccacaagtatccagcttaatcacgtatcttactcacgataccactggtccagatgagtttaggtaattttcaaacattaaatccaacttcaacggaaacaaatacactcaagggaagttatttttaaaaaggtactctgcatgttcccgcagtaatgttctgcacaacagtattgtaattgtaatggaatcataacctgctaactagtttgctttaatatggcttgtaattcttgacatttttcttaaaattaaaacgaatttttattttgaatttataactgcattttaaatatattggggacagattgcgctgagacctggttatgagcaagccaatcttttgaatctagagaatggaattcttaggtttatatttctgttaagaaatactataaatatgactcttatgagaagactttgttgctctgtagtgtttctgaatactgtatttgttggattgatcaaggctatttttcaaaaagctctctgcttcctgtttgtttgtttgtttgtttttgagacagagtcttgctctgtcgccggggctggagtgcaatggcgtgaactcagctcactgcaacctctgcctccctggttcaagctattctcctgcctcagcctcctgagtagctgggattacagggccacgcctggctaatttttgtatttttagtagagatggggtttcaccctgttggtcaggctggtctcaaactcctgaccttgtgatctgcccacctcagcctcccaaagtgctgggaagacaggcgttagccaccgtgcccggcctctgtttcctgttattagtgattttcctgcccaagattgcaacaacaaatatgtagaactacagactgtttagaatgctgagactgttctaagaaactttcaaaaacagtagcacttcaaggaatggtcactttctatgaaagaaactggtttgatagccataatcttattgctagctgcttttagcaaaagtcttttcttgaaaccaccacctatactctttaaacaaataaaaactaaaatctcttgctaatgtttcaggaagatttattttttctattttgctattgtggcgaaaattattttcagttataggatacttttttccttctgaaaagtaataagcttaaagtttttgtttctgtaagatgtaatgatagtaactattattttgggcatattaaccaacagaacaattatgtagtatgtatatcactttctcattagatctctaacttgaccttctagtacctttatgtgtgaggataaatttgttagatccttttattctcaatcttggataatgatgcaaaatggaattttgttttgtttgttggtagattcacatactaaaactttgcaggtaaagttgcttgcctcatgttagaatttaattagaaaactgaggctgcctttttttttttttttttttttttttaagacagagtcttgttctgtcgcccaggccagttttttttttcttgtacagatggggttttaccatgttgctcaggctggtctcaaactcctggagtcaagggatctatttgcctcagcctctcaaagtgctgggattacaggtgtgagccacggctcctggctccttgctccagaatcagttttttaatggaagatagctcatactttgtttttgtttttaaagagacagggtctcactctgttgcccaggctggtagtagcgtgatcatagctcactgcagtctcaaactcctggactcaaatagtgctctggagtacctagaactacaagtgcctaccaccacacccagctaatttatttgtttttttttttttagagatggggggggtctccctatgttgcccaggctggtctcaaactcttcacctcaagcaaaactcccactgcagaaagctttgggattacaggcatgagccaccatgccaagcccatacttattgttaataaagtttcagtgacttgcttactaatcttatgcaaaatttcatgtaatttatgtaatactacataacaatgctacatatggtatgtatacatacactgtatacacacaaaggtctgttctgggtattttatgtatcttatctctaggctttatggctctgaaatggagggaactggacataaatgtttcaaggaataaagtgaatgttttgtttgtttgtttgttttgagacggagtctcagtcaccaggctggagtgcagtgctgtgatctcagctcactgcaacctctgcctcctgggttcaagcgattctcctgcctcagcctcccgagtagctggcattacaggtgcctgccaccatgtccagctaatttttgtgtttttagtagagatggggtttcaccatgatggtcaggctggtctcgaactcctgacctcatgatccgccagcctcagcctcccatagtgctgggattataggcatgagccatgctcccggccaaagtgaatgttttgggtgaagtttatataaggatttgacttttgtatcattattaaagtttctgtcaggtaatacagtgttggccctctgttgaaataaaatgttacatatcgctgggtgtagtggctcatgcctttaatcccagtactttgggaggccaaggcaggaggattgcttgagctcagaagtttgagaccagcctgggcaacatagcaaaaccttgtcactataaaaaatacaaaaattagccaggcgtggtggtgcacgcctgtagtctcagctactcagtcggctgaggtgggaagatggcttcaagccgggagatggaggcttcagtgacctgtgacctgtgatcacaccacttaattcctcaaaacatttatgtcccagttccctccatttcagagccatgggcaacagagcgagaccctgtctcaaaaaaaaaattacatataagcccggtttaaagagaggataatatgcaaccaccctagttgaaacagagtgtatcacttctttctcaccctaaatttaatgcctagtttgaaaatcagtagacaataataaagttgataagctttaggttggtaggaaagctatgtaatctatatagtgtactaaatccttatatgtttttggtaaaaaaagactttaatagctaatttggacttcagaaaatgggttaatttcacgagtgcatatcacttttgactatattagtcaagcatattattaaagtttaaaaaactctaaaacttctgtactgtttttttcttaagtgctctcttccttatttctacattactacattcacatttctgctgtcaataagccctaatggagtgataaactttaagctagtagatactgcaccatgtcttgtggtggtgttttcttaatgaaatggaagctgtacttcctgtttgtttttaaatacttttgaaacagacagttcatgtaccccatcatttagagatgcagtttgaatttccatggaaaaaggtgccaattttggattgggaaaggagctgaagccccagtcaagactttgccatttggggtaatgcagcagattcctgtgtctgtatctttccagtgtgtgtgttaatccatagtgttctgagcaccagaagggtcatgtaaatctgaagttgttattaaaggtttttctatagtgaaa

SEQ ID NO: 19995 - DNA, 870 bp, Homo sapiens
  source 1..870: mol_type = unassigned DNA
gtattagcaagacatgaaaatctgtaggggcaccagaacctttaatcaagctcatgttttattgtaaaatattaggatgtagacaatacaatggtgggtgaagagaagatgtctctaagaaaccggctgtcaaagtccagggaaaatcctgaggaagatgaagaccagagaaaccctgcaaaggagtccctagagacacctagtaatggtcgaattgacataaaacagttgatagcaaagaagataaagttgacagcagaggcagaggaattgaagccattttttatgaaggaagttggcagtcactttgatgattttgtgaccaatctcattgaaaagtcagcatcattagataatggtgggtgcgctctcacaaccttttctgttcttgaaggagagaaaaacaaccatagagcgaaggatttgagagcacctccagaacaaggaaagatttttattgcaaggcgctctctcttagatgaactgcttgaagtggaccacatcagaacaatatatcacatgtttattgccctcctcattctctttatcctcagcacacttgtagtagattacattgatgaaggaaggctggtgcttgagttcagcctcctgtcttatgcttttggcaaatttcctaccgttgtttggacctggtggatcatgttcctgtctacattttcagttccctattttctgtttcaacattgggccactggctatagcaagagttctcatccgctgatccgttctctcttccatggctttcttttcatgatcttccagattggagttctaggttttggaccaacatatgttgtgttagcatatacactgccaccagcttcccggttcatcattatattcgagcag

SEQ ID NO: 19996 - DNA, 6861 bp, Homo sapiens
  source 1..6861: mol_type = unassigned DNA
aataggatgctcagccggaggtggccctgcgcgtgacgcagcggtgctcggaggcagggggcgtaggggccgggctgtccggcgctttagcttagcaggcgacgttgcgggccctgggcgccaggagagcttcccggagtcgaccttcctgctggctgctctgtgaccgcttcccggctctgccctcttggccgaagtgcccgctgccgggcgcgggcctcagacaatacaatggtgggtgaagagaagatgtctctaagaaaccggctgtcaaagtccagggaaaatcctgaggaagatgaagaccagagaaaccctgcaaaggagtccctagagacacctagtaatggaattgaagccattttttatgaaggaagttggcagtcactttgatgattttgtgaccaatctcattgaaaagtcagcatcattagataatggtgggtgcgctctcacaaccttttctgttcttgaaggagagaaaaacaaccatagagcgaaggatttgagagcacctccagaacaaggaaagatttttattgcaaggcgctctctcttagatgaactgcttgaagtggaccacatcagaacaatatatcacatgtttattgccctcctcattctctttatcctcagcacacttgtagtagattacattgatgaaggaaggctggtgcttgagttcagcctcctgtcttatgcttttggcaaatttcctaccgttgtttggacctggtggatcatgttcctgtctacattttcagttccctattttctgtttcaacattgggccactggctatagcaagagttctcatccgctgatccgttctctcttccatggctttcttttcatgatcttccagattggagttctaggttttggaccaacatatgttgtgttagcatatacactgccaccagcttcccggttcatcattatattcgagcagattcgttttgtaatgaaggcccactcatttgtcagagagaacgtgcctcgggtactaaattcagctaaggagaaatcaagcactgttccaatacctacagtcaaccagtatttgtacttcttatttgctcctacccttatctaccgtgacagctatcccaggaatcccactgtaagatggggttatgtcgctatgaagtttgcacaggtctttggttgctttttctatgtgtactacatctttgaaaggctttgtgcccccttgtttcggaatatcaaacaggagcccttcagcgctcgtgttctggtcctatgtgtatttaactccatcttgccaggtgtgctgattctcttccttactttttttgcctttttgcactgctggctcaatgcctttgctgagatgttacgctttggtgacaggatgttctataaggattggtggaactccacgtcatactccaactattatagaacctggaatgtggtggtccatgactggctatattactatgcttacaaggactttctctggtttttctccaagagattcaaatctgctgccatgttagctgtctttgctgtatctgctgtagtacacgaatatgccttggctgtttgcttgagctttttctatcccgtgctcttcgtgctcttcatgttctttggaatggctttcaacttcattgtcaatgatagtcggaaaaagccgatttggaatgttctgatgtggacttctcttttcttgggcaatggagtcttactctgcttttattctcaagaatggtatgcacgtcagcactgtcctctgaaaaatcccacatttttggattatgtccggccacgttcctggacttgtcgttacgtgttttagaagcttggactttgtttcctccttgtcactgaagattgggtagctccctgatttggagccagctgtttccagttgttactgaagttatctgtgttatttggaccactccaggctttacagatgactcactccattcctaggtcacttgaagccaaactgttggaagttcactggagtcttgtacacttaagcagagcagaactttttttgtggggctgggtggggggagaagaccgactaacagctgaagtaatgacagattgttgctgggtcatatcagctttatcccttggtaattatatctgttttgtttcttgactctgtccaatcagagaataaacatcatagtttcttggccactgaattagccaaaacacttaggaagaaatcacttaaatacctctggcttagaaattttttcatgcacactgttggaatgtatgctaattgaacatgcaattggggaagaaaaaatgtagaatgatttttgctatttctagtagaaagaaaatgtctgttttccaaagataatgttatacatcctattttgtaatttttttgaaaaaagttcaatgttcagttttccttagtttttaccttgttttctctataggtcatgatttctgtgaagcaaaaagatgccttttaccatgaattcttgagtttacatcaataatattgtatattaaggggatcagaagtaggaaggaaaaaataagagatagcagaggaaaaagaaaaacatttcctcttataacttctgaagtaatttgtaaaaaagatttgtagagtcaatcatgtgtttaaattattttatcacaaacttaacatggaagatattcctttttaactttgtggtaacttctttgaagttatttagaaatatcctttggaacaattattttattgtctaataaatattgacttctcttgaattattttgcagactagtgagtctgtaccataagtattaatcacctccactcatattaaagtgatcattaagaatccagaagctggcttctgcatttgctcagttatacttttaatggtagtatgtttttaggtggaataaattaatatgtgattggtttcaaggaaatgtactctattatgtaatacttccattttataagatgcccatttctaatacaatgtgtgtaggaattatttgtatgtatgaggtatgattgtaaagattgagcattggaaggggtatcagagaccatgtagttcaactttccactcaaagtaagatttatgaattatttaaatgatagttgttacttggaacagccacttgagaggctctcttggtattgtttggaattgttttaaagtcagtttgagtctcacaagaaggtaagtagagtttcttaatagtcacaacttaatttgaaccacaagtatccagcttaatcacgtatcttactcacgataccactggtccagatgagtttaggtaattttcaaacattaaatccaacttcaacggaaacaaatacactcaagggaagttatttttaaaaaggtactctgcatgttcccgcagtaatgttctgcacaacagtattgtaattgtaatggaatcataacctgctaactagtttgctttaatatggcttgtaattcttgacatttttcttaaaattaaaacgaatttttattttgaatttataactgcattttaaatatattggggacagattgcgctgagacctggttatgagcaagccaatcttttgaatctagagaatggaattcttaggtttatatttctgttaagaaatactataaatatgactcttatgagaagactttgttgctctgtagtgtttctgaatactgtatttgttggattgatcaaggctatttttcaaaaagctctctgcttcctgtttgtttgtttgtttgtttttgagacagagtcttgctctgtcgccggggctggagtgcaatggcgtgaactcagctcactgcaacctctgcctccctggttcaagctattctcctgcctcagcctcctgagtagctgggattacagggccacgcctggctaatttttgtatttttagtagagatggggtttcaccctgttggtcaggctggtctcaaactcctgaccttgtgatctgcccacctcagcctcccaaagtgctgggaagacaggcgttagccaccgtgcccggcctctgtttcctgttattagtgattttcctgcccaagattgcaacaacaaatatgtagaactacagactgtttagaatgctgagactgttctaagaaactttcaaaaacagtagcacttcaaggaatggtcactttctatgaaagaaactggtttgatagccataatcttattgctagctgcttttagcaaaagtcttttcttgaaaccaccacctatactctttaaacaaataaaaactaaaatctcttgctaatgtttcaggaagatttattttttctattttgctattgtggcgaaaattattttcagttataggatacttttttccttctgaaaagtaataagcttaaagtttttgtttctgtaagatgtaatgatagtaactattattttgggcatattaaccaacagaacaattatgtagtatgtatatcactttctcattagatctctaacttgaccttctagtacctttatgtgtgaggataaatttgttagatccttttattctcaatcttggataatgatgcaaaatggaattttgttttgtttgttggtagattcacatactaaaactttgcaggtaaagttgcttgcctcatgttagaatttaattagaaaactgaggctgcctttttttttttttttttttttttttaagacagagtcttgttctgtcgcccaggccagttttttttttcttgtacagatggggttttaccatgttgctcaggctggtctcaaactcctggagtcaagggatctatttgcctcagcctctcaaagtgctgggattacaggtgtgagccacggctcctggctccttgctccagaatcagttttttaatggaagatagctcatactttgtttttgtttttaaagagacagggtctcactctgttgcccaggctggtagtagcgtgatcatagctcactgcagtctcaaactcctggactcaaatagtgctctggagtacctagaactacaagtgcctaccaccacacccagctaatttatttgtttttttttttttagagatggggggggtctccctatgttgcccaggctggtctcaaactcttcacctcaagcaaaactcccactgcagaaagctttgggattacaggcatgagccaccatgccaagcccatacttattgttaataaagtttcagtgacttgcttactaatcttatgcaaaatttcatgtaatttatgtaatactacataacaatgctacatatggtatgtatacatacactgtatacacacaaaggtctgttctgggtattttatgtatcttatctctaggctttatggctctgaaatggagggaactggacataaatgtttcaaggaataaagtgaatgttttgtttgtttgtttgttttgagacggagtctcagtcaccaggctggagtgcagtgctgtgatctcagctcactgcaacctctgcctcctgggttcaagcgattctcctgcctcagcctcccgagtagctggcattacaggtgcctgccaccatgtccagctaatttttgtgtttttagtagagatggggtttcaccatgatggtcaggctggtctcgaactcctgacctcatgatccgccagcctcagcctcccatagtgctgggattataggcatgagccatgctcccggccaaagtgaatgttttgggtgaagtttatataaggatttgacttttgtatcattattaaagtttctgtcaggtaatacagtgttggccctctgttgaaataaaatgttacatatcgctgggtgtagtggctcatgcctttaatcccagtactttgggaggccaaggcaggaggattgcttgagctcagaagtttgagaccagcctgggcaacatagcaaaaccttgtcactataaaaaatacaaaaattagccaggcgtggtggtgcacgcctgtagtctcagctactcagtcggctgaggtgggaagatggcttcaagccgggagatggaggcttcagtgacctgtgacctgtgatcacaccacttaattcctcaaaacatttatgtcccagttccctccatttcagagccatgggcaacagagcgagaccctgtctcaaaaaaaaaattacatataagcccggtttaaagagaggataatatgcaaccaccctagttgaaacagagtgtatcacttctttctcaccctaaatttaatgcctagtttgaaaatcagtagacaataataaagttgataagctttaggttggtaggaaagctatgtaatctatatagtgtactaaatccttatatgtttttggtaaaaaaagactttaatagctaatttggacttcagaaaatgggttaatttcacgagtgcatatcacttttgactatattagtcaagcatattattaaagtttaaaaaactctaaaacttctgtactgtttttttcttaagtgctctcttccttatttctacattactacattcacatttctgctgtcaataagccctaatggagtgataaactttaagctagtagatactgcaccatgtcttgtggtggtgttttcttaatgaaatggaagctgtacttcctgtttgtttttaaatacttttgaaacagacagttcatgtaccccatcatttagagatgcagtttgaatttccatggaaaaaggtgccaattttggattgggaaaggagctgaagccccagtcaagactttgccatttggggtaatgcagcagattcctgtgtctgtatctttccagtgtgtgtgttaatccatagtgttctgagcaccagaagggtcatgtaaatctgaagttgttattaaaggtttttctatagtg

SEQ ID NO: 19997 - DNA, 6794 bp, Homo sapiens
  source 1..6794: mol_type = unassigned DNA
aataggatgctcagccggaggtggccctgcgcgtgacgcagcggtgctcggaggcagggggcgtaggggccgggctgtccggcgctttagcttagcaggcgacgttgcgggccctgggcgccaggagagcttcccggagtcgaccttcctgctggctgctctgtgaccgcttcccggctctgccctcttggccgaagtgcccgctgccgggcgcgggcctcaggtcgaattgacataaaacagttgatagcaaagaagataaagttgacagcagaggcagaggaattgaagccattttttatgaaggaagttggcagtcactttgatgattttgtgaccaatctcattgaaaagtcagcatcattagataatggtgggtgcgctctcacaaccttttctgttcttgaaggagagaaaaacaaccatagagcgaaggatttgagagcacctccagaacaaggaaagatttttattgcaaggcgctctctcttagatgaactgcttgaagtggaccacatcagaacaatatatcacatgtttattgccctcctcattctctttatcctcagcacacttgtagtagattacattgatgaaggaaggctggtgcttgagttcagcctcctgtcttatgcttttggcaaatttcctaccgttgtttggacctggtggatcatgttcctgtctacattttcagttccctattttctgtttcaacattgggccactggctatagcaagagttctcatccgctgatccgttctctcttccatggctttcttttcatgatcttccagattggagttctaggttttggaccaacatatgttgtgttagcatatacactgccaccagcttcccggttcatcattatattcgagcagattcgttttgtaatgaaggcccactcatttgtcagagagaacgtgcctcgggtactaaattcagctaaggagaaatcaagcactgttccaatacctacagtcaaccagtatttgtacttcttatttgctcctacccttatctaccgtgacagctatcccaggaatcccactgtaagatggggttatgtcgctatgaagtttgcacaggtctttggttgctttttctatgtgtactacatctttgaaaggctttgtgcccccttgtttcggaatatcaaacaggagcccttcagcgctcgtgttctggtcctatgtgtatttaactccatcttgccaggtgtgctgattctcttccttactttttttgcctttttgcactgctggctcaatgcctttgctgagatgttacgctttggtgacaggatgttctataaggattggtggaactccacgtcatactccaactattatagaacctggaatgtggtggtccatgactggctatattactatgcttacaaggactttctctggtttttctccaagagattcaaatctgctgccatgttagctgtctttgctgtatctgctgtagtacacgaatatgccttggctgtttgcttgagctttttctatcccgtgctcttcgtgctcttcatgttctttggaatggctttcaacttcattgtcaatgatagtcggaaaaagccgatttggaatgttctgatgtggacttctcttttcttgggcaatggagtcttactctgcttttattctcaagaatggtatgcacgtcagcactgtcctctgaaaaatcccacatttttggattatgtccggccacgttcctggacttgtcgttacgtgttttagaagcttggactttgtttcctccttgtcactgaagattgggtagctccctgatttggagccagctgtttccagttgttactgaagttatctgtgttatttggaccactccaggctttacagatgactcactccattcctaggtcacttgaagccaaactgttggaagttcactggagtcttgtacacttaagcagagcagaactttttttgtggggctgggtggggggagaagaccgactaacagctgaagtaatgacagattgttgctgggtcatatcagctttatcccttggtaattatatctgttttgtttcttgactctgtccaatcagagaataaacatcatagtttcttggccactgaattagccaaaacacttaggaagaaatcacttaaatacctctggcttagaaattttttcatgcacactgttggaatgtatgctaattgaacatgcaattggggaagaaaaaatgtagaatgatttttgctatttctagtagaaagaaaatgtctgttttccaaagataatgttatacatcctattttgtaatttttttgaaaaaagttcaatgttcagttttccttagtttttaccttgttttctctataggtcatgatttctgtgaagcaaaaagatgccttttaccatgaattcttgagtttacatcaataatattgtatattaaggggatcagaagtaggaaggaaaaaataagagatagcagaggaaaaagaaaaacatttcctcttataacttctgaagtaatttgtaaaaaagatttgtagagtcaatcatgtgtttaaattattttatcacaaacttaacatggaagatattcctttttaactttgtggtaacttctttgaagttatttagaaatatcctttggaacaattattttattgtctaataaatattgacttctcttgaattattttgcagactagtgagtctgtaccataagtattaatcacctccactcatattaaagtgatcattaagaatccagaagctggcttctgcatttgctcagttatacttttaatggtagtatgtttttaggtggaataaattaatatgtgattggtttcaaggaaatgtactctattatgtaatacttccattttataagatgcccatttctaatacaatgtgtgtaggaattatttgtatgtatgaggtatgattgtaaagattgagcattggaaggggtatcagagaccatgtagttcaactttccactcaaagtaagatttatgaattatttaaatgatagttgttacttggaacagccacttgagaggctctcttggtattgtttggaattgttttaaagtcagtttgagtctcacaagaaggtaagtagagtttcttaatagtcacaacttaatttgaaccacaagtatccagcttaatcacgtatcttactcacgataccactggtccagatgagtttaggtaattttcaaacattaaatccaacttcaacggaaacaaatacactcaagggaagttatttttaaaaaggtactctgcatgttcccgcagtaatgttctgcacaacagtattgtaattgtaatggaatcataacctgctaactagtttgctttaatatggcttgtaattcttgacatttttcttaaaattaaaacgaatttttattttgaatttataactgcattttaaatatattggggacagattgcgctgagacctggttatgagcaagccaatcttttgaatctagagaatggaattcttaggtttatatttctgttaagaaatactataaatatgactcttatgagaagactttgttgctctgtagtgtttctgaatactgtatttgttggattgatcaaggctatttttcaaaaagctctctgcttcctgtttgtttgtttgtttgtttttgagacagagtcttgctctgtcgccggggctggagtgcaatggcgtgaactcagctcactgcaacctctgcctccctggttcaagctattctcctgcctcagcctcctgagtagctgggattacagggccacgcctggctaatttttgtatttttagtagagatggggtttcaccctgttggtcaggctggtctcaaactcctgaccttgtgatctgcccacctcagcctcccaaagtgctgggaagacaggcgttagccaccgtgcccggcctctgtttcctgttattagtgattttcctgcccaagattgcaacaacaaatatgtagaactacagactgtttagaatgctgagactgttctaagaaactttcaaaaacagtagcacttcaaggaatggtcactttctatgaaagaaactggtttgatagccataatcttattgctagctgcttttagcaaaagtcttttcttgaaaccaccacctatactctttaaacaaataaaaactaaaatctcttgctaatgtttcaggaagatttattttttctattttgctattgtggcgaaaattattttcagttataggatacttttttccttctgaaaagtaataagcttaaagtttttgtttctgtaagatgtaatgatagtaactattattttgggcatattaaccaacagaacaattatgtagtatgtatatcactttctcattagatctctaacttgaccttctagtacctttatgtgtgaggataaatttgttagatccttttattctcaatcttggataatgatgcaaaatggaattttgttttgtttgttggtagattcacatactaaaactttgcaggtaaagttgcttgcctcatgttagaatttaattagaaaactgaggctgcctttttttttttttttttttttttttaagacagagtcttgttctgtcgcccaggccagttttttttttcttgtacagatggggttttaccatgttgctcaggctggtctcaaactcctggagtcaagggatctatttgcctcagcctctcaaagtgctgggattacaggtgtgagccacggctcctggctccttgctccagaatcagttttttaatggaagatagctcatactttgtttttgtttttaaagagacagggtctcactctgttgcccaggctggtagtagcgtgatcatagctcactgcagtctcaaactcctggactcaaatagtgctctggagtacctagaactacaagtgcctaccaccacacccagctaatttatttgtttttttttttttagagatggggggggtctccctatgttgcccaggctggtctcaaactcttcacctcaagcaaaactcccactgcagaaagctttgggattacaggcatgagccaccatgccaagcccatacttattgttaataaagtttcagtgacttgcttactaatcttatgcaaaatttcatgtaatttatgtaatactacataacaatgctacatatggtatgtatacatacactgtatacacacaaaggtctgttctgggtattttatgtatcttatctctaggctttatggctctgaaatggagggaactggacataaatgtttcaaggaataaagtgaatgttttgtttgtttgtttgttttgagacggagtctcagtcaccaggctggagtgcagtgctgtgatctcagctcactgcaacctctgcctcctgggttcaagcgattctcctgcctcagcctcccgagtagctggcattacaggtgcctgccaccatgtccagctaatttttgtgtttttagtagagatggggtttcaccatgatggtcaggctggtctcgaactcctgacctcatgatccgccagcctcagcctcccatagtgctgggattataggcatgagccatgctcccggccaaagtgaatgttttgggtgaagtttatataaggatttgacttttgtatcattattaaagtttctgtcaggtaatacagtgttggccctctgttgaaataaaatgttacatatcgctgggtgtagtggctcatgcctttaatcccagtactttgggaggccaaggcaggaggattgcttgagctcagaagtttgagaccagcctgggcaacatagcaaaaccttgtcactataaaaaatacaaaaattagccaggcgtggtggtgcacgcctgtagtctcagctactcagtcggctgaggtgggaagatggcttcaagccgggagatggaggcttcagtgacctgtgacctgtgatcacaccacttaattcctcaaaacatttatgtcccagttccctccatttcagagccatgggcaacagagcgagaccctgtctcaaaaaaaaaattacatataagcccggtttaaagagaggataatatgcaaccaccctagttgaaacagagtgtatcacttctttctcaccctaaatttaatgcctagtttgaaaatcagtagacaataataaagttgataagctttaggttggtaggaaagctatgtaatctatatagtgtactaaatccttatatgtttttggtaaaaaaagactttaatagctaatttggacttcagaaaatgggttaatttcacgagtgcatatcacttttgactatattagtcaagcatattattaaagtttaaaaaactctaaaacttctgtactgtttttttcttaagtgctctcttccttatttctacattactacattcacatttctgctgtcaataagccctaatggagtgataaactttaagctagtagatactgcaccatgtcttgtggtggtgttttcttaatgaaatggaagctgtacttcctgtttgtttttaaatacttttgaaacagacagttcatgtaccccatcatttagagatgcagtttgaatttccatggaaaaaggtgccaattttggattgggaaaggagctgaagccccagtcaagactttgccatttggggtaatgcagcagattcctgtgtctgtatctttccagtgtgtgtgttaatccatagtgttctgagcaccagaagggtcatgtaaatctgaagttgttattaaaggtttttctatagtg

SEQ ID NO: 19998 - DNA, 5245 bp, Homo sapiens
  source 1..5245: mol_type = unassigned DNA
agccacgcccgctcgagagccggggggctgtcctcgccccccccacctttcccctccctccgaccccctcccggccgcgctccctcccctcctcccgcgccggcccccggcccgcccccggctcggctcgcgggaggcgctgggcgccggggctggcgcgctctcccgggctcacacacagccgcgcacgcacgcccggggccgctctccgcgccggcccttgctccccgcgcccatgcggacggaccgagcgacggaagatggctgacgactccacggggccccgaggatgcggcccggcggcggcggcggcgggagcggcagcggcagcgagggcggcaggggcagcggcagcagcggcggcgttggctgcggcggcggcggcggcggcagcaggagccggagcgacggcggcggcatccccgagactctccgcactatccttacccgtgacagccactgacgtcctccgccgctagaagagaccccgcttctcggcgcctgccctccccctcgcggctcggtccggccccgccagcaccgctacctccgccagcctcgccaccatcagcaccacctccaccgccgccgccgccgccaccaccaccgccggcggcggcagcagccatttcatctccacagaaaccagacacaaaaacatggcagaaatggagaaagaagggagacctcccgaaaataaacggagcaggaagccggctcacccagtgaaaagggagatcaatgaggagatgaagaactttgcagaaaacaccatgaatgaactccttggctggtatggctatgataaggttgaattaaaagatggtgaggatattgaattcaggagctaccctacagatggggagagccggcagcacatttctgttctcaaagaaaattctttgccaaaaccaaaattacccgaggacagtgttatttcaccatacaatataagcacaggctattcagggcttgccactggaaatggactcagtgactcacctgcagggtcaaaggatcatggcagtgtgcccattattgtacctttaattccaccacctttcataaagccaccagcagaagatgatgtgtcaaatgtacaaataatgtgtgcctggtgccagaaagtgggaatcaagcgctattccctgagtatgggaagtgaggtgaaaagcttctgcagcgagaagtgctttgcggcctgccgacgagcctacttcaagagaaataaggctagagatgaagatggacatgctgaaaattttccccagcagcactatgctaaggaaactccaaggcttgccttcaagaataactgcgaactacttgtatgtgactggtgtaagcacataagacacacaaaagaatacctggattttggggacggggaaagaaggcttcagttctgcagtgcaaaatgtctcaatcaatacaaaatggacattttctacaaagagacccaggccaatcttccagctgggctgtgcagcacattacaccctcccatggaaaataaagcagaaggcaccggggtgcagctgctcactccagactcttggaatatcccgctaacagatgctcggaggaaggccccctccccggtggctacagctggccaaagccagggccctggcccgtcggcgtccaccaccgtctctccatctgacactgccaactgctctgtcactaaaatccccacgccagtgcccaagtccatccccatcagcgagactccaaatatccctcctgtctccgtccagccacctgctagcatcgggcctccccttggcgtcccgcctcggagccctcccatggtgatgaccaaccgcggcccggtgccgctgcccatcttcatggagcagcagatcatgcagcagatccgcccgcccttcatccgcgggcctccgcaccatgcctccaaccccaacagccccctgtccaaccccatgcttcccggcatcgggcccccgcccggtggccccagaaacctgggccccacttccagccccatgcaccggcccatgctatcgccccacatccaccccccgagcacccccaccatgcccgggaaccccccaggcctgctgcccccgccgcctccgggcgccccgctgccgagtcttcccttcccgccagtgagcatgatgccaaatggcccgatgccggtgccccagatgatgaatttcgggctgccgtcgcttgccccgctggtgccgcccccgaccctgctcgtgccgtaccccgtgatcgtgcccctaccggtgcccatccccatccccatccctatccctcacgtcagcgactccaagccccccaacgggttctccagcaacggggagaacttcattccgaacgcccctggcgactccgcggcggcgggcggcaagccaagcggacactccctgtccccccgggactccaagcagggctcgtccaagtccgcggactcgccccccggctgctcgggccaggccctgagcctggcgcccacgcccgccgagcatggccggagcgaggtggtggacctgacgcggcgcgccggcagccccccgggccccccgggcgcgggcggccagctcggcttcccaggcgtgctgcagggcccgcaggacggcgtcatcgacctgaccgtgggccaccgagcccggctgcacaacgtgatccaccgcgcgctgcacgcgcacgtcaaggcggagcgcgagccgagcgccgcggagcgcaggacctgcggcggctgcagggacggccactgcagcccgcccgccgccggcgacccaggcccgggcgccccggcgggccccgaggcggccgcggcctgcaacgtcatcgtgaacggcacgcgcggcgccgccgccgagggcgctaagagcgcggagccgcctcccgagcagccgccgccgccgccgccgcccgcgccccccaagaagctgctgtcgcctgaggaaccggcggtgagcgagctagagtcggtcaaggagaataactgtgcttccaactgccacctggacggggaggcggccaaaaagctgatgggcgaggaggccctggcggggggcgacaagtcagacccgaaccttaataaccccgcggacgaggaccatgcctatgctctgcggatgctgcccaagaccggctgcgtgatccagcctgtgccaaaacccgcggagaaggctgccatggcaccgtgcatcatctcctcgcccatgctcagcgccgggcctgaggacctggagccgccgctcaaaaggaggtgcctccgaattagaaatcagaataagtaaaaggaacgttcactcacagggtacgctcatggagagagggcgcagagcaaaccatgtcacgccatccaatgacaccagctggtcagctcaccaccccctctggctaaaactcaagcaaataaagccgcttcctgtcattaagcatctcagaggaagcagccctccctcgatggcctctagcccagagaagcccgcgcatcttggacccaccaagcaggcccagccttcctgctgccaccatctctgcttctccccagaggaacttagggatttcacccctggcttttaaaaaaaacgaaataccgacaagccacaaggaccaatgtaggtattctccccgccccatcttcaaggctcagcgactgaggctggaagatgatatggattggaacacaaaaaatctttttttaatctttttaaaaactgctgtggttttgctgctacactaagaattgtgatttgcattgtacggttttggacctatattgttcacgttttgatggcggagaggggtggtcctggaggcccaatgcttcagagtcatctctgtcctgcccgggatgcacttttaaatgaagagttagaatattttattggctaatatacttttcttgttatttttacaaaggccacctttatcctttttgatgccatattttcagtgttacacttttatggcttttaattttcgatttgacagatgtaagaagcagcatgaatagtttatactgtggtttttcagagactgaatgccaagagaactcggtaaatgtttattcttctcagctttctctttaaattcccctaaatagcgccccatttgggaacagagcaagagtgttgaactgaagaccaaaatgccctcaaggtgtaaaataatccgagggggaatatttgctgggcgtcaggaaagactcagatgaaatttcaaccctgatggttttcggtgatccaggaagtcagtgagacaatctctctatatgcagagccctttcatgataattagaatggtatggacaaaccaatgaaaacaagagggaaagtgagaaagatcacccatgattctgtttcactgtttgctttctcctgtcatggttaagagaaatgtgcaattcgatcctcaatcagtgggtggaggataacagggtagattcacttgtgtgcacttgtacagttgtagctgcgagtccagaagtcctctagagcatgtgtactggcactgagttggtgagacagttgtggagtatcccattctgatgagtacagaaaaaaaaagaaaaagaaaagaagagaaaaaattaagaaaaaaatcaaaaaaggaagaaaactaaaaaaaaaaaaaatcaaatcaccttgtgattcagtgtatctgtttactaactcaaataaagcaattgttccctctggaggggtccaggtgcccccgccccacaaggccgcggagcctcagcaggaggggtggcgagttgcgggtgggcagggccaggacggtgtggcgccagccttgaagcaccacggcccaaggatgcggtgtacatactgtatttctagattctcctttgtacagagtcacttcacaagtcaagctactgttttacaggtgctccttatttattagagctgtgagagcttgggggacacacctggcgagcaagctcgctttttaaaaatgaaatttgggggcaggggaaggggaggcgggagggaggggaagctcgcaagcccggggagagatttataaaagtaaacaaaagaaaaccttccagcaacaaattaaaaaataataacaaatcaaccccagcaccaaacccacccaggcaggaagaagccgcccctcctctggggccatatttttctgctgggtcacaacattctcctctccctgactggtgtcagattcatcaaacaaaaaataaatctcgaagaaaaaaaatgcacttacatgtgcttatttggcttttctc

SEQ ID NO: 19999 - DNA, 1535 bp, Homo sapiens
  source 1..1535: mol_type = unassigned DNA
ggggctggcgcgctctcccgggctcacacacagccgcgcacgcacgcccggggccgctctccgcgccggcccttgctccccgcgcccatgcggacggaccgagcgacggaagatggctgacgactccacggggccccgaggatgcggcccggcggcggcggcggcgggagcggcagcggcagcgagggcggcaggggcagcggcagcagcggcggcgttggctgcggcggcggcggcggcggcagcaggagccggagcgacggcggcggcatccccgagactctccgcactatccttacccgtgacagccactgacgtcctccgccgctagaagagaccccgcttctcggcgcctgccctccccctcgcggctcggtccggccccgccagcaccgctacctccgccagcctcgccaccatcagcaccacctccaccgccgccgccgccgccaccaccaccgccggcggcggcagcagccatttcatctccacagaaaccagacacaaaaacatggcagaaatggagaaagaagggagacctcccgaaaataaacggagcaggaagccggctcacccagtgaaaagggagatcaatgaggagatgaagaactttgcagaaaacaccatgaatgaactccttggctggtatggctatgataaggttgaattaaaagatggtgaggatattgaattcaggagctaccctacagatggggagagccggcagcacatttctgttctcaaagaaaattctttgccaaaaccaaaattacccgaggacagtgttatttcaccatacaatataagcacaggctattcagggcttgccactggaaatggactcagtgactcacctgcagggtcaaaggatcatggcagtgtgcccattattgtacctttaattccaccacctttcataaagccaccagcagaagatgatgtgtcaaatgtacaaataatgtgtgcctggtgccagaaagtgggaatcaagcgctattccctgagtatgggaagtgaggtgaaaagcttctgcagcgagaagtgctttgcggcctgccgacgagcctacttcaagagaaataaggtttatcctttgtctgtgtcattcagcttttcccattctaccaaggaggatgagcagaagatgactctgcataatttatggataatttctcctgtttttctgcctgtattctcccatgttatattgccattcattgtatctagagtgtaaaatttaaacattttagacttagaatgttgatccacaagattaatcctgacatgcttctgagactgatgtgaaaaaaattacaaagttaaatttctacaaaatttatgattataagatgtaggctgtattgatttttagtcttttcatttgatcttccttgcaaacttggttctgagtacttactgatacacttagattgtccaagaaatcaacttcagatgagagaacataaaatactttggaaatgagtttgtgtttctactattttcataaagatctagttcttttttttccccccccg

SEQ ID NO: 20000 - DNA, 572 bp, Homo sapiens
  source 1..572: mol_type = unassigned DNA
gcggccgcggcctgcaacgtcatcgtgaacggcacgcgcggcgccgccgccgagggcgctaagagcgcggagccgcctcccgagcagccgccgccgccgccgccgcccgcgccccccaagaagctgctgtcgcctgaggaaccggcggtgagcgagctagagtcggtcaaggagaataactgtgcttccaactgccacctggacggggaggcggccaaaaagctgatgggcgaggaggccctggcggggggcgacaagtcagacccgaaccttaataaccccgcggacgaggaccatgcctatgctctgcggatgctgcccaagaccggctgcgtgatccagcctgtgccaaaacccgcggagaaggctgccatggcaccgtgcatcatctcctcgcccatgctcagcgccgggcctgaggacctggagccgccgctcaaaaggaggtgcctccgaattagaaatcagaataagtaaaaggtaatgggaggcttcgatagggaagagggtggcattgctaaagtgagtgacactgcacatctctgacctcatagacagactcctgcctaatg

SEQ ID NO: 20001 - DNA, 1550 bp, Homo sapiens
  misc_feature 1..1550: note = ENST00000618129
  source 1..1550: mol_type = unassigned DNA
cagacacaaaaacatggcagaaatggagaaagaagggagacctcccgaaaataaacggagcaggaagccggctcacccagtgaaaagggagatcaatgaggagatgaagaactttgcagaaaacaccatgaatgaactccttggctggtatggctatgataaggttgaattaaaagatggtgaggatattgaattcaggagctaccctacagatggggagagccggcagcacatttctgttctcaaagaaaattctttgccaaaaccaaaattacccgaggacagtgttatttcaccatacaatataagcacaggctattcagggcttgccactggaaatggactcagtgactcacctgcagggtcaaaggatcatggcagtgtgcccattattgtacctttaattccaccacctttcataaagccaccagcagatgagaaaactgaggcccagaaaagttgagcaacttgcctgaggttacacagatactgagtggcagagctgatatttgaacctatacattatgtctccttagcctatatccttaaccactggattatccaaaacactatggcagtatttcagtcagttaagtatttactgaatgttccttacattgtgctagacaatacagatgtatgtcatcatccttgactaccaagaacttaatagtactgttggcatatgatcaaaacatcattctagttttaccttggaatgtatgatataattttagttgcatatggaaggtgcatggtaggactacaagggcaattaaagtggagtagcaaaaagtctataggcagataatcaagaactgttatatttatacagttgaggggaaatggcacctgaaacttaatataggctagaagatagcaattgaaaactcaaattcaaagtgataaaaaaagatccaaaatgaaacctgaaaatgttagatactatgatatgggtcctgctttattgttctctttacaattaagggttcttaaaaatgtgtaaggcacattttagtgtgttctatcatttttaatgccagatgaaatgtataatttgaatggtagcatgaggtggtgaagactgccagagcaagaaccaggagacctgggttgctaatgccagctctgccatttattggccatgtaatcttgaataaggtagtttctctaagccttagtttccttgtctgcaaaatgatgtggttagcttacatgatctgttatttccctatatttataaaatccttattttgtgacttgtatggttagttgctctcctgattttatgatttgagagggtatgttttaatgtgctttaacaggtacttgttaattgaacagatataaagcaaactgcatatatgtatagttataacagccagaagtctgatgaaagatttatactgcttgggacaagttttaatgattgttaatttttactttgaacaaatagtgaatgaaataatagatttgacattttttaagataacaagtgctaggaaatatgaaatgtgagtaaataaaaaggttcatatgttattagaact

SEQ ID NO: 20002 - DNA, 2761 bp, Homo sapiens
  misc_feature 1..2761: note = ENST00000340600
  source 1..2761: mol_type = unassigned DNA
cttcccatagccgcggcctcaactaaaagtggccattgacctttcaagctttcgagcagtgatgcaatagaatagtatttcaaagaaaaatgcttatcgaaattttggatccggttttcccgtgattgttaagggtttcttttaaaaagtaggtcacatttcaagtaggtcatatttcgggggcgggtgcgcagacaaggagatgagtttccactaaggccagggggcctccaacggggttggaggtgagaatcccaggtagggtagaggtgccgagatccttccgaatcccagccctggggcgtcagccctgcagggaatggcagagacactctccggactgagggaaccgaggccagtcaccaagccccttccgggcgcgcaggcgatcagtgggtgaccgcggctgcgagggactttgtcatccgtcctccaggatctggggagaaagagccccatcccttctctctctgccaccatttcggacaccccgcagggactcgttttgggattcgcactgacttcaaggaaggacgcgaacccttctctgaccccagctcgggcggccacctgtctttgccgcggtgacccttctctcatgaccctgcggtgccttgagccctccgggaatggcggggaagggacgcggagccagtgggggaccgcggggtcggcggaggagccatccccgcaggcggcgcgtctggcgaaggccctgcgggagctcggtcagacaggatggtactggggaagtatgactgttaatgaagccaaagagaaattaaaagaggcaccagaaggaactttcttgattagagatagctcgcattcagactacctactaacaatatctgttaaaacatcagctggaccaactaatcttcgaatcgaataccaagacggaaaattcagattggactctatcatatgtgtcaaatccaagcttaaacaatttgacagtgtggttcatctgatcgactactatgttcagatgtgcaaggataagcggacaggtccagaagccccccggaacggcactgttcacctttatctgaccaaaccgctctacacgtcagcaccatctctgcagcatctctgtaggctcaccattaacaaatgtaccggtgccatctggggactgcctttaccaacaagactaaaagattacttggaagaatataaattccaggtataaatgtttctctttttttaaacatgtctcacatagagtatctccgaatgcagctatgtaaaagagaaccaaaacttgagtgctctggataactatatggaatgctttctaagaacagctgaagctaatctaatttaaatttaacagcttgaagaggtagctaggtgtttaaagttcctccagatacttttacctgagtgatgcttcccttcctaaggctgaccaagacctgttgatccttttagattaaaaataaaatgtcgcatgtaaaggctgaagtcgcgttttatcagaatgccttgccttcttaggttcttttccattatgtcaaaggtccaggctccagtaggagagaaagaactcctcataggaatactgaagaagtgggaaggaaccaagctgacacaggcctcactgcaatttgatatgcctgctgatcagagtctcttgggcattttatattttgcattctgatgtacctaggagttttgttaaacagatgatgtatgtgagtatttatcccattttatgcaattaaccaaatcaaccaaaaaaagtgaccatgaagtcctgtatttgtctttttactacatgtaggaactctcatgtgaatgagtactgtagtaatccattctatgggagccttatttcagaaatatttcaaactggtgcaaatggaaaagactttctcttttcctttaaagctaaagacaagaatatcatgctatacaggtgcaactcaatccccgttaataaaaaccaatgtaggtataggcattctaccctttgaaatagctgtgtcccaacctgttgccattgattttttggaaatggctttagaaatatccaagttgtccttgaattgtctaaccatggacataaacagttgtctcccttctactgtgtagaatactttgacttaattttcttccagatacagggggatacctgcctgtttttcaaagtgtttatttactgctgttactatttgattagaatgtattaaataaaaaaaacctgatttctacaagttgcacttattgagttctagagaacgtacactttcatggtaatagaggattgccataaaaacttacgtcaagtgaaataagccaattattcaacaaaaggtagaacattacttgccattctgtaaagttatgggctgtacctgccccctttgcaatttggaaagcatggtttagaaactacaggcattgtcaagtggccgggtcttttataatttgaataggcataacactgatgtcctctgtgtttccaaaaacatggtttagaaactacaaacattatgacatggccagtcttttacaagttgagtaggcataatactaaagaaaaatacaaagttttgtggccacttattttttgctatgttagtctgcataactgttataaatgtaccatcttttctagagtccagacattatttattttatggctttaaaattttcctgcatagctacaatcctgtggtgtgtcaccataaaggtggaccctgtgtgaatgagaaaattcagttataaattgtaataaaacctgcttactgga

SEQ ID NO: 20003 - DNA, 2072 bp, Homo sapiens
  misc_feature 1..2072: note = ENST00000549206
  source 1..2072: mol_type = unassigned DNA
acctgatcaaggggaccgcctccggtccccggccgtgggcaccgggacgagcacggcgtccccacgccatcgatgtgtcttagagccggagagtctggtttccgaggacccacagtcgctcctgcacgcccaccccccgcaaaagtgcggccaggagggtcgcatcgagggggcgccgccgggatgtttagaggaacccacccccgtggcaggccaagggccaaggatcgctatccttccctgaacccgggcgctcagctggcccgggcgatcagtgggtgaccgcggctgcgagggactttgtcatccgtcctccaggatctggggagaaagagccccatcccttctctctctgccaccatttcggacaccccgcagggactcgttttgggattcgcactgacttcaaggaaggacgcgaacccttctctgaccccagctcgggcggccacctgtctttgccgcggtgacccttctctcatgaccctgcggtgccttgagccctccgggaatggcggggaagggacgcggagccagtgggggaccgcggggtcggcggaggagccatccccgcaggcggcgcgtctggcgaaggccctgcgggagctcggtcagacaggatggtactggggaagtatgactgttaatgaagccaaagagaaattaaaagaggcaccagaaggaactttcttgattagagatagctcgcattcagactacctactaacaatatctgttaaaacatcagctggaccaactaatcttcgaatcgaataccaagacggaaaattcagattggactctatcatatgtgtcaaatccaagcttaaacaatttgacagtgtggttcatctgatcgactactatgttcagatgtgcaaggataagcggacaggtccagaagccccccggaacggcactgttcacctttatctgaccaaaccgctctacacgtcagcaccatctctgcagcatctctgtaggctcaccattaacaaatgtaccggtgccatctggggactgcctttaccaacaagactaaaagattacttggaagaatataaattccaggtataaatgtttctctttttttaaacatgtctcacatagagtatctccgaatgcagctatgtaaaagagaaccaaaacttgagtgctctggataactatatggaatgctttctaagaacagctgaagctaatctaatttaaatttaacagcttgaagaggtagctaggtgtttaaagttcctccagatacttttacctgagtgatgcttcccttcctaaggctgaccaagacctgttgatccttttagattaaaaataaaatgtcgcatgtaaaggctgaagtcgcgttttatcagaatgccttgccttcttaggttcttttccattatgtcaaaggtccaggctccagtaggagagaaagaactcctcataggaatactgaagaagtgggaaggaaccaagctgacacaggcctcactgcaatttgatatgcctgctgatcagagtctcttgggcattttatattttgcattctgatgtacctaggagttttgttaaacagatgatgtatgtgagtatttatcccattttatgcaattaaccaaatcaaccaaaaaaagtgaccatgaagtcctgtatttgtctttttactacatgtaggaactctcatgtgaatgagtactgtagtaatccattctatgggagccttatttcagaaatatttcaaactggtgcaaatggaaaagactttctcttttcctttaaagctaaagacaagaatatcatgctatacaggtgcaactcaatccccgttaataaaaaccaatgtaggtataggcattctaccctttgaaatagctgtgtcccaacctgttgccattgattttttggaaatggctttagaaatatccaagttgtccttgaattgtctaaccatggacataaacagttgtctcccttctactgtgtagaatactttgacttaattttcttccagatacagggggatacctgcctgtttttcaaagtgtttatttactgctgttactatttgattagaa

SEQ ID NO: 20004 - DNA, 1065 bp, Homo sapiens
  misc_feature 1..1065: note = ENST00000536696
  source 1..1065: mol_type = unassigned DNA
caagggaggcgcgtcggtctgggaagtcgcgcgcactcgctgctcctgggaccgacgtttaactcttgccaagtctcgtcgcagccgccgcggctggcgggccttgggcttcccctgaagcatgagccctctcgcccgcagccaccctcaccgcgtggcccgcggacagtgcgcgccggggtcccgggtgcacagcctcaggataccccgtgcccgcagctcgggcgcccgcggcaggcgatcagtgggtgaccgcggctgcgagggactttgtcatccgtcctccaggatctggggagaaagagccccatcccttctctctctgccaccatttcggacaccccgcagggactcgttttgggattcgcactgacttcaaggaaggacgcgaacccttctctgaccccagctcgggcggccacctgtctttgccgcggtgacccttctctcatgaccctgcggtgccttgagccctccgggaatggcggggaagggacgcggagccagtgggggaccgcggggtcggcggaggagccatccccgcaggcggcgcgtctggcgaaggccctgcgggagctcggtcagacaggatggtactggggaagtatgactgttaatgaagccaaagagaaattaaaagaggcaccagaaggaactttcttgattagagatagctcgcattcagactacctactaacaatatctgttaaaacatcagctggaccaactaatcttcgaatcgaataccaagacggaaaattcagattggactctatcatatgtgtcaaatccaagcttaaacaatttgacagtgtggttcatctgatcgactactatgttcagatgtgcaaggataagcggacaggtccagaagccccccggaacggcactgttcacctttatctgaccaaaccgctctacacgtcagcaccatctctgcagcatctctgtaggctcaccattaacaaatgtaccggtgccatctggggactgcctttaccaacaagactaaaagattacttggaagaatataaattccaggtataaatgtttctctttttttaa

SEQ ID NO: 20005 - DNA, 744 bp, Homo sapiens
  misc_feature 1..744: note = ENST00000548091
  source 1..744: mol_type = unassigned DNA
cgcagctcggagcgccggggaagagagagtccgaaccgcggctctgccccgcggcctagcgttgctgcctgctttctccagccccttctcggcgtctggaagtgcgatcagtgggtgaccgcggctgcgagggactttgtcatccgtcctccaggatctggggagaaagagccccatcccttctctctctgccaccatttcggacaccccgcagggactcgttttgggattcgcactgacttcaaggaaggacgcgaacccttctctgaccccagctcgggcggccacctgtctttgccgcggtgacccttctctcatgaccctgcggtgccttgagccctccgggaatggcggggaagggacgcggagccagtgggggaccgcggggtcggcggaggagccatccccgcaggcggcgcgtctggcgaaggccctgcgggagctcggtcagacaggatggtactggggaagtatgactgttaatgaagccaaagagaaattaaaagaggcaccagaaggaactttcttgattagagatagctcgcattcagactacctactaacaatatctgttaaaacatcagctggaccaactaatcttcgaatcgaataccaagacggaaaattcagattggactctatcatatgtgtcaaatccaagcttaaacaatttgacagtgtggttcatctgatcgactactatgttcagatgtgcaaggataagcggacaggtccagaagcccc

SEQ ID NO: 20006 - DNA, 2391 bp, Homo sapiens
  misc_feature 1..2391: note = ENST00000549122
  source 1..2391: mol_type = unassigned DNA
gcggctctgccccgcggcctagcgttgctgcctgctttctccagccccttctcggcgtctggaagtgtctggagtttcttttttttatttcccctaaactgccattcaaattaataatcctcctaataacctgatctcccgctcctccccaccggcctgcctcccgccctcgctccttcctccctccctccctctctccttcccacctccagggtcgcagccggagggaaacccggcagcagtccgagagtggaggtgtcccagcccgtagggggcgtcgccgcgcggtgggggatggggtcgaggcaatgatcctcgaggcttttgtgtgccctctgcgcacggaactccgaccgccgcctccgagcgcggggctggttgcatccccgggcatctcgttcccaaattaaacgttaacgggggaaacaagggcagacgcccctcctctcccgggcccctcccacctccccttttccccccacccccccgccccatgtccgctgaggaggctgcctggtgcggaggcggcggcggcggccgcggccgaggtcgaggcgatcagtgggtgaccgcggctgcgagggactttgtcatccgtcctccaggatctggggagaaagagccccatcccttctctctctgccaccatttcggacaccccgcagggactcgttttgggattcgcactgacttcaaggaaggacgcgaacccttctctgaccccagctcgggcggccacctgtctttgccgcggtgacccttctctcatgaccctgcggtgccttgagccctccgggaatggcggggaagggacgcggagccagtgggggaccgcggggtcggcggaggagccatccccgcaggcggcgcgtctggcgaaggccctgcgggagctcggtcagacaggatggtactggggaagtatgactgttaatgaagccaaagagaaattaaaagaggcaccagaaggaactttcttgattagagatagctcgcattcagactacctactaacaatatctgttaaaacatcagctggaccaactaatcttcgaatcgaataccaagacggaaaattcagattggactctatcatatgtgtcaaatccaagcttaaacaatttgacagtgtggttcatctgatcgactactatgttcagatgtgcaaggataagcggacaggtccagaagccccccggaacggcactgttcacctttatctgaccaaaccgctctacacgtcagcaccatctctgcagcatctctgtaggctcaccattaacaaatgtaccggtgccatctggggactgcctttaccaacaagactaaaagattacttggaagaatataaattccaggtataaatgtttctctttttttaaacatgtctcacatagagtatctccgaatgcagctatgtaaaagagaaccaaaacttgagtgctctggataactatatggaatgctttctaagaacagctgaagctaatctaatttaaatttaacagcttgaagaggtagctaggtgtttaaagttcctccagatacttttacctgagtgatgcttcccttcctaaggctgaccaagacctgttgatccttttagattaaaaataaaatgtcgcatgtaaaggctgaagtcgcgttttatcagaatgccttgccttcttaggttcttttccattatgtcaaaggtccaggctccagtaggagagaaagaactcctcataggaatactgaagaagtgggaaggaaccaagctgacacaggcctcactgcaatttgatatgcctgctgatcagagtctcttgggcattttatattttgcattctgatgtacctaggagttttgttaaacagatgatgtatgtgagtatttatcccattttatgcaattaaccaaatcaaccaaaaaaagtgaccatgaagtcctgtatttgtctttttactacatgtaggaactctcatgtgaatgagtactgtagtaatccattctatgggagccttatttcagaaatatttcaaactggtgcaaatggaaaagactttctcttttcctttaaagctaaagacaagaatatcatgctatacaggtgcaactcaatccccgttaataaaaaccaatgtaggtataggcattctaccctttgaaatagctgtgtcccaacctgttgccattgattttttggaaatggctttagaaatatccaagttgtccttgaattgtctaaccatggacataaacagttgtctcccttctactgtgtagaatactttgacttaattttcttccagatacagggggatacctgcctgtttttcaaagtgtttatttactgctgttactatttgattagaatgtattaaataaaaaaaacctgatttctacaa

SEQ ID NO: 20007 - DNA, 3733 bp, Homo sapiens
  misc_feature 1..3733: note = ENST00000548537
  source 1..3733: mol_type = unassigned DNA
ggaactccgaccgccgcctccgagcgcggggctggttgcatccccgggcatctcgttcccaaattaaacgttaacgggggaaacaagggcagacgcccctcctctcccgggcccctcccacctccccttttccccccacccccccgccccatgtccgctgaggaggctgcctggtgcggaggcggcggcggcggccgcggccgaggtcgaggcgatcagtgggtgaccgcggctgcgagggactttgtcatccgtcctccaggatctggggagaaagagccccatcccttctctctctgccaccatttcggacaccccgcagggactcgttttgggattcgcactgacttcaaggaaggacgcgaacccttctctgaccccagctcgggcggccacctgtctttgccgcggtgacccttctctcatgaccctgcggtgccttgagccctccgggaatggcggggaagggacgcggagccagtgggggaccgcggggtcggcggaggagccatccccgcaggcggcgcgtctggcgaaggccctgcgggagctcggtcagacaggtagggagccgatcggccgcgacgcgtgcgggagggagcgcctccccaaggaagcagctaggaagcggggtcgaggtgggaagcaaagaataagatggaaatacgtcccttgcttccaagggaccgcggagagcacgctcgcagggtcctgggtccttgggaatgcgtaaggaaagtggttctccagggactcaggcctggcggagcgcagagcgcgggaagagcttcttggaaatagcttcttagcacgctggaagatttactgttttccgcagctgctcagggttaggctcccgggctcgaaccccggccggggaaagcgtcgggcgcctccctttgcacggggtgcaatcagcaagtcggtgccgcgggccccgcaggcccagcagcatctggctcccgggcggagctgcggctgcagcccaggatcttggcggccaagttcagggactgacactgccgcgagggcggctgcccgggcgtcgagagtaggctgcgaagcccccgccgagcgcggcttccatggtcggcgcgcccagggtactgccgctttcaagtacagtcaggcaattcgcgcggcacgctgtctctaggcatctgaaaaaagaaaaaagaaaaaaagtaaagtatctggcaaatcattctggctttccaaatccgtatcctaaaagcttacagttgtggcacagttgaaattttggtagcaacagggggagggagagggaaaagttctctcgcttgcgattccggtctttccgtgtgggccacgggctttccctcccggggaggcaccggcagattgcaagtatcccggtaattgtgggggtggggggagcacaaatgttcagacttcttaaatacggacggtctctgagccttcttagaaagcagagtgggccggggagatggtgcaggcagatgaaatcaagaatgcaggggagatggatggttgtgattgggtttggattagggcaaagttcaaaagagtttagggaagattgtaaacttgaagtagtaattatcacttgggaattcccatttcttagtgactggtaaggtagtcataaagcagcgaacagaagctattgtactagagctgtgcttttacaacaagtacatagcagtgctttctacatagaaggctgttcatagcaggctttgcagattctttttttttttttttttttttttttggtggggggcacaccaaccatccaaaaaagttgcttctgtttttactgtagttcaattacaggagttgggttttccactttttaaagggcatggcttttatttctaacttctgatttttttctaatttacctaaatctttattttacttaaataatgttaaaagtgtcatgcttcatcagccagtgtgtcatgctgcagatgttcttttggttcattagaagaaaatcttaagaagagcttcagaaagttgattttttaaaaaagaaagaaaactggctcgccgtttgtgttcataaaatggacccaaatttttattaaattcctactgaaagtatttgtggtggcccggtaaactttcgctcacacaccaccttttttttttttcttttttagagctaaaaaaattattgccaattacttgctctgttctaagaattcttataataactgttttaccctcttttctttttctttttgaacaaaaaccccaggatggtactggggaagtatgactgttaatgaagccaaagagaaattaaaagaggcaccagaaggaactttcttgattagagatagctcgcattcagactacctactaacaatatctgttaaaacatcagctggaccaactaatcttcgaatcgaataccaagacggaaaattcagattggactctatcatatgtgtcaaatccaagcttaaacaatttgacagtgtggttcatctgatcgactactatgttcagatgtgcaaggataagcggacaggtccagaagccccccggaacggcactgttcacctttatctgaccaaaccgctctacacgtcagcaccatctctgcagcatctctgtaggctcaccattaacaaatgtaccggtgccatctggggactgcctttaccaacaagactaaaagattacttggaagaatataaattccaggtataaatgtttctctttttttaaacatgtctcacatagagtatctccgaatgcagctatgtaaaagagaaccaaaacttgagtgctctggataactatatggaatgctttctaagaacagctgaagctaatctaatttaaatttaacagcttgaagaggtagctaggtgtttaaagttcctccagatacttttacctgagtgatgcttcccttcctaaggctgaccaagacctgttgatccttttagattaaaaataaaatgtcgcatgtaaaggctgaagtcgcgttttatcagaatgccttgccttcttaggttcttttccattatgtcaaaggtccaggctccagtaggagagaaagaactcctcataggaatactgaagaagtgggaaggaaccaagctgacacaggcctcactgcaatttgatatgcctgctgatcagagtctcttgggcattttatattttgcattctgatgtacctaggagttttgttaaacagatgatgtatgtgagtatttatcccattttatgcaattaaccaaatcaaccaaaaaaagtgaccatgaagtcctgtatttgtctttttactacatgtaggaactctcatgtgaatgagtactgtagtaatccattctatgggagccttatttcagaaatatttcaaactggtgcaaatggaaaagactttctcttttcctttaaagctaaagacaagaatatcatgctatacaggtgcaactcaatccccgttaataaaaaccaatgtaggtataggcattctaccctttgaaatagctgtgtcccaacctgttgccattgattttttggaaatggctttagaaatatccaagttgtccttgaattgtctaaccatggacataaacagttgtctcccttctactgtgtagaatactttgacttaattttcttccagatacagggggatacctgcctgtttttcaaagtgtttatttactgctgttactatttgattagaatgtattaaataaaaaaaacctgatttctacaa

SEQ ID NO: 20008 - DNA, 984 bp, Homo sapiens
  misc_feature 1..984: note = ENST00000549887
  source 1..984: mol_type = unassigned DNA
gcggccgaggtcgaggtaagagcgcggcgttggtggtttgcattttccgcagcgctcgcgaccgcccgctcggccccggcctcgcctcggagccccgcgagggctgcgcgctcgggccgattcctcgacagcgcccgcggcggcgagaaccaccgcagccatcctggtccgggagcgaccgccgcggcacccccaaccccgccagagcgggcaccaggaagcggggggaggggagcgaggagcctcccgggcggagatgcggcagctcccgcacctccgcaccccgggcgatcagtgggtgaccgcggctgcgagggactttgtcatccgtcctccaggatctggggagaaagagccccatcccttctctctctgccaccatttcggacaccccgcagggactcgttttgggattcgcactgacttcaaggaaggacgcgaacccttctctgaccccagctcgggcggccacctgtctttgccgcggtgacccttctctcatgaccctgcggtgccttgagccctccgggaatggcggggaagggacgcggagccagtgggggaccgcggggtcggcggaggagccatccccgcaggcggcgcgtctggcgaaggccctgcgggagctcggtcagacaggatggtactggggaagtatgactgttaatgaagccaaagagaaattaaaagaggcaccagaaggaactttcttgattagagatagctcgcattcagactacctactaacaatatctgttaaaacatcagctggaccaactaatcttcgaatcgaataccaagacggaaaattcagattggactctatcatatgtgtcaaatccaagcttaaacaatttgacagtgtggttcatctgatcgactactatgttcagatgtgcaaggataagcggacaggtccagaagccccccggaacggcactgttcacctttatctgaccaaaccgctctacacgtcagcaccat

SEQ ID NO: 20009 - DNA, 1716 bp, Homo sapiens
  misc_feature 1..1716: note = ENST00000551556
  source 1..1716: mol_type = unassigned DNA
gaggtcgaggtaagagcgcggcgttggtggtttgcattttccgcagcgctcgcgaccgcccgctcggccccggcctcgcctcggagccccgcgagggctgcgcgctcgggccgattcctcgacagcgcccgcggcggcgagaaccaccgcagccatcctggtccgggagcgaccgccgcggcacccccaaccccgccagagcgggcaccaggaagcggggggaggggagcgaggagcctcccgggcggagatgcggcagctcccgcacctccgcaccccgggttggtgcctcggggccccgcagcgctttagggcggagaaccaagtttgtgtgggtgcttcttcctgggggccctcgggctgcgccaggtgtgagaccggaatgccaatttggggaatctctcctgttctttcctttttaattttttctacttgtccttgacaagggcctattcccactggatctgcaggtgactatttgctcttcctaggtcgccagtctttgatttcagctagtgaccctgggcgggaagacaccctgttcaccctcctcctgacctccgccccccacctcttcagccaactttatcttggatctctgctctctttatcttttctctagagctgggccagggcgctaactggaagcttggggttaaatggtgcaggaacgtagaggcggaggagtccctgggattttccacgtctatttccccacccccaccccagccgcaggggtccagtttggactgacccaacctcccgctttctctttgtaggcgatcagtgggtgaccgcggctgcgagggactttgtcatccgtcctccaggatctggggagaaagagccccatcccttctctctctgccaccatttcggacaccccgcagggactcgttttgggattcgcactgacttcaaggaaggacgcgaacccttctctgaccccagctcgggcggccacctgtctttgccgcggtgacccttctctcatgaccctgcggtgccttgagccctccgggaatggcggggaagggacgcggagccagtgggggaccgcggggtcggcggaggagccatccccgcaggcggcgcgtctggcgaaggccctgcgggagctcggtcagacaggatggtactggggaagtatgactgttaatgaagccaaagagaaattaaaagaggcaccagaaggaactttcttgattagagatagctcgcattcagactacctactaacaatatctgttaaaacatcagctggaccaactaatcttcgaatcgaataccaagacggaaaattcagattggactctatcatatgtgtcaaatccaagcttaaacaatttgacagtgtggttcatctgatcgactactatgttcagatgtgcaaggataagcggacaggtccagaagccccccggaacggcactgttcacctttatctgaccaaaccgctctacacgtcagcaccatctctgcagcatctctgtaggctcaccattaacaaatgtaccggtgccatctggggactgcctttaccaacaagactaaaagattacttggaagaatataaattccaggtataaatgtttctctttttttaaacatgtctcacatagagtatctccgaatgcagctatgtaaaagagaaccaaaacttgagtgctctggataactatatggaatgctttctaagaacagctgaagctaatc

SEQ ID NO: 20010 - DNA, 462 bp, Homo sapiens
  misc_feature 1..462: note = ENST00000547229
  source 1..462: mol_type = unassigned DNA
cgaggagcctcccgggcggagatgcggcagctcccgcacctccgcaccccgggttggtgcctcggggccccgcagcgctttagggcggagaaccaagtttgtgtgggtgcttcttcctgggggccctcgggctgcgccaggtgtgagaccggaatgccaatttggggaatctctcctgttctttcctttttaattttttctacttgtccttgacaagggcctattcccactggatctgcaggcgatcagtgggtgaccgcggctgcgagggactttgtcatccgtcctccaggatctggggagaaagagccccatcccttctctctctgccaccatttcggacaccccgcagggactcgttttgggattcgcactgacttcaaggaaggacgcgaacccttctctgaccccagctcgggcggccacctgtctttgccgcggtgacccttctctcatgaccct

SEQ ID NO: 20011 - DNA, 719 bp, Homo sapiens
  misc_feature 1..719: note = ENST00000551883
  source 1..719: mol_type = unassigned DNA
actatgttcagatgtgcaaggataagcggacaggtccagaagccccccggaacggcactgttcacctttatctgaccaaaccgctctacacgtcagcaccatctctgcagcatctctgtaggctcaccattaacaaatgtaccggtgccatctggggactgcctttaccaacaagactaaaagattacttggaagaatataaattccaggtccaggctccagtaggagagaaagaactcctcataggaatactgaagaagtgggaaggaaccaagctgacacaggcctcactgcaatttgatatgcctgctgatcagagtctcttgggcattttatattttgcattctgatgtacctaggagttttgttaaacagatgatgtatgtgagtatttatcccattttatgcaattaaccaaatcaaccaaaaaaagtgaccatgaagtcctgtatttgtctttttactacatgtaggaactctcatgtgaatgagtactgtagtaatccattctatgggagccttatttcagaaatatttcaaactggtgcaaatggaaaagactttctcttttcctttaaagctaaagacaagaatatcatgctatacaggtgcaactcaatccccgttaataaaaaccaatgtaggtataggcattctaccctttgaaatagctgtgtcccaacctgttgccattgattttttggaaatggctttagaaa

SEQ ID NO: 20012 - DNA, 581 bp, Homo sapiens
  misc_feature 1..581: note = ENST00000549510
  source 1..581: mol_type = unassigned DNA
cagcaccatctctgcagcatctctgtaggctcaccattaacaaatgtaccggtgccatctggggactgcctttaccaacaagactaaaagattacttggaagaatataaattccagccagctgttttttatcctggttagaagaattttgtgttttcttttagctatggatctttgaacattaccctatgatcgaagagttttgagttgggtttttagatgttggttgtcatggagaaacaggaatctggtgtatgccagccatcatcatcatcatcataaccctttggatgaattttcattatcaagggatctggaaggctgtcttcgctctgcttcccagctaacaaacagatgtgttcccagaagatgatgggcatagggtgtgtttttgcaagtcatttttcccatttacgtagattattcttatttccaattgatcctcaatagataagagtgccattgagctttattttcatctgtcaggcaattaagaaaaaagtaaaggaaacaaaaaagctataatatactaaggaaattcttagattctttggtaaaattaaaagaatcttggtgcatgaa

SEQ ID NO: 20013 - DNA, 2881 bp, Homo sapiens
  misc_feature 1..2881: note = ENST00000622746
  source 1..2881: mol_type = unassigned DNA
gcttttgtgtgccctctgcgcacggaactccgaccgccgcctccgagcgcggggctggttgcatccccgggcatctcgttcccaaattaaacgttaacgggggaaacaagggcagacgcccctcctctcccgggcccctcccacctccccttttccccccacccccccgccccatgtccgctgaggaggctgcctggtgcggaggcggcggcggcggccgcggccgaggtcgaggtaagagcgcggcgttggtggtttgcattttccgcagcgctcgcgaccgcccgctcggccccggcctcgcctcggagccccgcgagggctgcgcgctcgggccgattcctcgacagcgcccgcggcggcgagaaccaccgcagccatcctggtccgggagcgaccgccgcggcacccccaaccccgccagagcgggcaccaggaagcggggggaggggagcgaggagcctcccgggcggagatgcggcagctcccgcacctccgcaccccgggcgatcagtgggtgaccgcggctgcgagggactttgtcatccgtcctccaggatctggggagaaagagccccatcccttctctctctgccaccatttcggacaccccgcagggactcgttttgggattcgcactgacttcaaggaaggacgcgaacccttctctgaccccagctcgggcggccacctgtctttgccgcggtgacccttctctcatgaccctgcggtgccttgagccctccgggaatggcggggaagggacgcggagccagtgggggaccgcggggtcggcggaggagccatccccgcaggcggcgcgtctggcgaaggccctgcgggagctcggtcagacaggatggtactggggaagtatgactgttaatgaagccaaagagaaattaaaagaggcaccagaaggaactttcttgattagagatagctcgcattcagactacctactaacaatatctgttaaaacatcagctggaccaactaatcttcgaatcgaataccaagacggaaaattcagattggactctatcatatgtgtcaaatccaagcttaaacaatttgacagtgtggttcatctgatcgactactatgttcagatgtgcaaggataagcggacaggtccagaagccccccggaacggcactgttcacctttatctgaccaaaccgctctacacgtcagcaccatctctgcagcatctctgtaggctcaccattaacaaatgtaccggtgccatctggggactgcctttaccaacaagactaaaagattacttggaagaatataaattccaggtataaatgtttctctttttttaaacatgtctcacatagagtatctccgaatgcagctatgtaaaagagaaccaaaacttgagtgctctggataactatatggaatgctttctaagaacagctgaagctaatctaatttaaatttaacagcttgaagaggtagctaggtgtttaaagttcctccagatacttttacctgagtgatgcttcccttcctaaggctgaccaagacctgttgatccttttagattaaaaataaaatgtcgcatgtaaaggctgaagtcgcgttttatcagaatgccttgccttcttaggttcttttccattatgtcaaaggtccaggctccagtaggagagaaagaactcctcataggaatactgaagaagtgggaaggaaccaagctgacacaggcctcactgcaatttgatatgcctgctgatcagagtctcttgggcattttatattttgcattctgatgtacctaggagttttgttaaacagatgatgtatgtgagtatttatcccattttatgcaattaaccaaatcaaccaaaaaaagtgaccatgaagtcctgtatttgtctttttactacatgtaggaactctcatgtgaatgagtactgtagtaatccattctatgggagccttatttcagaaatatttcaaactggtgcaaatggaaaagactttctcttttcctttaaagctaaagacaagaatatcatgctatacaggtgcaactcaatccccgttaataaaaaccaatgtaggtataggcattctaccctttgaaatagctgtgtcccaacctgttgccattgattttttggaaatggctttagaaatatccaagttgtccttgaattgtctaaccatggacataaacagttgtctcccttctactgtgtagaatactttgacttaattttcttccagatacagggggatacctgcctgtttttcaaagtgtttatttactgctgttactatttgattagaatgtattaaataaaaaaaacctgatttctacaagttgcacttattgagttctagagaacgtacactttcatggtaatagaggattgccataaaaacttacgtcaagtgaaataagccaattattcaacaaaaggtagaacattacttgccattctgtaaagttatgggctgtacctgccccctttgcaatttggaaagcatggtttagaaactacaggcattgtcaagtggccgggtcttttataatttgaataggcataacactgatgtcctctgtgtttccaaaaacatggtttagaaactacaaacattatgacatggccagtcttttacaagttgagtaggcataatactaaagaaaaatacaaagttttgtggccacttattttttgctatgttagtctgcataactgttataaatgtaccatcttttctagagtccagacattatttattttatggctttaaaattttcctgcatagctacaatcctgtggtgtgtcaccataaaggtggaccctgtgtgaatgagaaaattcagttataaattgtaataaaacctgcttactgg

SEQ ID NO: 20014 - DNA, 966 bp, Homo sapiens
  misc_feature 1..966: note = ENST00000270142
  source 1..966: mol_type = unassigned DNA
gtttggggccagagtgggcgaggcgcggaggtctggcctataaagtagtcgcggagacggggtgctggtttgcgtcgtagtctcctgcagcgtctggggtttccgttgcagtcctcggaaccaggacctcggcgtggcctagcgagttatggcgacgaaggccgtgtgcgtgctgaagggcgacggcccagtgcagggcatcatcaatttcgagcagaaggaaagtaatggaccagtgaaggtgtggggaagcattaaaggactgactgaaggcctgcatggattccatgttcatgagtttggagataatacagcaggctgtaccagtgcaggtcctcactttaatcctctatccagaaaacacggtgggccaaaggatgaagagaggcatgttggagacttgggcaatgtgactgctgacaaagatggtgtggccgatgtgtctattgaagattctgtgatctcactctcaggagaccattgcatcattggccgcacactggtggtccatgaaaaagcagatgacttgggcaaaggtggaaatgaagaaagtacaaagacaggaaacgctggaagtcgtttggcttgtggtgtaattgggatcgcccaataaacattcccttggatgtagtctgaggccccttaactcatctgttatcctgctagctgtagaaatgtatcctgataaacattaaacactgtaatcttaaaagtgtaattgtgtgactttttcagagttgctttaaagtacctgtagtgagaaactgatttatgatcacttggaagatttgtatagttttataaaactcagttaaaatgtctgtttcaatgacctgtattttgccagacttaaatcacagatgggtattaaacttgtcagaatttctttgtcattcaagcctgtgaataaaaaccctgtatggcacttattatgaggctattaaaagaatccaaattcaaactaaa

SEQ ID NO: 20015 - DNA, 865 bp, Homo sapiens
  misc_feature 1..865: note = ENST00000389995
  source 1..865: mol_type = unassigned DNA
gtagtcgcggagacggggtgctggtttgcgtcgtagtctcctgcagcgtctggggtttccgttgcagtcctcggaaccaggacctcggcgtggcctagcgagttatggcgacgaaggccgaaagtaatggaccagtgaaggtgtggggaagcattaaaggactgactgaaggcctgcatggattccatgttcatgagtttggagataatacagcaggctgtaccagtgcaggtcctcactttaatcctctatccagaaaacacggtgggccaaaggatgaagagaggcatgttggagacttgggcaatgtgactgctgacaaagatggtgtggccgatgtgtctattgaagattctgtgatctcactctcaggagaccattgcatcattggccgcacactggtggtccatgaaaaagcagatgacttgggcaaaggtggaaatgaagaaagtacaaagacaggaaacgctggaagtcgtttggcttgtggtgtaattgggatcgcccaataaacattcccttggatgtagtctgaggccccttaactcatctgttatcctgctagctgtagaaatgtatcctgataaacattaaacactgtaatcttaaaagtgtaattgtgtgactttttcagagttgctttaaagtacctgtagtgagaaactgatttatgatcacttggaagatttgtatagttttataaaactcagttaaaatgtctgtttcaatgacctgtattttgccagacttaaatcacagatgggtattaaacttgtcagaatttctttgtcattcaagcctgtgaataaaaaccctgtatggcacttattatgaggctattaaaagaatccaaattcaaactaaa

SEQ ID NO: 20016 - DNA, 586 bp, Homo sapiens
  misc_feature 1..586: note = ENST00000476106
  source 1..586: mol_type = unassigned DNA
gcgtcgtagtctcctgcagcgtctggggtttccgttgcagtcctcggaaccaggacctcggcgtggcctagcgagttatggcgacgaaggccgtgtgcgtgctgaagggcgacggcccagtgcagggcatcatcaatttcgagcagaagagacggcgtttcaccatgttggccaggatggtctcgatctgttgacgtcgtgatccacccgcctcggcctcccaaagtgctgggattacaggcgtgagccaccccgcccggccaccagtgctattcttaagacgcctctgaggaatcccttctccctggccattgagaatccatgcatgaacccaggaaagtaatggaccagtgaaggtgtggggaagcattaaaggactgactgaaggcctgcatggattccatgttcatgagtttggagataatacagcaggctgtaccagtgcaggtcctcactttaatcctctatccagaaaacacggtgggccaaaggatgaagagaggcatgttggagacttgggcaatgtgactgctgacaaagatggtgtggccgatgtgtctattgaagattctgtgatctcactctc

SEQ ID NO: 20017 - DNA, 1746 bp, Homo sapiens
  misc_feature 1..1746: note = ENST00000470944
  source 1..1746: mol_type = unassigned DNA
cagcgtctggggtttccgttgcagtcctcggaaccaggacctcggcgtggcctagcgagttatggcgacgaaggccgtgtgcgtgctgaagggcgacggcccagtgcagggcatcatcaatttcgagcagaaggcaagggctgggacggaggcttgtttgcgaggccgctcccacccgctcgtccccccgcgcacctttgctaggagcgggtcgcccgccaggcctcggggccgccctggtccagcgcccggtcccggcccgtgccgcccggtcggtgccttcgcccccagcggtgcggtgcccaagtgctgagtcaccgggcgggcccgggcgcggggcgtgggaccgaggccgccgcggggctgggcctgcgcgtggcgggagcgcggggagggattgccgcgggccggggaggggcgggggcgggcgtgctgccctctgtggtccttgggccgccgccgcgggtctgtcgtggtgcctggagcggctgtgctcgtcccttgcttggccgtgttctcgttcctgagggtcccgcggacaccgagtggcgcagtgccaggcccagcccggggatggcgactgcgcctgggcccgcctggtgtcttcgcatccctctccgctttccggcttcagcgctctaggtcagggagtcttcgcttttgtacagctctaaggctaggaatggtttttatatttttaaaaggctttggaaaacaaaaatacgcaacagagaccgtttgtgtgacactttgcagggaagtttgctggcctctgttctaggtcatgattgggctgcaagggcagagaaggtagccttgaacagaggtccttttcctcctcctaagctccgggagccagaggtttaactgacccttttggggatttttgagggcagtgatcttaactttgggtgcacagttagcttatttgaagatcttactaaaaatacaccagagcccaacctccgaccaattacatcaaaacctgtcctagtgcagggaaagtaatggaccagtgaaggtgtggggaagcattaaaggactgactgaaggcctgcatggattccatgttcatgagtttggagataatacagcaggctgtaccagtgcaggtcctcactttaatcctctatccagaaaacacggtgggccaaaggatgaagagaggcatgttggagacttgggcaatgtgactgctgacaaagatggtgtggccgatgtgtctattgaagattctgtgatctcactctcaggagaccattgcatcattggccgcacactggtggtccatgaaaaagcagatgacttgggcaaaggtggaaatgaagaaagtacaaagacaggaaacgctggaagtcgtttggcttgtggtgtaattgggatcgcccaataaacattcccttggatgtagtctgaggccccttaactcatctgttatcctgctagctgtagaaatgtatcctgataaacattaaacactgtaatcttaaaagtgtaattgtgtgactttttcagagttgctttaaagtacctgtagtgagaaactgatttatgatcacttggaagatttgtatagttttataaaactcagttaaaatgtctgtttcaatgacctgtattttgccagacttaaatcacagatgggtattaaacttgtcagaatttctttgtcattcaagcctgtgaataaaaaccctgtatggcacttattatgaggctattaaaagaatccaaattcaaactaaa

SEQ ID NO: 20018 - DNA, 276 bp, Homo sapiens
  misc_feature 1..276: note = ENST00000598411
  source 1..276: mol_type = unassigned DNA
agaagggcaagatggagtctgcacagctgggccatgacccaggaacactatgaggagatgctggttctcctgtagctgctcctctttaggtgaccctggtgcccgactccagccatgctggcgctactgtgttcctgcctgctcctggcagccggtgcctcggacgcctggacgggcgaggactcggcggagcccaactctgactcggcggagtggatccgagacatgtacgccaaggtcacggagatctggcaggaggtcatgcagcggcgggac

SEQ ID NO: 20019 - DNA, 567 bp, Homo sapiens
  misc_feature 1..567: note = ENST00000593742
  source 1..567: mol_type = unassigned DNA
gacccaggaacactatgaggagatgctggttctcctgtagctgctcctctttaggtgaccctggtgagtgatggtggtttggggactatgatggaagctatgacccacttcatttaaaatcatccctgaagattggccagaaccattctggattcatttctgagtgagacacatggcggctgccctattttcttccctaggccttggatctgaggcctctttttgaatcctgtcagccctgtcagcatttagaattcctaattatttttctaaaataaactctgagtcaagaggatctctcttccctctacatttccttctaacatcaattttctaaaattccaagagtagtctgtctcacctctgtcctcagattctgttttctacatgtggcaatggcaatgtctgtgcattttacacagctccttggagaacttccgcccatcttttctattagtttgttcattctgggagtatggaggaaaggggctgggccaagctggctttcagagtggggagagtacttctttctcatggtgaaattgcagggtgtgtgtgtgacggggt

SEQ ID NO: 20020 - DNA, 1526 bp, Homo sapiens
  misc_feature 1..1526: note = ENST00000382120
  source 1..1526: mol_type = unassigned DNA
ggggaggtctggcctgcttttcctccctgaactggcccaatgactggctccctcacgctgaccactcctctgggctggcctcctgcactcgcgctaacagcccaggctccagggacagcctgcgttcctgggctggctgggtgcagctctcttttcaggagagaaagctctcttggaggagctggaaaggtgcccgactccagccatgctggcgctactgtgttcctgcctgctcctggcagccggtgcctcggacgcctggacgggcgaggactcggcggagcccaactctgactcggcggagtggatccgagacatgtacgccaaggtcacggagatctggcaggaggtcatgcagcggcgggacgacgacggcgcgctccacgccgcctgccaggtgcagccgtcggccacgctggacgccgcgcagccccgggtgaccggcgtcgtcctcttccggcagcttgcgccccgcgccaagctcgacgccttcttcgccctggagggcttcccgaccgagccgaacagctccagccgcgccatccacgtgcaccagttcggggacctgagccagggctgcgagtccaccgggccccactacaacccgctggccgtgccgcacccgcagcacccgggcgacttcggcaacttcgcggtccgcgacggcagcctctggaggtaccgcgccggcctggccgcctcgctcgcgggcccgcactccatcgtgggccgggccgtggtcgtccacgctggcgaggacgacctgggccgcggcggcaaccaggccagcgtggagaacgggaacgcgggccggcggctggcctgctgcgtggtgggcgtgtgcgggcccgggctctgggagcgccaggcgcgggagcactcagagcgcaagaagcggcggcgcgagagcgagtgcaaggccgcctgagcgcggcccccacccggcggcggccagggacccccgaggcccccctctgcctttgagcttctcctctgctccaacagacaccctccactctgaggtctcaccttcgcctttgctgaagtctccccgcagccctctccacccagaggtctccctataccgagacccaccatccttccatcctgaggaccgccccaaccctcggagccccccactcagtaggtctgaaggcctccatttgtaccgaaacaccccgctcacgctgacagcctcctaggctccctgaggtacctttccacccagaccctccttccccaccccataagccctgagactcccgcctttgacctgacgatcttcccccttcccgccttcaggttcctcctaggcgctcagaggccgctctggggggttgcctcgagtccccccacccctccccacccaccaccgctcccgcgggaagccagcccgtgcaacggaagccaggccaactgccccgcgtcttcagctgtttcgcatccaccgccaccccactgagagctgctcctttgggggaatgtttggcaacctttgtgttacagattaaaaattcagcaattca

SEQ ID NO: 20021 - DNA, 2824 bp, Homo sapiens
  misc_feature 1..2824: note = ENST00000319471
  source 1..2824: mol_type = unassigned DNA
cgttcacacctcctttccgagtatctgcatgccttgctggcccagagcacaagacccccattgtgctcccccggctcagaatccaaggaaagaaaggaagcgaagcctctgcattgagttctaggacagctgagacacttggattggacttaatcttaaacctctggagttcaagaccttttaaaaagggctaaataaacaatctctacatgtaaaaggccactgactcctacttcctctgtatagagcaactgttgaactcagctgcctgtagatagcggtgggtgtgctcgcaaacgtgccgccatgtctgttacgctaacatctgtgaagagagtgcaaagttctccaaacctattggctgcagggcgtgattctcagtcaccagactcagcttggagatcttacaatgatggcaatcaggagacactgaacggagatgctacatattcctctcttgcagcaaaaggttttagaagcgttcgaccaaacctacaagataaaagatcaccaactcagagccagataacagtgaatggaaactcaggaggtgccgtgagtcccatgagttactatcagaggccgttttccccctcggcatattctctcccagcctcactcaactccagcattgtcatgcagcacggcacatccctcgattccacagacacatatccccagcatgcgcagtctctggatggcaccaccagcagctctatccccctgtaccgatcctcagaggaagagaagagagtgacagtcatcaaagccccgcattacccagggatcgggcccgtggatgaatccggaatccccacagcaattagaacgacagtcgaccggcccaaggactggtacaagacgatgtttaagcaaattcacatggtgcacaagccggatgatgacacagacatgtataatactccttatacatacaatgcaggtctgtacaacccaccctacagtgctcagtcacaccctgctgcaaagacccaaacctacagacctctttccaaaagccactccgacaacagccccaatgcctttaaggatgcgtcctccccagtgcctcccccacatgttccacctccagtcccgccgcttcgaccaagagatcggtcttcaacagaaaagcatgactgggatcctccagacagaaaagtggacacaagaaaatttcggtctgagccaaggagtatttttgaatatgaacctggcaagtcatcaattcttcagcatgaaagaccaccccctctcccaacaactccgacacctgttccaagggaacctggccggaagcctctttctagctcccgactcggagaagtcactggtagcccctcccctccgccccggagtggcgcccccacaccaagctcgcgcgccccggctctgtctcccacccggcctcctaaaaagcctctggactatgttcaagatcattcttctggtgttttcaatgaggcctccttgtatcagtcctctatagacagaagcctggaaagacccatgagttctgcaagcatggccagtgacttcaggaagcggaggaagagcgagcctgcagtgggtccaccacggggcttgggagatcaaagtgcgagcaggactagcccaggccgagtggacctcccaggatcaagcaccactcttacaaagtctttcactagctcttctccttcttccccatcaagagcaaaagaccgtgagtcccctagaagttactcatccactttgactgacatggggagaagtgcaccaagggaaagaagaggaactccagaaaaagagaaattgcctgcaaaagctgtttatgattttaaggctcagacatctaaggagttgtcatttaagaaaggagatactgtctacatcctcaggaaaattgatcaaaattggtatgagggagaacaccacgggagagtgggcatcttcccgatctcatacgtagagaaactcacacctcctgagaaagcacagcctgcaagaccacctccgccagcccagcccggagaaatcggagaagctatagccaaatacaacttcaacgcagacacaaatgtggagctgtcactgagaaagggagatagagttattcttcttaaaagagttgatcaaaactggtatgaaggtaaaatcccaggaaccaacagacaaggcatcttccctgtttcctatgtggaggtcgtcaagaagaacacaaaaggtgctgaggactaccctgaccctccaataccccacagctattctagtgataggattcacagcttgagctcaaataagccacagcgtcctgtgtttactcatgaaaatattcaaggtgggggggaaccgtttcaggctctgtataactatactcccaggaatgaagatgagctggagctcagagaaagtgatgtcattgatgtcatggaaaagtgtgatgacggctggtttgtggggacctcaagaagaaccaaattctttggtactttccccggaaactacgtcaagaggctgtgaattgcgctccctccttctgtagaggccgcctgccagccatgcacctgcgtcaacgcgcctgaaacaccccgcgggcctcccgttgtcatgccttacggtttccaatgcgccgtcaccatctccacctgccaccaaaccaccagcagagtagccgccgctgctgtgagcctggggacgacatggcaggctggtccccctccgtgaaagtgtggattcctacttcctgctctaagctttgacacgtcaaaatgtgggatcagaaagaaaaaaatcatgatatttaaaaatggtcaaatatttgaggcaaaaaaaaaaaaaaaaa

SEQ ID NO: 20022 - DNA, 3049 bp, Homo sapiens
  misc_feature 1..3049: note = ENST00000449407
  source 1..3049: mol_type = unassigned DNA
gagctgagaggaccagccattttacttatggaaaacagtgtggcatattctgctgagcttcgccctggaagaagcctcttttatacatctcttcagggaagagagaagcaatgggcatgttagtatacaatgatcacagccacgcaggcctgcaagctgccttttggacaggctgttgactgccgttccaattagctgattggagaatgtggaatgcagagtgataatgctgcatatctgctatcaggcagcagcaaaggtttttgtcttgggaaggcaagctttccctgcaatattatctcagcagctccctagctgcttaccctgaaaacgagggatccaaacggagggtgttgcactctgctaacgctggtcctgtgcgtggctgtggcatatgagcggcaggtctgaaaaagcaggtgtgtgctgggacgggcactggactggaacgcaggcggacgctctcgggtttacctgcttcctgttaacagattgtgggctcccagggcatatgtctgcacgctgaggccgaggcggagaaggggcttcctgagcgtcccagtacactgacagagacacttggattggacttaatcttaaacctctggagttcaagaccttttaaaaagggctaaataaacaatctctacatgtaaaaggccactgactcctacttcctctgtatagagcaactgttgaactcagctgcctgtaggaaaactgaagactttaataacaaactctccaaggtgaaaatgaacacagcggtgggtgtgctcgcaaacgtgccgccatgtctgttacgctaacatctgtgaagagagtgcaaagttctccaaacctattggctgcagggcgtgattctcagtcaccagactcagcttggagatcttacaatgatggcaatcaggagacactgaacggagatgctacatattcctctcttgcagcaaaaggttttagaagcgttcgaccaaacctacaagataaaagatcaccaactcagagccagataacagtgaatggaaactcaggaggtgccgtgagtcccatgagttactatcagaggccgttttccccctcggcatattctctcccagcctcactcaactccagcattgtcatgcagcacggcacatccctcgattccacagacacatatccccagcatgcgcagtctctggatggcaccaccagcagctctatccccctgtaccgatcctcagaggaagagaagagagtgacagtcatcaaagccccgcattacccagggatcgggcccgtggatgaatccggaatccccacagcaattagaacgacagtcgaccggcccaaggactggtacaagacgatgtttaagcaaattcacatggtgcacaagccgggtctgtacaacccaccctacagtgctcagtcacaccctgctgcaaagacccaaacctacagacctctttccaaaagccactccgacaacagccccaatgcctttaaggatgcgtcctccccagtgcctcccccacatgttccacctccagtcccgccgcttcgaccaagagatcggtcttcaacagaaaagcatgactgggatcctccagacagaaaagtggacacaagaaaatttcggtctgagccaaggagtatttttgaatatgaacctggcaagtcatcaattcttcagcatgaaagaccagcctccttgtatcagtcctctatagacagaagcctggaaagacccatgagttctgcaagcatggccagtgacttcaggaagcggaggaagagcgagcctgcagtgggtccaccacggggcttgggagatcaaagtgcgagcaggactagcccaggccgagtggacctcccaggatcaagcaccactcttacaaagtctttcactagctcttctccttcttccccatcaagagcaaaagaccgtgagtcccctagaagttactcatccactttgactgacatggggagaagtgcaccaagggaaagaagaggaactccagaaaaagagaaattgcctgcaaaagctgtttatgattttaaggctcagacatctaaggagttgtcatttaagaaaggagatactgtctacatcctcaggaaaattgatcaaaattggtatgagggagaacaccacgggagagtgggcatcttcccgatctcatacgtagagaaactcacacctcctgagaaagcacagcctgcaagaccacctccgccagcccagcccggagaaatcggagaagctatagccaaatacaacttcaacgcagacacaaatgtggagctgtcactgagaaagggagatagagttattcttcttaaaagagttgatcaaaactggtatgaaggtaaaatcccaggaaccaacagacaaggcatcttccctgtttcctatgtggaggtcgtcaagaagaacacaaaaggtgctgaggactaccctgaccctccaataccccacagctattctagtgataggattcacagcttgagctcaaataagccacagcgtcctgtgtttactcatgaaaatattcaaggtgggggggaaccgtttcaggctctgtataactatactcccaggaatgaagatgagctggagctcagagaaagtgatgtcattgatgtcatggaaaagtgtgatgacggctggtttgtggggacctcaagaagaaccaaattctttggtactttccccggaaactacgtcaagaggctgtgaattgcgctccctccttctgtagaggccgcctgccagccatgcacctgcgtcaacgcgcctgaaacaccccgcgggcctcccgttgtcatgccttacggtttccaatgcgccgtcaccatctccacctgccaccaaaccaccagcagagtagccgccgctgctgtgagcctggggacgacatggcaggctggtccccctccgtgaaagtgtggattcctacttcctgctctaagctttgacacgtcaaaatgtgggatcagaaagaaaaaaatcatgatatttaaaaatggtcaaatatttgaggcaaaaaaaaaaaaaaaa

SEQ ID NO: 20023 - DNA, 4622 bp, Homo sapiens
  misc_feature 1..4622: note = ENST00000355634
  source 1..4622: mol_type = unassigned DNA
ttttattacgtctctccttgtggattacgtagaactttggaaaattaaacattagacatcttcatagaaaatcatgtcactgatttttaaagccagctcaatttaacctgccactgattccctaaccagctcttctctgactgtatcccgagggaaaatgtattgaacgcagcagaaggttaaggcagaggagttcggctagaccgggtagcagccaatcagatggggagggtccaaggatctgatgcctccaggcgagcagcgccaagctgagctggttagtctccttttattgtggatgaacaccacgtacatgccgtaaatgctccctaggctggctgcggctacaaggcagacccgggagctgagaatagaggaatacctgcccaagcaactcattctgcacagcagccgacaagacagcgattttcctgtgctggaatgtgcccatccaaagccaaccaatttgttggaaaatcagtcaaaatctaattttgatgttctgcaagttccctgggggccatgaagcacctgacacttggattggacttaatcttaaacctctggagttcaagaccttttaaaaagggctaaataaacaatctctacatgtaaaaggccactgactcctacttcctctgtatagagcaactgttgaactcagctgcctgtaggaaaactgaagactttaataacaaactctccaaggtgaaaatgaacacagatagcggtgggtgtgctcgcaaacgtgccgccatgtctgttacgctaacatctgtgaagagagtgcaaagttctccaaacctattggctgcagggcgtgattctcagtcaccagactcagcttggagatcttacaatgatggcaatcaggagacactgaacggagatgctacatattcctctcttgcagcaaaaggttttagaagcgttcgaccaaacctacaagataaaagatcaccaactcagagccagataacagtgaatggaaactcaggaggtgccgtgagtcccatgagttactatcagaggccgttttccccctcggcatattctctcccagcctcactcaactccagcattgtcatgcagcacggcacatccctcgattccacagacacatatccccagcatgcgcagtctctggatggcaccaccagcagctctatccccctgtaccgatcctcagaggaagagaagagagtgacagtcatcaaagccccgcattacccagggatcgggcccgtggatgaatccggaatccccacagcaattagaacgacagtcgaccggcccaaggactggtacaagacgatgtttaagcaaattcacatggtgcacaagccggatgatgacacagacatgtataatactccttatacatacaatgcaggtctgtacaacccaccctacagtgctcagtcacaccctgctgcaaagacccaaacctacagacctctttccaaaagccactccgacaacagccccaatgcctttaaggatgcgtcctccccagtgcctcccccacatgttccacctccagtcccgccgcttcgaccaagagatcggtcttcaacagaaaagcatgactgggatcctccagacagaaaagtggacacaagaaaatttcggtctgagccaaggagtatttttgaatatgaacctggcaagtcatcaattcttcagcatgaaagaccagcctccttgtatcagtcctctatagacagaagcctggaaagacccatgagttctgcaagcatggccagtgacttcaggaagcggaggaagagcgagcctgcagtgggtccaccacggggcttgggagatcaaagtgcgagcaggactagcccaggccgagtggacctcccaggatcaagcaccactcttacaaagtctttcactagctcttctccttcttccccatcaagagcaaaaggtggggatgatagcaaaatatgtccatccctttgcagttactcagggctcaacggcaacccctccagtgagttagattactgtagcacttacagacagcacttggatgtccctcgggactcaccaagagccattagtttcaagaacggctggcaaatggcccggcaaaacgcagaaatctggagcagcacggaagaaaccgtctctcccaaaatcaaatcccggagctgtgacgatctcctaaacgacgactgcgatagcttcccggacccgaaagtcaagtcggaaagcatgggctccctgttatgtgaggaggactccaaggagagctgccccatggcgtgggggtccccctacgtcccggaggttcgcagtaacggcagatcaaggatcagacacaggtcagcccgcaacgccccggggttcctgaagatgtacaagaaaatgcaccgcatcaaccgcaaggacctgatgaactccgaggtgatctgctccgtgaagtccaggattctgcagtacgagagcgagcagcagcacaaggacctgctgcgcgcctggagccagtgctccacggaggaggtgccccgggacatggtgcccacacgcatctccgaattcgaaaagctgatccagaagtccaaatccatgccaaatttaggggatgacatgctgtctcccgtaaccctagaaccaccgcaaaatggcctatgtcccaagaggcggttttccattgagtatttgctggaggaagaaaatcaaagcggcccccccgctcggggccggcgaggctgccagtctaacgccctggtgcccattcacattgaagtcaccagcgatgagcagccccgagcacacgtggagttttccgacagcgaccaggacggggttgtgtccgaccacagtgactacattcacctagaggggtcatccttctgcagtgaaagtgactttgatcacttttccttcacatcctccgaaagcttttacggatccagccaccaccaccaccatcaccaccaccaccaccaccgccacctcatcagctcctgcaaaggcaggtgcccggcctcctacactcgatttaccacaatgttaaaacacgaaagagccagacacgaaaacaccgaggagcccagaaggcaagaaatggaccctggcctttctaaacttgcttttctagtcagtcctgtgcctttccggaggaaaaaaaattcggctcctaagaaacagactgaaaaggcaaaatgtaaagcatctgtgtttgaggctctggactctgcccttaaagacatctgtgaccaaattaaagctgaaaagaaaagggggagcttgccggacaacagcatcctgcaccgcctcatcagtgagctgctgccagatgttcccgagaggaactcatccctgagagcgctgaggaggagccccctgcaccagcctctccacccactgcctcccgatggtgctattcattgtccaccctaccagaatgactgcgggagaatgccccgcagtgcctctttccaagacgtggacacagccaacagcagctgccaccaccaagaccgtggcggtgcactccaagaccgtgagtcccctagaagttactcatccactttgactgacatggggagaagtgcaccaagggaaagaagaggaactccagaaaaagagaaattgcctgcaaaagctgtttatgattttaaggctcagacatctaaggagttgtcatttaagaaaggagatactgtctacatcctcaggaaaattgatcaaaattggtatgagggagaacaccacgggagagtgggcatcttcccgatctcatacgtagagaaactcacacctcctgagaaagcacagcctgcaagaccacctccgccagcccagcccggagaaatcggagaagctatagccaaatacaacttcaacgcagacacaaatgtggagctgtcactgagaaagggagatagagttattcttcttaaaagagttgatcaaaactggtatgaaggtaaaatcccaggaaccaacagacaaggcatcttccctgtttcctatgtggaggtcgtcaagaagaacacaaaaggtgctgaggactaccctgaccctccaataccccacagctattctagtgataggattcacagcttgagctcaaataagccacagcgtcctgtgtttactcatgaaaatattcaaggtgggggggaaccgtttcaggctctgtataactatactcccaggaatgaagatgagctggagctcagagaaagtgatgtcattgatgtcatggaaaagtgtgatgacggctggtttgtggggacctcaagaagaaccaaattctttggtactttccccggaaactacgtcaagaggctgtgaattgcgctccctccttctgtagaggccgcctgccagccatgcacctgcgtcaacgcgcctgaaacaccccgcgggcctcccgttgtcatgccttacggtttccaatgcgccgtcaccatctccacctgccaccaaaccaccagcagagtagccgccgctgctgtgagcctggggacgacatggcaggctggtccccctccgtgaaagtgtggattcctacttcctgctctaagctttgacacgtcaaaatgtgggatcagaaagaaaaaaatcatgatatttaaaaatggtcaaatatttgaggc

SEQ ID NO: 20024 - DNA, 3043 bp, Homo sapiens
  misc_feature 1..3043: note = ENST00000393528
  source 1..3043: mol_type = unassigned DNA
cattttacttatggaaaacagtgtggcatattctgctgagcttcgccctggaagaagcctcttttatacatctcttcagggaagagagaagcaatgggcatgttagtatacaatgatcacagccacgcaggcctgcaagctgccttttggacaggctgttgactgccgttccaattagctgattggagaatgtggaatgcagagtgataatgctgcatatctgctatcaggcagcagcaaaggtttttgtcttgggaaggcaagctttccctgcaatattatctcagcagctccctagctgcttaccctgaaaacgagggatccaaacggagggtgttgcactctgctaacgctggtcctgtgcgtggctgtggcatatgagcggcaggtctgaaaaagcaggtgtgtgctgggacgggcactggactggaacgcaggcggacgctctcgggtttacctgcttcctgttaacagattgtgggctcccagggcatatgtctgcacgctgaggccgaggcggagaaggggcttcctgagcgtcccagtacactgacagagacacttggattggacttaatcttaaacctctggagttcaagaccttttaaaaagggctaaataaacaatctctacatgtaaaaggccactgactcctacttcctctgtatagagcaactgttgaactcagctgcctgtaggaaaactgaagactttaataacaaactctccaaggtgaaaatgaacacagggcgtgattctcagtcaccagactcagcaaaaggttttagaagcgttcgaccaaacctacaagataaaagatcaccaactcagagccagataacagtgaatggaaactcaggaggtgccgtgagtcccatgagttactatcagaggccgttttccccctcggcatattctctcccagcctcactcaactccagcattgtcatgcagcacggcacatccctcgattccacagacacatatccccagcatgcgcagtctctggatggcaccaccagcagctctatccccctgtaccgatcctcagaggaagagaagagagtgacagtcatcaaagccccgcattacccagggatcgggcccgtggatgaatccggaatccccacagcaattagaacgacagtcgaccggcccaaggactggtacaagacgatgtttaagcaaattcacatggtgcacaagccggatgatgacacagacatgtataatactccttatacatacaatgcaggtctgtacaacccaccctacagtgctcagtcacaccctgctgcaaagacccaaacctacagacctctttccaaaagccactccgacaacagccccaatgcctttaaggatgcgtcctccccagtgcctcccccacatgttccacctccagtcccgccgcttcgaccaagagatcggtcttcaacagaaaagcatgactgggatcctccagacagaaaagtggacacaagaaaatttcggtctgagccaaggagtatttttgaatatgaacctggcaagtcatcaattcttcagcatgaaagaccaactgatcgcataaatccagatgacatagatttagaaaatgagccctggtataaattcttttcagaactggagtttggacgcccgcctcctaaaaagcctctggactatgttcaagatcattcttctggtgttttcaatgaggcctccttgtatcagtcctctatagacagaagcctggaaagacccatgagttctgcaagcatggccagtgacttcaggaagcggaggaagagcgagcctgcagtgggtccaccacggggcttgggagatcaaagtgcgagcaggactagcccaggccgagtggacctcccaggatcaagcaccactcttacaaagtctttcactagctcttctccttcttccccatcaagagcaaaagaccgtgagtcccctagaagttactcatccactttgactgacatggggagaagtgcaccaagggaaagaagaggaactccagaaaaagagaaattgcctgcaaaagctgtttatgattttaaggctcagacatctaaggagttgtcatttaagaaaggagatactgtctacatcctcaggaaaattgatcaaaattggtatgagggagaacaccacgggagagtgggcatcttcccgatctcatacgtagagaaactcacacctcctgagaaagcacagcctgcaagaccacctccgccagcccagcccggagaaatcggagaagctatagccaaatacaacttcaacgcagacacaaatgtggagctgtcactgagaaagggagatagagttattcttcttaaaagagttgatcaaaactggtatgaaggtaaaatcccaggaaccaacagacaaggcatcttccctgtttcctatgtggaggtcgtcaagaagaacacaaaaggtgctgaggactaccctgaccctccaataccccacagctattctagtgataggattcacagcttgagctcaaataagccacagcgtcctgtgtttactcatgaaaatattcaaggtgggggggaaccgtttcaggctctgtataactatactcccaggaatgaagatgagctggagctcagagaaagtgatgtcattgatgtcatggaaaagtgtgatgacggctggtttgtggggacctcaagaagaaccaaattctttggtactttccccggaaactacgtcaagaggctgtgaattgcgctccctccttctgtagaggccgcctgccagccatgcacctgcgtcaacgcgcctgaaacaccccgcgggcctcccgttgtcatgccttacggtttccaatgcgccgtcaccatctccacctgccaccaaaccaccagcagagtagccgccgctgctgtgagcctggggacgacatggcaggctggtccccctccgtgaaagtgtggattcctacttcctgctctaagctttgacacgtcaaaatgtgggatcagaaagaaaaaaatcatgatatttaaaaatggtcaaatatttgagg

SEQ ID NO: 20025 - DNA, 420 bp, Homo sapiens
  misc_feature 1..420: note = ENST00000478461
  source 1..420: mol_type = unassigned DNA
tcatgaaggtgtcaagatgtttttaaacacattcccttgtcctgtttaaggtttcaggctctgtataactatactcccaggaatgaagatgagctggagctcagagaaagtgatgtcattgatgtcatggaaaagtgtgatgacggctggtttgtggggacctcaagaagaaccaaattctttggtactttccccggaaactacgtcaagaggctgtgaattgcgctccctccttctgtagaggccgcctgccagccatgcacctgcgtcaacgcgcctgaaacaccccgcgggcctcccgttgtcatgccttacggtttccaatgcgccgtcaccatctccacctgccaccaaaccaccagcagagtagccgccgctgctgtgagcctggggacgacatggcaggctggtccccctccg

SEQ ID NO: 20026 - DNA, 2011 bp, Homo sapiens
  misc_feature 1..2011: note = ENST00000319454
  source 1..2011: mol_type = unassigned DNA
taaaaggccactgactcctacttcctctgtatagagcaactgttgaactcagctgcctgtaggaaaactgaagactttaataacaaactctccaaggtgaaaatgaacacagggcgtgattctcagtcaccagactcagcaaaaggttttagaagcgttcgaccaaacctacaagataaaagatcaccaactcagagccagataacagtgaatggaaactcaggaggtgccgtgagtcccatgagttactatcagaggccgttttccccctcggcatattctctcccagcctcactcaactccagcattgtcatgcagcacggcacatccctcgattccacagacacatatccccagcatgcgcagtctctggatggcaccaccagcagctctatccccctgtaccgatcctcagaggaagagaagagagtgacagtcatcaaagccccgcattacccagggatcgggcccgtggatgaatccggaatccccacagcaattagaacgacagtcgaccggcccaaggactggtacaagacgatgtttaagcaaattcacatggtgcacaagccggatgatgacacagacatgtataatactccttatacatacaatgcaggtctgtacaacccaccctacagtgctcagtcacaccctgctgcaaagacccaaacctacagacctctttccaaaagccactccgacaacagccccaatgcctttaaggatgcgtcctccccagtgcctcccccacatgttccacctccagtcccgccgcttcgaccaagagatcggtcttcaacagaaaagcatgactgggatcctccagacagaaaagtggacacaagaaaatttcggtctgagccaaggagtatttttgaatatgaacctggcaagtcatcaattcttcagcatgaaagaccaccccctctcccaacaactccgacacctgttccaagggaacctggccggaagcctctttctagctcccgactcggagaagtcactggtagcccctcccctccgccccggagtggcgcccccacaccaagctcgcgcgccccggctctgtctcccacccggcctcctaaaaagcctctggactatgttcaagatcattcttctggtgttttcaatgaggcctccttgtatcagtcctctatagacagaagcctggaaagacccatgagttctgcaagcatggccagtgacttcaggaagcggaggaagagcgagcctgcagtgggtccaccacggggcttgggagatcaaagtgcgagcaggactagcccaggccgagtggacctcccaggatcaagcaccactcttacaaagtctttcactagctcttctccttcttccccatcaagagcaaaagaccgtgagtcccctagaagttactcatccactttgactgacatggggagaagtgcaccaagggaaagaagaggaactccagaaaaagagaaattgcctgcaaaagctgtttatgattttaaggctcagacatctaaggagttgtcatttaagaaaggagatactgtctacatcctcaggaaaattgatcaaaattggtatgagggagaacaccacgggagagtgggcatcttcccgatctcatacgtagagaaactcacacctcctgagaaagcacagcctgcaagaccacctccgccagcccagcccggagaaatcggagaagctatagccaaatacaacttcaacgcagacacaaatgtggagctgtcactgagaaagggagatagagttattcttcttaaaagagttgatcaaaactggtatgaaggtaaaatcccaggaaccaacagacaaggcatcttccctgtttcctatgtggaggtcgtcaagaagaacacaaaaggtgctgaggactaccctgaccctccaataccccacagctattctagtgataggattcacagcttgagctcaaataagccacagcgtcctgtgtttactcatgaaaatattcaaggtgggggggaaccgt

SEQ ID NO: 20027 - DNA, 2096 bp, Homo sapiens
  misc_feature 1..2096: note = ENST00000498125
  source 1..2096: mol_type = unassigned DNA
gatttgggagttgggaggtgagatgattggagtgaagagagttaatgtcatggaaaggaaaagctgtctgaagaaaaatacacattttaatgtccctcttcagccgtgcctgctgagagctctcctgggatgataagtgaaagtgtttggatttttttttaagttttaaaactctgccaaagcattgctcagtgtatctgggcagccccttccggcaaaacgcagcagtagcagaggcagcttctgagagcctgggcaggcagcagctggctgaccaagtccactggaagagaaggcttgtgccagccgggagaaggaagccggggacaggatgaaagcaacaacacctttgcagacagtcgaccggcccaaggactggtacaagacgatgtttaagcaaattcacatggtgcacaagccgggtctgtacaacccaccctacagtgctcagtcacaccctgctgcaaagacccaaacctacagacctctttccaaaagccactccgacaacagccccaatgcctttaaggatgcgtcctccccagtgcctcccccacatgttccacctccagtcccgccgcttcgaccaagagatcggtcttcaacagaaaagcatgactgggatcctccagacagaaaagtggacacaagaaaatttcggtctgagccaaggagtatttttgaatatgaacctggcaagtcatcaattcttcagcatgaaagaccaccccctctcccaacaactccgacacctgttccaagggaacctggccggaagcctctttctagctcccgactcggagaagtcactggtagcccctcccctccgccccggagtggcgcccccacaccaagctcgcgcgccccggctctgtctcccacccggcctcctaaaaagcctctggactatgttcaagatcattcttctggtgttttcaatgaggcctccttgtatcagtcctctatagacagaagcctggaaagacccatgagttctgcaagcatggccagtgacttcaggaagcggaggaagagcgagcctgcagtgggtccaccacggggcttgggagatcaaagtgcgagcaggactagcccaggccgagtggacctcccaggatcaagcaccactcttacaaagtctttcactagctcttctccttcttccccatcaagagcaaaagaccgtgagtcccctagaagttactcatccactttgactgacatggggagaagtgcaccaagggaaagaagaggaactccagaaaaagagaaattgcctgcaaaagctgtttatgattttaaggctcagacatctaaggagttgtcatttaagaaaggagatactgtctacatcctcaggaaaattgatcaaaattggtatgagggagaacaccacgggagagtgggcatcttcccgatctcatacgtagagaaactcacacctcctgagaaagcacagcctgcaagaccacctccgccagcccagcccggagaaatcggagaagctatagccaaatacaacttcaacgcagacacaaatgtggagctgtcactgagaaagggagatagagttattcttcttaaaagagttgatcaaaactggtatgaaggtaaaatcccaggaaccaacagacaaggcatcttccctgtttcctatgtggaggtcgtcaagaagaacacaaaaggtgctgaggactaccctgaccctccaataccccacagctattctagtgataggattcacagcttgagctcaaataagttggcttccagtgaaccagcccctcctcccacccacaaagtctcacctggctcagataaaggagctctccagggaactggccagggctggttgtccctgacagcctcatgtctaccagcaaaccctttggccccaacaccacctcgtttcctggacaacttcttgggtgaattggagaagcttggtgctttaaccttgtcagctgaccaagccaaaccaaccatcctagaggacgccatcctggaaattaaggaggaacctgctgtcctcctcccattgtccccagcgactgcacctgccgaatcaccttccactcacgcgggtgtggcctcgg

SEQ ID NO: 20028 - DNA, 512 bp, Homo sapiens
  misc_feature 1..512: note = ENST00000480146
  source 1..512: mol_type = unassigned DNA
gtgttgatcttgagaattattgctgtacatcacaaaaagaccatgtcaacgtgtctcttccagggagttgtcatttaagaaaggagatactgtctacatcctcaggaaaattgatcaaaattggtatgagggagaacaccacgggagagtgggcatcttcccgatctcatacgtagagaaactcacacctcctgagaaagcacagcctgcaagaccacctccgccagcccagcccggagaaatcggagaagctatagccaaatacaacttcaacgcagacacaaatgtggagctgtcactgagaaaggtagcccagctggttttttgtttgtttgtttttgtttgtttgttcttcagtgggtttgaaaaggctgtatattttcaaaactaaaataggttatctttttctttagacatttttatgtttaccctattttctacaaaggactctttaaggcagcccagagtcacggttccctgctggtccctgtgtccttttagaggagttcccc

SEQ ID NO: 20029 - DNA, 873 bp, Homo sapiens
  misc_feature 1..873: note = ENST00000451974
  source 1..873: mol_type = unassigned DNA
caaacctacagacctctttccaaaagccactccgacaacagccccaatgcctttaaggatgcgtcctccccagtgcctcccccacatgttccacctccagtcccgccgcttcgaccaagagatcggtcttcaacagaaaagcatgactgggatcctccagacagaaaagtggacacaagaaaatttcggtctgagccaaggagtatttttgaatatgaacctggcaagtcatcaattcttcagcatgaaagaccacctcctaaaaagcctctggactatgttcaagatcattcttctggtgttttcaatgaggcctccttgtatcagtcctctatagacagaagcctggaaagacccatgagttctgcaagcatggccagtgacttcaggaagcggaggaagagcgagcctgcagtgggtccaccacggggcttgggagatcaaagtgcgagcaggactagcccaggccgagtggacctcccaggatcaagcaccactcttacaaagtctttcactagctcttctccttcttccccatcaagagcaaaagaccgtgagtcccctagaagttactcatccactttgactgacatggggagaagtgcaccaagggaaagaagaggaactccagaaaaagagaaattgcctgcaaaagctgtttatgattttaaggctcagacatctaaggagttgtcatttaagaaaggagatactgtctacatcctcaggaaaattgatcaaaattggtatgagggagaacaccacgggagagtgggcatcttcccgatctcatacgtagagaaactcacacctcctgagaaagcacagcctgcaagaccacctccgccagcccagcccggagaaatcggagaa

SEQ ID NO: 20030 - DNA, 871 bp, Homo sapiens
  misc_feature 1..871: note = ENST00000438278
  source 1..871: mol_type = unassigned DNA
ctcagaggaagagaagagagtgacagtcatcaaagccccgcattacccagggatcgggcccgtggatgaatccggaatccccacagcaattagaacgacagtcgaccggcccaaggactggtacaagacgatgtttaagcaaattcacatggtgcacaagccggatgatgacacagacatgtataatactccttatacatacaatgcaggtctgtacaacccaccctacagtgctcagtcacaccctgctgcaaagacccaaacctacagacctctttccaaaagccactccgacaacagccccaatgcctttaaggatgcgtcctccccagtgcctcccccacatgttccacctccagtcccgccgcttcgaccaagagatcggtcttcaacagaaaagcatgactgggatcctccagacagaaaagtggacacaagaaaatttcggtctgagccaaggagtatttttgaatatgaacctggcaagtcatcaattcttcagcatgaaagaccagcctccttgtatcagtcctctatagacagaagcctggaaagacccatgagttctgcaagcatggccagtgacttcaggaagcggaggaagagcgagcctgcagtgggtccaccacggggcttgggagatcaaagtgcgagcaggactagcccaggccgagtggacctcccaggatcaagcaccactcttacaaagtctttcactagctcttctccttcttccccatcaagagcaaaagaccgtgagtcccctagaagttactcatccactttgactgacatggggagaagtgcaccaagggaaagaagaggaactccagaaaaagagaaattgcctgcaaaagctgtttatgatttt

SEQ ID NO: 20031 - DNA, 294 bp, Homo sapiens
  misc_feature 1..294: note = ENST00000487184
  source 1..294: mol_type = unassigned DNA
tggacctcccaggatcaagcaccactcttacaaagtctttcactagctcttctccttcttccccatcaagagcaaaagttactcagggctcaacggcaacccctccagtgagttagattactgtagcacttacagacagcacttggatgtccctcgggactcaccaagagccattagtttcaagaacggctggcaaatggcccggcaaaacgcagaaatctggagcagcacggaagaaaccgtctctcccaaaatcaaatcccggagctgtgacgatctcctaaacgacgactg

SEQ ID NO: 20032 - DNA, 759 bp, Homo sapiens
  misc_feature 1..759: note = ENST00000445625
  source 1..759: mol_type = unassigned DNA
agcaaattcacatggtgcacaagccggatgatgacacagacatgtataatactccttatacatacaatgcaggtctgtacaacccaccctacagtgctcagtcacaccctgctgcaaagacccaaacctacagacctctttccaaaagccactccgacaacagccccaatgcctttaaggatgcgtcctccccagtgcctcccccacatgttccacctccagtcccgccgcttcgaccaagagatcggtcttcaacagaaaagcatgactgggatcctccagacagaaaagtggacacaagaaaatttcggtctgagccaaggagtatttttgaatatgaacctggcaagtcatcaattcttcagcatgaaagaccaccccctctcccaacaactccgacacctgttccaagggaacctggccggaagcctctttctagctcccgactcggagaagtcactggtagcccctcccctccgccccggagtggcgcccccacaccaagctcgcgcgccccggctctgtctcccacccggtcctctatagacagaagcctggaaagacccatgagttctgcaagcatggccagtgacttcaggaagcggaggaagagcgagcctgcagtgggtccaccacggggcttgggagatcaaagtgcgagcaggactagcccaggccgagtggacctcccaggatcaagcaccactcttacaaagtctttcactagctcttctccttcttccccatcaagagcaaaag

SEQ ID NO: 20033 - DNA, 723 bp, Homo sapiens
  misc_feature 1..723: note = ENST00000487836
  source 1..723: mol_type = unassigned DNA
agcagtagcagaggcagcttctgagagcctgggcaggcagcagctggctgaccaagtccactggaagagaaggcttgtgccagccgggagaaggaagccggggacaggatgaaagcaacaacacctttgcagacagtcgaccggcccaaggactggtacaagacgatgtttaagcaaattcacatggtgcacaagccgggtctgtacaacccaccctacagtgctcagtcacaccctgctgcaaagacccaaacctacagacctctttccaaaagccactccgacaacagccccaatgcctttaaggatgcgtcctccccagtgcctcccccacatgttccacctccagtcccgccgcttcgaccaagagatcggtcttcaacagaaaagcatgactgggatcctccagacagaaaagtggacacaagaaaatttcggtctgagccaaggagtatttttgaatatgaacctggcaagtcatcaattcttcagcatgaaagaccagcctccttgtatcagtcctctatagacagaagcctggaaagacccatgagttctgcaagcatggccagtgacttcaggaagcggaggaagagcgagcctgcagtgggtccaccacggggcttgggagatcaaagtgcgagcaggactagcccaggccgagtggacctcccaggatcaagcaccactcttacaaagtctttcactagctcttctccttct

SEQ ID NO: 20034 - DNA, 556 bp, Homo sapiens
  misc_feature 1..556: note = ENST00000495932
  source 1..556: mol_type = unassigned DNA
ggaagagaaggcttgtgccagccgggagaaggaagccggggacaggatgaaagcaacaacacctttgcagacagtcgaccggcccaaggactggtacaagacgatgtttaagcaaattcacatggtgcacaagccgggtctgtacaacccaccctacagtgctcagtcacaccctgctgcaaagacccaaacctacagacctctttccaaaagccactccgacaacagccccaatgcctttaaggatgcgtcctccccagtgcctcccccacatgttccacctccagtcccgccgcttcgaccaagagatcggtcttcaacagaaaagcatgactgggatcctccagacagaaaagtggacacaagaaaatttcggtctgagccaaggagtatttttgaatatgaacctggcctccttgtatcagtcctctatagacagaagcctggaaagacccatgagttctgcaagcatggccagtgacttcaggaagcggaggaagagcgagcctgcagtgggtccaccacggggcttgggagatcaaagtgcgagcaggac

SEQ ID NO: 20035 - DNA, 593 bp, Homo sapiens
  misc_feature 1..593: note = ENST00000490562
  source 1..593: mol_type = unassigned DNA
agcagaggcagcttctgagagcctgggcaggcagcagctggctgaccaagtccactggaagagaaggcttgtgccagccgggagaaggaagccggggacaggatgaaagcaacaacacctttgcagacagtcgaccggcccaaggactggtacaagacgatgtttaagcaaattcacatggtgcacaagccggatgatgacacagacatgtataatactccttatacatacaatgcaggtctgtacaacccaccctacagtgctcagtcacaccctgctgcaaagacccaaacctacagacctctttccaaaagccactccgacaacagccccaatgcctttaaggatgcgtcctccccagtgcctcccccacatgttccacctccagtcccgccgcttcgaccaagagatcggtcttcaacagaaaagcatgactgggatcctccagacagaaaagtggacacaagaaaatttcggtctgagccaaggagtatttttgaatatgaacctggcaagtcatcaattcttcagcatgaaagaccagcctccttgtatcagtcctctatagacagaagcctggaaagacccatgag

SEQ ID NO: 20036 - DNA, 911 bp, Homo sapiens
  misc_feature 1..911: note = ENST00000492104
  source 1..911: mol_type = unassigned DNA
tttgggagttgggaggtgagatgattggagtgaagagagttaatgtcatggaaaggaaaagctgtctgaagaaaaatacacattttaatgtccctcttcagccgtgcctgctgagagctctcctgggatgataagtgaaagtgtttggatttttttttaagttttaaaactctgccaaagcattgctcagtgtatctgggcagccccttccggcaaaacgcagcagtagcagaggcagcttctgagagcctgggcaggcagcagctggctgaccaagtccactggaagagaaggcttgtgccagccgggagaaggaagccggggacaggatgaaagcaacaacacctttgcagacagtcgaccggcccaaggactggtacaagacgatgtttaagcaaattcacatggtgcacaagccggatgatgacacagacatgtataatactccttatacatacaatgcaggtctgtacaacccaccctacagtgctcagtcacaccctgctgcaaagacccaaacctacagacctctttccaaaagccactccgacaacagccccaatgcctttaaggatgcgtcctccccagtgcctcccccacatgttccacctccagtcccgccgcttcgaccaagagatcggtcttcaacagaaaagcatgactgggatcctccagacagaaaagtggacacaagaaaatttcggtctgagccaaggagtatttttgaatatgaacctggcaagtcatcaattcttcagcatgaaagaccaccccctctcccaacaactccgacacctgttccaagggaacctggccggaagcctctttctagctcccgactcggagaagtcactggtagcccctcccctccgccccggagtggcgcccccacaccaagctcgcgcgccccg

SEQ ID NO: 20037 - DNA, 1034 bp, Homo sapiens
  misc_feature 1..1034: note = ENST00000490779
  source 1..1034: mol_type = unassigned DNA
agcagctctatccccctgtaccgatcctcagaggaagagaagagagtgacagtcatcaaagccccgcattacccagggatcgggcccgtggatgaatccggaatccccacagcaattagaacgacagtcgaccggcccaaggactggtacaagacgatgtttaagcaaattcacatggtgcacaagccggatgatgacacagacatgtataatactccttatacatacaatgcaggtctgtacaacccaccctacagtgctcagtcacaccctgctgcaaagacccaaacctacagacctctttccaaaagccactccgacaacagccccaatgcctttaaggatgcgtcctccccagtgcctcccccacatgttccacctccagtcccgccgcttcgaccaagagatcggtcttcaacagaaaagcatgactgggatcctccagacagaaaagtggacacaagaaaatttcggtctgagccaaggagtatttttgaatatgaacctggcaagtcatcaattcttcagcatgaaagaccagttaccaagcctcaagcttcctgattgattgtcattctaatggatcaagattatatttcactttgcaggattttttccaattatttaattatatgcaaacaaaaatatctatacacttaagaagaaccacttgcctcctcgaagcgcaggttcacacataggtcttcccttggccttctttggttttgattccccaatactcccttgcatgtcctttgcttcccctcagaaatcagtgtcctcaggattttctttgaaactccacagttcctctgcatctccttccaagcctacttctaggaaaacatttgcaatcaattgcaatttactctcatttttgctttaaaagaattttaggtgtcagtgaacaggaaaaagagagttttctttgtggagctccttcaagagtctccaagaaatcacactcatatataatccaaggccagccctgtggtttaattggaaactctagccttgccacacccaacatgagt

SEQ ID NO: 20038 - DNA, 780 bp, Homo sapiens
  misc_feature 1..780: note = ENST00000492810
  source 1..780: mol_type = unassigned DNA
agtagcagaggcagcttctgagagcctgggcaggcagcagctggctgaccaagtccactggaagagaaggcttgtgccagccgggagaaggaagccggggacaggatgaaagcaacaacacctttgcagacagtcgaccggcccaaggactggtacaagacgatgtttaagcaaattcacatggtgcacaagccggatgatgacacagacatgtataatactccttatacatacaatgcaggtctgtacaacccaccctacagtgctcagtcacaccctgctgcaaagacccaaacctacagacctctttccaaaagccactccgacaacagccccaatgcctttaaggatgcgtcctccccagtgcctcccccacatgttccacctccagtcccgccgcttcgaccaagagatcggtcttcaacagaaaagcatgactgggatcctccagacagaaaagtggacacaagaaaatttcggtctgagccaaggagtatttttgaatatgaacctggcaagtcatcaattcttcagcatgaaagaccagttaccaagcctcaagcttcctgattgattgtcattctaatggatcaagattatatttcactttgcaggattttttccaattatttaattatatgcaaacaaaaatatctatacacttaagaagaaccacttgcctcctcgaagcgcaggttcacacataggtcttcccttggccttctttggttttgattccccaatactcccttgcatgtcctttgcttcccctcagaaatc

SEQ ID NO: 20039 - DNA, 571 bp, Homo sapiens
  misc_feature 1..571: note = ENST00000476311
  source 1..571: mol_type = unassigned DNA
gagagcctgggcaggcagcagctggctgaccaagtccactggaagagaaggcttgtgccagccgggagaaggaagccggggacaggatgaaagcaacaacacctttgcagacagtcgaccggcccaaggactggtacaagacgatgtttaagcaaattcacatggtgcacaagccgggtctgtacaacccaccctacagtgctcagtcacaccctgctgcaaagacccaaacctacagacctctttccaaaagccactccgacaacagccccaatgcctttaaggatgcgtcctccccagtgcctcccccacatgttccacctccagtcccgccgcttcgaccaagagatcggtcttcaacagaaaagcatgactgggatcctccagacagaaaagtggacacaagaaaatttcggtctgagccaaggagtatttttgaatatgaacctggcaagtcatcaattcttcagcatgaaagaccagttaccaagcctcaagcttcctgattgattgtcattctaatggatcaagattatatttcactttgcaggattttttccaattatttaat

SEQ ID NO: 20040 - DNA, 1031 bp, Homo sapiens
  misc_feature 1..1031: note = ENST00000466289
  source 1..1031: mol_type = unassigned DNA
ggcagcttctgagagcctgggcaggcagcagctggctgaccaagtccactggaagagaaggcttgtgccagccgggagaaggaagccggggacaggatgaaagcaacaacacctttgcagacagtcgaccggcccaaggactggtacaagacgatgtttaagcaaattcacatggtgcacaagccggatgatgacacagacatgtataatactccttatacatacaatgcaggtctgtacaacccaccctacagtgctcagtcacaccctgctgcaaagacccaaacctacagacctctttccaaaagccactccgacaacagccccaatgcctttaaggatgcgtcctccccagtgcctcccccacatgttccacctccagtcccgccgcttcgaccaagagatcggtcttcaacagaaaagcatgactgggatcctccagacagaaaagtggacacaagaaaatttcggtctgagccaaggagtatttttgaatatgaacctggcaagtcatcaattcttcagcatgaaagaccagtaagcacttgtcattaaacagaatatgccagctcgctgggctcccagggctccccaataaacctgaatttcagacccattagcaatttttgtcacaaaggtaatcacttagaaatcatgtttattttgtataatgatttgtacatctcatctcagaattgaaagatacatgttctaatatattgtctttactgaccaaatacaagtgtatgtgtgtgtgtatgtgtgtgtatttatatatatatatatacacacacacatgcaggtgtatatacatacacatatatacacatgtgtatgcacacacatatatatatttatatgcaagattcatttgcatgtaactctaactgtgcctaatcattaatcagagtttaacttttaaaaaagttcataagtgcaatacttaattgctatcatagcttgctaatgagaaaaatcattaattaatctccccaatatacatggacccaggcagttccatcccttgtttt

SEQ ID NO: 20041 - DNA, 658 bp, Homo sapiens
  misc_feature 1..658: note = ENST00000485380
  source 1..658: mol_type = unassigned DNA
gagaaggcttgtgccagccgggagaaggaagccggggacaggatgaaagcaacaacacctttgcagacagtcgaccggcccaaggactggtacaagacgatgtttaagcaaattcacatggtgcacaagccgggtctgtacaacccaccctacagtgctcagtcacaccctgctgcaaagacccaaacctacagacctctttccaaaagccactccgacaacagccccaatgcctttaaggatgcgtcctccccagtgcctcccccacatgttccacctccagtcccgccgcttcgaccaagagatcggtcttcaacagaaaagcatgactgggatcctccagacagaaaagtggacacaagaaaatttcggtctgagccaaggagtatttttgaatatgaacctggcaagtcatcaattcttcagcatgaaagaccagtaagcacttgtcattaaacagaatatgccagctcgctgggctcccagggctccccaataaacctgaatttcagacccattagcaatttttgtcacaaaggtaatcacttagaaatcatgtttattttgtataatgatttgtacatctcatctcagaattgaaagatacatgttctaatatattgtctttactgaccaaatacaagtgtatgtgtgtgtg

SEQ ID NO: 20042 - DNA, 1790 bp, Homo sapiens
  misc_feature 1..1790: note = ENST00000470685
  source 1..1790: mol_type = unassigned DNA
gagctgagaggaccagccattttacttatggaaaacagtgtggcatattctgctgagcttcgccctggaagaagcctcttttatacatctcttcagggaagagagaagcaatgggcatgttagtatacaatgatcacagccacgcaggcctgcaagctgccttttggacaggctgttgactgccgttccaattagctgattggagaatgtggaatgcagagtgataatgctgcatatctgctatcaggcagcagcaaaggtttttgtcttgggaaggcaagctttccctgcaatattatctcagcagctccctagctgcttaccctgaaaacgagggatccaaacggagggtgttgcactctgctaacgctggtcctgtgcgtggctgtggcatatgagcggcaggtctgaaaaagcaggtgtgtgctgggacgggcactggactggaacgcaggcggacgctctcgggtttacctgcttcctgttaacagattgtgggctcccagggcatatgtctgcacgctgaggccgaggcggagaaggggcttcctgagcgtcccagtacactgacagagacacttggattggacttaatcttaaacctctggagttcaagaccttttaaaaagggctaaataaacaatctctacatgtaaaaggccactgactcctacttcctctgtatagagcaactgttgaactcagctgcctgtaggaaaactgaagactttaataacaaactctccaaggtgaaaatgaacacagatagcggtgggtgtgctcgcaaacgtgccgccatgtctgttacgctaacatctgtgaagagagtgcaaagttctccaaacctattggctgcagggcgtgattctcagtcaccagactcagcttggagatcttacaatgatggcaatcaggagacactgaacggagatgctacatattcctctcttgcagcaaaaggttttagaagcgttcgaccaaacctacaagataaaagatcaccaactcagagccagataacagtgaatggaaactcaggaggtgccgtgagtcccatgagttactatcagaggccgttttccccctcggcatattctctcccagcctcactcaactccagcattgtcatgcagcacggcacatccctcgattccacagacacatatccccagcatgcgcagtctctggatggcaccaccagcagctctatccccctgtaccgatcctcagaggaagagaagagagtgacagtcatcaaagccccgcattacccagggatcgggcccgtggatgaatccggaatccccacagcaattagaacgacagtcgaccggcccaaggactggtacaagacgatgtttaagcaaattcacatggtgcacaagccggatgatgacacagacatgtataatactccttatacatacaatgcaggtctgtacaacccaccctacagtgctcagtcacaccctgctgcaaagacccaaacctacagacctctttccaaaagccactccgacaacagccccaatgcctttaaggatgcgtcctccccagtgcctcccccacatgttccacctccagtcccgccgcttcgaccaagagatcggtcttcaacagaaaagcatgactgggatcctccagacagaaaagtggacacaagaaaatttcggtctgagccaaggagtatttttgaatatgaacctggcaagtcatcaattcttcagcatgaaagaccagtaagcacttgtcattaaacagaatatgccagctcgctgggctcccagggc

SEQ ID NO: 20043 - DNA, 538 bp, Homo sapiens
  misc_feature 1..538: note = ENST00000494140
  source 1..538: mol_type = unassigned DNA
gacttctcatgaatgttatgctgtgtgtggcagagaaagaaagctgttgatgggagagaattacacaatctgtttttccatttgaatgaaacatcatgaacattgcgattttgttaaatgacagtcgaccggcccaaggactggtacaagacgatgtttaagcaaattcacatggtgcacaagccggatgatgacacagacatgtataatactccttatacatacaatgcaggtctgtacaacccaccctacagtgctcagtcacaccctgctgcaaagacccaaacctacagacctctttccaaaagccactccgacaacagccccaatgcctttaaggatgcgtcctccccagtgcctcccccacatgttccacctccagtcccgccgcttcgaccaagagatcggtcttcaacagaaaagcatgactgggatcctccagacagaaaagtggacacaagaaaatttcggtctgagccaaggagtatttttgaatatgaacctggcaagtcatcaattcttcagcatgaaagaccag

SEQ ID NO: 20044 - DNA, 546 bp, Homo sapiens
  misc_feature 1..546: note = ENST00000445343
  source 1..546: mol_type = unassigned DNA
agcacaacaatcatttgttgagagcctactcaagactctgtacttgtccgtgacagtcactgggagcatagcctttctccaatgacatcgccctgaacatccactctaaaaatgcagggcgtgattctcagtcaccagactcagcaaaaggttttagaagcgttcgaccaaacctacaagataaaagatcaccaactcagagccagataacagtgaatggaaactcaggaggtgccgtgagtcccatgagttactatcagaggccgttttccccctcggcatattctctcccagcctcactcaactccagcattgtcatgcagcacggcacatccctcgattccacagacacatatccccagcatgcgcagtctctggatggcaccaccagcagctctatccccctgtaccgatcctcagaggaagagaagagagtgacagtcatcaaagccccgcattacccagggatcgggcccgtggatgaatccggaatccccacagcaattagaacgacagtcgaccggcccaaggactggtacaagacga

SEQ ID NO: 20045 - DNA, 565 bp, Homo sapiens
  misc_feature 1..565: note = ENST00000439914
  source 1..565: mol_type = unassigned DNA
aacagattgtgggctcccagggcatatgtctgcacgctgaggccgaggcggagaaggggcttcctgagcgtcccagtacactgacagagggcgtgattctcagtcaccagactcagcttggagatcttacaatgatggcaatcaggagacactgaacggagatgctacatattcctctcttgcagcaaaaggttttagaagcgttcgaccaaacctacaagataaaagatcaccaactcagagccagataacagtgaatggaaactcaggaggtgccgtgagtcccatgagttactatcagaggccgttttccccctcggcatattctctcccagcctcactcaactccagcattgtcatgcagcacggcacatccctcgattccacagacacatatccccagcatgcgcagtctctggatggcaccaccagcagctctatccccctgtaccgatcctcagaggaagagaagagagtgacagtcatcaaagccccgcattacccagggatcgggcccgtggatgaatccggaatccccacagcaattagaacgacagtcgaccgg

SEQ ID NO: 20046 - DNA, 760 bp, Homo sapiens
  misc_feature 1..760: note = ENST00000444771
  source 1..760: mol_type = unassigned DNA
tggcgatctgggcaaggcattttcatccctttgcagacaaccccggctgctgttaatgctgaaaatagctcaaatgctctcagaacagtagcaccacccagcagctgggattctttccctctctcatttgcctctctcttgctttttttccttcagacacttggattggacttaatcttaaacctctggagttcaagaccttttaaaaagggctaaataaacaatctctacatgtaaaaggccactgactcctacttcctctgtatagagcaactgttgaactcagctgcctgtagggcgtgattctcagtcaccagactcagcttggagatcttacaatgatggcaatcaggagacactgaacggagatgctacatattcctctcttgcagcaaaaggttttagaagcgttcgaccaaacctacaagataaaagatcaccaactcagagccagataacagtgaatggaaactcaggaggtgccgtgagtcccatgagttactatcagaggccgttttccccctcggcatattctctcccagcctcactcaactccagcattgtcatgcagcacggcacatccctcgattccacagacacatatccccagcatgcgcagtctctggatggcaccaccagcagctctatccccctgtaccgatcctcagaggaagagaagagagtgacagtcatcaaagccccgcattacccagggatcgggcccgtggatgaatccggaatccccacagcaattagaacg

SEQ ID NO: 20047 - DNA, 499 bp, Homo sapiens
  misc_feature 1..499: note = ENST00000430503
  source 1..499: mol_type = unassigned DNA
gactcctacttcctctgtatagagcaactgttgaactcagctgcctagcgagaataggacagactcgtataccattctgatctgggtgcatttcttcagaaggaaaactgaagactttaataacaaactctccaaggtgaaaatgaacacagggcgtgattctcagtcaccagactcagcaaaaggttttagaagcgttcgaccaaacctacaagataaaagatcaccaactcagagccagataacagtgaatggaaactcaggaggtgccgtgagtcccatgagttactatcagaggccgttttccccctcggcatattctctcccagcctcactcaactccagcattgtcatgcagcacggcacatccctcgattccacagacacatatccccagcatgcgcagtctctggatggcaccaccagcagctctatccccctgtaccgatcctcagaggaagagaagagagtgacagtcatcaaagccccgcattaccca

SEQ ID NO: 20048 - DNA, 567 bp, Homo sapiens
  misc_feature 1..567: note = ENST00000450341
  source 1..567: mol_type = unassigned DNA
gtaaaaggccactgactcctacttcctctgtatagagcaactgttgaactcagctgcctgtagagcgagaataggacagactcgtataccattctgatctgggtgcatttcttcagaaggtacgctgtcctcacgggaaaccgcccgccactgcctgggtttggggctgatgaggccaggaagaaacttaatgcgtgcactctaacaaaaagatttcccaggcgtgattctcagtcaccagactcagcaaaaggttttagaagcgttcgaccaaacctacaagataaaagatcaccaactcagagccagataacagtgaatggaaactcaggaggtgccgtgagtcccatgagttactatcagaggccgttttccccctcggcatattctctcccagcctcactcaactccagcattgtcatgcagcacggcacatccctcgattccacagacacatatccccagcatgcgcagtctctggatggcaccaccagcagctctatccccctgtaccgatcctcagaggaagagaagagagtgacagtcatcaaagccccgcattaccca

SEQ ID NO: 20049 - DNA, 575 bp, Homo sapiens
  misc_feature 1..575: note = ENST00000445115
  source 1..575: mol_type = unassigned DNA
attctttccctctctcatttgcctctctcttgctttttttccttcagacacttggattggacttaatcttaaacctctggagttcaagaccttttaaaaagggctaaataaacaatctctacatgtaaaaggccactgactcctacttcctctgtatagagcaactgttgaactcagctgcctgtagagcgagaataggacagactcgtataccattctgatctgggtgcatttcttcagaagggcgtgattctcagtcaccagactcagcaaaaggttttagaagcgttcgaccaaacctacaagataaaagatcaccaactcagagccagataacagtgaatggaaactcaggaggtgccgtgagtcccatgagttactatcagaggccgttttccccctcggcatattctctcccagcctcactcaactccagcattgtcatgcagcacggcacatccctcgattccacagacacatatccccagcatgcgcagtctctggatggcaccaccagcagctctatccccctgtaccgatcctcagaggaagagaagagagtgacagtcatcaaa

SEQ ID NO: 20050 - DNA, 573 bp, Homo sapiens
  misc_feature 1..573: note = ENST00000457247
  source 1..573: mol_type = unassigned DNA
agaacagtagcaccacccagcagctgggattctttccctctctcatttgcctctctcttgctttttttccttcagacacttggattggacttaatcttaaacctctggagttcaagaccttttaaaaagggctaaataaacaatctctacatgtaaaaggccactgactcctacttcctctgtatagagcaactgttgaactcagctgcctgtaggtaaacacggtgttccagaatacagcaggagcatctgggcatttttgtggctggcgtgattctcagtcaccagactcagcaaaaggttttagaagcgttcgaccaaacctacaagataaaagatcaccaactcagagccagataacagtgaatggaaactcaggaggtgccgtgagtcccatgagttactatcagaggccgttttccccctcggcatattctctcccagcctcactcaactccagcattgtcatgcagcacggcacatccctcgattccacagacacatatccccagcatgcgcagtctctggatggcaccaccagcagctctatccccctgtaccgatcctcagagg

SEQ ID NO: 20051 - DNA, 574 bp, Homo sapiens
  misc_feature 1..574: note = ENST00000456596
  source 1..574: mol_type = unassigned DNA
tttttttccttcagacacttggattggacttaatcttaaacctctggagttcaagaccttttaaaaagggctaaataaacaatctctacatgtaaaaggccactgactcctacttcctctgtatagagcaactgttgaactcagctgcctgtagagcgagaataggacagactcgtataccattctgatctgggtgcatttcttcagaagggcgtgattctcagtcaccagactcagcttggagatcttacaatgatggcaatcaggagacactgaacggagatgctacatattcctctcttgcagcaaaaggttttagaagcgttcgaccaaacctacaagataaaagatcaccaactcagagccagataacagtgaatggaaactcaggaggtgccgtgagtcccatgagttactatcagaggccgttttccccctcggcatattctctcccagcctcactcaactccagcattgtcatgcagcacggcacatccctcgattccacagacacatatccccagcatgcgcagtctctggatggcaccaccagcagctctatccccctgtaccg

SEQ ID NO: 20052 - DNA, 629 bp, Homo sapiens
  misc_feature 1..629: note = ENST00000425679
  source 1..629: mol_type = unassigned DNA
aaatgctctcagaacagtagcaccacccagcagctgggattctttccctctctcatttgcctctctcttgctttttttccttcagacacttggattggacttaatcttaaacctctggagttcaagaccttttaaaaagggctaaataaacaatctctacatgtaaaaggccactgactcctacttcctctgtatagagcaactgttgaactcagctgcctgtaggaaaactgaagactttaataacaaactctccaaggtgaaaatgaacacagggcgtgattctcagtcaccagactcagcttggagatcttacaatgatggcaatcaggagacactgaacggagatgctacatattcctctcttgcagcaaaaggttttagaagcgttcgaccaaacctacaagataaaagatcaccaactcagagccagataacagtgaatggaaactcaggaggtgccgtgagtcccatgagttactatcagaggccgttttccccctcggcatattctctcccagcctcactcaactccagcattgtcatgcagcacggcacatccctcgattccacagacacatatccccagcatgcgcagtctctggatggcaccaccagcagctctatcc

SEQ ID NO: 20053 - DNA, 549 bp, Homo sapiens
  misc_feature 1..549: note = ENST00000439049
  source 1..549: mol_type = unassigned DNA
aagcagataggtttcagagataaagagtgaaaccaaaaacaccgcacacctcatccaaatctgcgctcatacttgcagcaaatgtttgctgtcagttgcttcataataacagcacagaccccgaattgcaggaggaattgcctggtagaaaactgaagactttaataacaaactctccaaggtgaaaatgaacacagggcgtgattctcagtcaccagactcagcttggagatcttacaatgatggcaatcaggagacactgaacggagatgctacatattcctctcttgcagcaaaaggttttagaagcgttcgaccaaacctacaagataaaagatcaccaactcagagccagataacagtgaatggaaactcaggaggtgccgtgagtcccatgagttactatcagaggccgttttccccctcggcatattctctcccagcctcactcaactccagcattgtcatgcagcacggcacatccctcgattccacagacacatatccccagcatgcgcagtctctggatggcaccaccagcagctctat

SEQ ID NO: 20054 - DNA, 594 bp, Homo sapiens
  misc_feature 1..594: note = ENST00000451958
  source 1..594: mol_type = unassigned DNA
agattgtgggctcccagggcatatgtctgcacgctgaggccgaggcggagaaggggcttcctgagcgtcccagtacactgacagagacacttggattggacttaatcttaaacctctggagttcaagaccttttaaaaagggctaaataaacaatctctacatgtaaaaggccactgactcctacttcctctgtatagagcaactgttgaactcagctgcctgtaggaaaactgaagactttaataacaaactctccaaggtgaaaatgaacacagggcgtgattctcagtcaccagactcagcttggagatcttacaatgatggcaatcaggagacactgaacggagatgctacatattcctctcttgcagcaaaaggttttagaagcgttcgaccaaacctacaagataaaagatcaccaactcagagccagataacagtgaatggaaactcaggaggtgccgtgagtcccatgagttactatcagaggccgttttccccctcggcatattctctcccagcctcactcaactccagcattgtcatgcagcacggcacatccctcgattccacagacacatatccccagcatg

SEQ ID NO: 20055 - DNA, 611 bp, Homo sapiens
  misc_feature 1..611: note = ENST00000444781
  source 1..611: mol_type = unassigned DNA
gtaaatgctccctaggctggctgcggctacaaggcagacccgggagctgagaatagaggaatacctgcccaagcaactcattctgcacagcagccgacaagacagcgattttcctgtgctggaatgtgcccatccaaagacacttggattggacttaatcttaaacctctggagttcaagaccttttaaaaagggctaaataaacaatctctacatgtaaaaggccactgactcctacttcctctgtatagagcaactgttgaactcagctgcctgtagatagcggtgggtgtgctcgcaaacgtgccgccatgtctgttacgctaacatctgtgaagagagtgcaaagttctccaaacctattggctgcagggcgtgattctcagtcaccagactcagcaaaaggttttagaagcgttcgaccaaacctacaagataaaagatcaccaactcagagccagataacagtgaatggaaactcaggaggtgccgtgagtcccatgagttactatcagaggccgttttccccctcggcatattctctcccagcctcactcaactccagcattgtcatgcagcacggcacatccctcgattccacagacacatat

SEQ ID NO: 20056 - DNA, 590 bp, Homo sapiens
  misc_feature 1..590: note = ENST00000414724
  source 1..590: mol_type = unassigned DNA
tttttttccttcagacacttggattggacttaatcttaaacctctggagttcaagaccttttaaaaagggctaaataaacaatctctacatgtaaaaggccactgactcctacttcctctgtatagagcaactgttgaactcagctgcctgtagagcgagaataggacagactcgtataccattctgatctgggtgcatttcttcagaagatagcggtgggtgtgctcgcaaacgtgccgccatgtctgttacgctaacatctgtgaagagagtgcaaagttctccaaacctattggctgcagggcgtgattctcagtcaccagactcagcttggagatcttacaatgatggcaatcaggagacactgaacggagatgctacatattcctctcttgcagcaaaaggttttagaagcgttcgaccaaacctacaagataaaagatcaccaactcagagccagataacagtgaatggaaactcaggaggtgccgtgagtcccatgagttactatcagaggccgttttccccctcggcatattctctcccagcctcactcaactccagcattgtcatgcagcacggcacatcc

SEQ ID NO: 20057 - DNA, 835 bp, Homo sapiens
  misc_feature 1..835: note = ENST00000419063
  source 1..835: mol_type = unassigned DNA
gtttttgtcttgggaaggcaagctttccctgcaatattatctcagcagctccctagctgcttaccctgaaaacgagggatccaaacggagggtgttgcactctgctaacgctggtcctgtgcgtggctgtggcatatgagcggcaggtctgaaaaagcaggtgtgtgctgggacgggcactggactggaacgcaggcggacgctctcgggtttacctgcttcctgttaacagattgtgggctcccagggcatatgtctgcacgctgaggccgaggcggagaaggggcttcctgagcgtcccagtacactgacagagacacttggattggacttaatcttaaacctctggagttcaagaccttttaaaaagggctaaataaacaatctctacatgtaaaaggccactgactcctacttcctctgtatagagcaactgttgaactcagctgcctgtaggaaaactgaagactttaataacaaactctccaaggtgaaaatgaacacagatagcggtgggtgtgctcgcaaacgtgccgccatgtctgttacgctaacatctgtgaagagagtgcaaagttctccaaacctattggctgcagggcgtgattctcagtcaccagactcagcttggagatcttacaatgatggcaatcaggagacactgaacggagatgctacatattcctctcttgcagcaaaaggttttagaagcgttcgaccaaacctacaagataaaagatcaccaactcagagccagataacagtgaatggaaactcaggaggtgccgtgagtcccatgagttactatcagaggccgttttccccctcggcatat

SEQ ID NO: 20058 - DNA, 842 bp, Homo sapiens
  misc_feature 1..842: note = ENST00000393523
  source 1..842: mol_type = unassigned DNA
ggaaaacagtgtggcatattctgctgagcttcgccctggaagaagcctcttttatacatctcttcagggaagagagaagcaatgggcatgttagtatacaatgatcacagccacgcaggcctgcaagctgccttttggacaggctgttgactgccgttccaattagctgattggagaatgtggaatgcagagtgataatgctgcatatctgctatcaggcagcagcaaaggtttttgtcttgggaaggcaagctttccctgcaatattatctcagcagctccctagctgcttaccctgaaaacgagggatccaaacggagggtgttgcactctgctaacgctggtcctgtgcgtggctgtggcatatgagcggcaggtctgaaaaagcaggtgtgtgctgggacgggcactggactggaacgcaggcggacgctctcgggtttacctgcttcctgttaacagattgtgggctcccagggcatatgtctgcacgctgaggccgaggcggagaaggggcttcctgagcgtcccagtacactgacagagacacttggattggacttaatcttaaacctctggagttcaagaccttttaaaaagggctaaataaacaatctctacatgtaaaaggccactgactcctacttcctctgtatagagcaactgttgaactcagctgcctgtagggcgtgattctcagtcaccagactcagcaaaaggttttagaagcgttcgaccaaacctacaagataaaagatcaccaactcagagccagataacagtgaatggaaactcaggaggtgccgtgagtcccatgagttactatcagaggccgttttccc

SEQ ID NO: 20059 - DNA, 572 bp, Homo sapiens
  misc_feature 1..572: note = ENST00000420158
  source 1..572: mol_type = unassigned DNA
attgtgctcccccggctcagaatccaaggaaagaaaggaagcgaagcctctgcattgagttctaggacagctgagacacttggattggacttaatcttaaacctctggagttcaagaccttttaaaaagggctaaataaacaatctctacatgtaaaaggccactgactcctacttcctctgtatagagcaactgttgaactcagctgcctgaaaactgaagactttaataacaaactctccaaggtgaaaatgaacacagatagcggtgggtgtgctcgcaaacgtgccgccatgtctgttacgctaacatctgtgaagagagtgcaaagttctccaaacctattggctgcagggcgtgattctcagtcaccagactcagcttggagatcttacaatgatggcaatcaggagacactgaacggagatgctacatattcctctcttgcagcaaaaggttttagaagcgttcgaccaaacctacaagataaaagatcaccaactcagagccagataacagtgaatggaaactcaggaggtgccgtgagtcccatgagttactatcagaggccg

SEQ ID NO: 20060 - DNA, 572 bp, Homo sapiens
  misc_feature 1..572: note = ENST00000421639
  source 1..572: mol_type = unassigned DNA
agttgtaaagcaaacagtgtaggtattggaagccgttcacacctcctttccgagtatctgcatgccttgctggcccagagcacaagacccccattgtgctcccccggctcagaatccaaggaaagaaaggaagcgaagcctctgcattgagttctaggacagctgagacacttggattggacttaatcttaaacctctggagttcaagaccttttaaaaagggctaaataaacaatctctacatgtaaaaggccactgactcctacttcctctgtatagagcaactgttgaactcagctgcctgtaggaaaactgaagactttaataacaaactctccaaggtgaaaatgaacacagatagcggtgggtgtgctcgcaaacgtgccgccatgtctgttacgctaacatctgtgaagagagtgcaaagttctccaaacctattggctgcagggcgtgattctcagtcaccagactcagcaaaaggttttagaagcgttcgaccaaacctacaagataaaagatcaccaactcagagccagataacagtgaatggaaactcaggaggtgccgtg

SEQ ID NO: 20061 - DNA, 715 bp, Homo sapiens
  misc_feature 1..715: note = ENST00000493709
  source 1..715: mol_type = unassigned DNA
aattagctgattggagaatgtggaatgcagagtgataatgctgcatatctgctatcaggcagcagcaaaggtttttgtcttgggaaggcaagctttccctgcaatattatctcagcagctccctagctgcttaccctgaaaacgagggatccaaacggagggtgttgcactctgctaacgctggtcctgtgcgtggctgtggcatatgagcggcaggtctgaaaaagcaggtgtgtgctgggacgggcactggactggaacgcaggcggacgctctcgggtttacctgcttcctgttaacagattgtgggctcccagggcatatgtctgcacgctgaggccgaggcggagaaggggcttcctgagcgtcccagtacactgacagagacacttggattggacttaatcttaaacctctggagttcaagaccttttaaaaagggctaaataaacaatctctacatgtaaaaggccactgactcctacttcctctgtatagagcaactgttgaactcagctgcctgtagggcgtgattctcagtcaccagactcagcttggagatcttacaatgatggcaatcaggagacactgaacggagatgctacatattcctctcttgcagcaaaaggttttagaagcgttcgaccaaacctacaagataaaagatcaccaactcagagccagataacagtgaatggaaactcaggaggtgccg

SEQ ID NO: 20062 - DNA, 553 bp, Homo sapiens
  misc_feature 1..553: note = ENST00000457934
  source 1..553: mol_type = unassigned DNA
aaatgctctcagaacagtagcaccacccagcagctgggattctttccctctctcatttgcctctctcttgctttttttccttcagacacttggattggacttaatcttaaacctctggagttcaagaccttttaaaaagggctaaataaacaatctctacatgtaaaaggccactgactcctacttcctctgtatagagcaactgttgaactcagctgcctgtaggaaaactgaagactttaataacaaactctccaaggtgaaaatgaacacagatagcggtgggtgtgctcgcaaacgtgccgccatgtctgttacgctaacatctgtgaagagagtgcaaagttctccaaacctattggctgcagggcgtgattctcagtcaccagactcagcttggagatcttacaatgatggcaatcaggagacactgaacggagatgctacatattcctctcttgcagcaaaaggttttagaagcgttcgaccaaacctacaagataaaagatcaccaactcagagccagataacagtgaatggaaactcaggaggt

SEQ ID NO: 20063 - DNA, 562 bp, Homo sapiens
  misc_feature 1..562: note = ENST00000431902
  source 1..562: mol_type = unassigned DNA
accacgtacatgccgtaaatgctccctaggctggctgcggctacaaggcagacccgggagctgagaatagaggaatacctgcccaagcaactcattctgcacagcagccgacaagacagcgattttcctgtgctggaatgtgcccatccaaagacacttggattggacttaatcttaaacctctggagttcaagaccttttaaaaagggctaaataaacaatctctacatgtaaaaggccactgactcctacttcctctgtatagagcaactgttgaactcagctgcctatagcggtgggtgtgctcgcaaacgtgccgccatgtctgttacgctaacatctgtgaagagagtgcaaagttctccaaacctattggctgcagggcgtgattctcagtcaccagactcagcttggagatcttacaatgatggcaatcaggagacactgaacggagatgctacatattcctctcttgcagcaaaaggttttagaagcgttcgaccaaacctacaagataaaagatcaccaactcagagccagataacagtgaatggaaactcag

SEQ ID NO: 20064 - DNA, 487 bp, Homo sapiens
  misc_feature 1..487: note = ENST00000435480
  source 1..487: mol_type = unassigned DNA
agaacagtagcaccacccagcagctgggattctttccctctctcatttgcctctctcttgctttttttccttcagacacttggattggacttaatcttaaacctctggagttcaagaccttttaaaaagggctaaataaacaatctctacatgtaaaaggccactgactcctacttcctctgtatagagcaactgttgaactcagctgcctgtagatagcggtgggtgtgctcgcaaacgtgccgccatgtctgttacgctaacatctgtgaagagagtgcaaagttctccaaacctattggctgcagggcgtgattctcagtcaccagactcagcttggagatcttacaatgatggcaatcaggagacactgaacggagatgctacatattcctctcttgcagcaaaaggttttagaagcgttcgaccaaacctacaagataaaagatcaccaactcagagccagataacagtgaatggaaactca

SEQ ID NO: 20065 - DNA, 626 bp, Homo sapiens
  misc_feature 1..626: note = ENST00000415274
  source 1..626: mol_type = unassigned DNA
gatgcctccaggcgagcagcgccaagctgagctggttagtctccttttattgtggatgaacaccacgtacatgccgtaaatgctccctaggctggctgcggctacaaggcagacccgggagctgagaatagaggaatacctgcccaagcaactcattctgcacagcagccgacaagacagcgattttcctgtgctggaatgtgcccatccaaagacacttggattggacttaatcttaaacctctggagttcaagaccttttaaaaagggctaaataaacaatctctacatgtaaaaggccactgactcctacttcctctgtatagagcaactgttgaactcagctgcctgtagatagcggtgggtgtgctcgcaaacgtgccgccatgtctgttacgctaacatctgtgaagagagtgcaaagttctccaaacctattggctgcagggcgtgattctcagtcaccagactcagcttggagatcttacaatgatggcaatcaggagacactgaacggagatgctacatattcctctcttgcagcaaaaggttttagaagcgttcgaccaaacctacaagataaaagatcaccaactcagagccagataacagtgaatggaaactca

SEQ ID NO: 20066 - DNA, 582 bp, Homo sapiens
  misc_feature 1..582: note = ENST00000432655
  source 1..582: mol_type = unassigned DNA
gtaaatgctccctaggctggctgcggctacaaggcagacccgggagctgagaatagaggaatacctgcccaagcaactcattctgcacagcagccgacaagacagcgattttcctgtgctggaatgtgcccatccaaagacacttggattggacttaatcttaaacctctggagttcaagaccttttaaaaagggctaaataaacaatctctacatgtaaaaggccactgactcctacttcctctgtatagagcaactgttgaactcagctgcctgtaggaaaactgaagactttaataacaaactctccaaggtgaaaatgaacacagatagcggtgggtgtgctcgcaaacgtgccgccatgtctgttacgctaacatctgtgaagagagtgcaaagttctccaaacctattggctgcagggcgtgattctcagtcaccagactcagcttggagatcttacaatgatggcaatcaggagacactgaacggagatgctacatattcctctcttgcagcaaaaggttttagaagcgttcgaccaaacctacaagataaaagatcaccaactcagagccagat

SEQ ID NO: 20067 - DNA, 582 bp, Homo sapiens
  misc_feature 1..582: note = ENST00000451701
  source 1..582: mol_type = unassigned DNA
gattctttccctctctcatttgcctctctcttgctttttttccttcagacacttggattggacttaatcttaaacctctggagttcaagaccttttaaaaagggctaaataaacaatctctacatgtaaaaggccactgactcctacttcctctgtatagagcaactgttgaactcagctgcctgtaggaaaactgaagactttaataacaaactctccaaggtgaaaatgaacacagatagcggtgggtgtgctcgcaaacgtgccgccatgtctgttacgctaacatctgtgaagagagtgcaaagttctccaaacctattggctgcagggcgtgattctcagtcaccagactcagcaaaaggttttagaagcgttcgaccaaacctacaagataaaagatcaccaactcagcttggaaatcagaacttacctgccagtgtgttggaggtaaatgcttcacagacacacagacaaaccacaccagaagcttctcctccgtgccctccttccgtggtacctttgaaccgagccactttctcaccaggcagtggcaccagctcagcatcactcagccttccg

SEQ ID NO: 20068 - DNA, 525 bp, Homo sapiens
  misc_feature 1..525: note = ENST00000428330
  source 1..525: mol_type = unassigned DNA
ctgttaacagattgtgggctcccagggcatatgtctgcacgctgaggccgaggcggagaaggggcttcctgagcgtcccagtacactgacagagacacttggattggacttaatcttaaacctctggagttcaagaccttttaaaaagggctaaataaacaatctctacatgtaaaaggccactgactcctacttcctctgtatagagcaactgttgaactcagctgcctgaaaactgaagactttaataacaaactctccaaggtgaaaatgaacacagggcgtgattctcagtcaccagactcagcttggagatcttacaatgatggcaatcaggagacactgaacggagatgctacatattcctctcttgcagcaaaaggttttagaagcgttcgaccaaacctacaagataaaagatcaccaactcagcttggaaatcagaacttacctgccagtgtgttggaggtaaatgcttcacagacacacagacaaaccacaccagaagcttctcctccgtgccct

SEQ ID NO: 20069 - DNA, 574 bp, Homo sapiens
  misc_feature 1..574: note = ENST00000421420
  source 1..574: mol_type = unassigned DNA
ctttaataacaaactctccaaggtgaaaatgaacacagatagcggtgggtgtgctcgcaaacgtgccgccatgtctgttacgctaacatctgtgaagagagtgcaaagttctccaaacctattggctgcagggcgtgattctcagtcaccagactcagcttggagatcttacaatgatggcaatcaggagacactgaacggagatgctacatattcctctcttgcagcaaaaggttttagaagcgttcgaccaaacctacaagataaaagatcaccaactcaggcaccccctccaccagaaagaaaagagagctttcatagctctttgataaccagtcacacaaagggtgtcattttagaccagttagtaactaacacacaaattccctccagtacagagtactttgctaacaaaaaacctcttcagggaactatgtattccaatgaagattcgagacagacaattgtatattctgaagaatctaacacaaccatgtcatatacacaaaaaatcactaatccactaccagcagcttccagcacggatcctgcaccattcgctaacatcaacacc

SEQ ID NO: 20070 - DNA, 563 bp, Homo sapiens
  misc_feature 1..563: note = ENST00000464975
  source 1..563: mol_type = unassigned DNA
aagaatagactgacaacagatactgctaccagagggctctcaactatttcttaagaccccctaggaaatatcagaagaaaagcctccttctcaataaagcataagtaggacatctcgttttcagtgaatcagacacttggattggacttaatcttaaacctctggagttcaagaccttttaaaaagggctaaataaacaatctctacatgtaaaaggccactgactcctacttcctctgtatagagcaactgttgaactcagctgcctgtagggcgtgattctcagtcaccagactcagcttggagatcttacaatgatggcaatcaggagacactgaacggagatgctacatattcctctcttgcagcaaaaggttttagaagcgttcgaccaaacctacaagataaaagatcaccaactcaggcaccccctccaccagaaagaaaagagagctttcatagctctttgataaccagtcacacaaagggtgtcattttagaccagttagtaactaacacacaaattccctccagtacagagtactttgctaacaaaaaacctc

SEQ ID NO: 20071 - DNA, 540 bp, Homo sapiens
  misc_feature 1..540: note = ENST00000464819
  source 1..540: mol_type = unassigned DNA
agttgtaaagcaaacagtgtaggtattggaagccgttcacacctcctttccgagtatctgcatgccttgctggcccagagcacaagacccccattgtgctcccccggctcagaatccaaggaaagaaaggaagcgaagcctctgcattgagttctaggacagctgagacacttggattggacttaatcttaaacctctggagttcaagaccttttaaaaagggctaaataaacaatctctacatgtaaaaggccactgactcctacttcctctgtatagagcaactgttgaactcagctgcctgtagggcgtgattctcagtcaccagactcagcttggagatcttacaatgatggcaatcaggagacactgaacggagatgctacatattcctctcttgcagcaaaaggttttagaagcgttcgaccaaacctacaagataaaagatcaccaactcaggcaccccctccaccagaaagaaaagagagctttcatagctctttgataaccagtcacacaaagggtgtcattttagaccag

SEQ ID NO: 20072 - DNA, 594 bp, Homo sapiens
  misc_feature 1..594: note = ENST00000478249
  source 1..594: mol_type = unassigned DNA
aagctttccctgcaatattatctcagcagctccctagctgcttaccctgaaaacgagggatccaaacggagggtgttgcactctgctaacgctggtcctgtgcgtggctgtggcatatgagcggcaggtctgaaaaagcaggtgtgtgctgggacgggcactggactggaacgcaggcggacgctctcgggtttacctgcttcctgttaacagattgtgggctcccagggcatatgtctgcacgctgaggccgaggcggagaaggggcttcctgagcgtcccagtacactgacagagacacttggattggacttaatcttaaacctctggagttcaagaccttttaaaaagggctaaataaacaatctctacatgtaaaaggccactgactcctacttcctctgtatagagcaactgttgaactcagctgcctgtagggcgtgattctcagtcaccagactcagcaaaaggttttagaagcgttcgaccaaacctacaagataaaagatcaccaactcaggcaccccctccaccagaaagaaaagagagctttcatagctctttgataaccagtcacacaaagggtgtcatttt

SEQ ID NO: 20073 - DNA, 571 bp, Homo sapiens
  misc_feature 1..571: note = ENST00000452351
  source 1..571: mol_type = unassigned DNA
agcagggatgaatgtcctgacagcgtgtgtccactgtgcatgtgcttccacttgtcagcatgggcgaagcccaagtatgatgtgtagacaagaccaccgcttctctctgctccattcctgcacaagccacacacagcagacttgtatttctgtcaagggctccggttttccatcatctattttttatagcactgatactcaaccagttgcagcaaatgaagggtattatttctggtttgagggcatcgcgatgctgatttgccattcctaggaagcaaactcaccgtgttgggctctcattttaccatgggagacccggctccacaaaaccggtgggtgtgctcgcaaacgtgccgccatgtctgttacgctaacatctgtgaagagagtgcaaagttctccaaacctattggctgcagggcgtgattctcagtcaccagactcagcttggagatcttacaatgatggcaatcaggagacactgaacggagatgctacatattcctctcttgcagcaaaaggttttagaagcgttcgaccaaacctacaagataaaagatcaccaactcag

SEQ ID NO: 20074 - DNA, 534 bp, Homo sapiens
  misc_feature 1..534: note = ENST00000429056
  source 1..534: mol_type = unassigned DNA
ctgttaacagattgtgggctcccagggcatatgtctgcacgctgaggccgaggcggagaaggggcttcctgagcgtcccagtacactgacagagacacttggattggacttaatcttaaacctctggagttcaagaccttttaaaaagggctaaataaacaatctctacatgtaaaaggccactgactcctacttcctctgtatagagcaactgttgaactcagctgcctgtagagcgagaataggacagactcgtataccattctgatctgggtgcatttcttcagaagatagcggtgggtgtgctcgcaaacgtgccgccatgtctgttacgctaacatctgtgaagagagtgcaaagttctccaaacctattggctgcagggcgtgattctcagtcaccagactcagcttggagatcttacaatgatggcaatcaggagacactgaacggagatgctacatattcctctcttgcagcaaaaggttttagaagcgttcgaccaaacctacaagataaaagatcaccaactca

SEQ ID NO: 20075 - DNA, 567 bp, Homo sapiens
  misc_feature 1..567: note = ENST00000463104
  source 1..567: mol_type = unassigned DNA
tgtggcatatgagcggcaggtctgaaaaagcaggtgtgtgctgggacgggcactggactggaacgcaggcggacgctctcgggtttacctgcttcctgttaacagattgtgggctcccagggcatatgtctgcacgctgaggccgaggcggagaaggggcttcctgagcgtcccagtacactgacagagacacttggattggacttaatcttaaacctctggagttcaagaccttttaaaaagggctaaataaacaatctctacatgtaaaaggccactgactcctacttcctctgtatagagcaactgttgaactcagctgcctgtagatagcggtgggtgtgctcgcaaacgtgccgccatgtctgttacgctaacatctgtgaagagagtgcaaagttctccaaacctattggctgcagggcgtgattctcagtcaccagactcagcttggagatcttacaatgatggcaatcaggagacactgaacggagatgctacatattcctctcttgcagcaaaaggttttagaagcgttcgaccaaacctacaagataaaagatcacc

SEQ ID NO: 20076 - DNA, 543 bp, Homo sapiens
  misc_feature 1..543: note = ENST00000456060
  source 1..543: mol_type = unassigned DNA
agatagaatatgactggtgatagagtcctgaaaaagaagaaaagcctgggggttctgcagaagatttacgttgttcatggcattaatcatggtagattcccagaggaggtgaaatgttatggacgggtggaatgtgatccattttactgaggaagtaaaactattcttgccttgaagattgtgggctcccagggcatatgtctgcacgctgaggccgaggcggagaaggggcttcctgagcgtcccagtacactgacagagacacttggattggacttaatcttaaacctctggagttcaagaccttttaaaaagggctaaataaacaatctctacatgtaaaaggccactgactcctacttcctctgtatagagcaactgttgaactcagctgcctgtagagcgagaataggacagactcgtataccattctgatctgggtgcatttcttcagaaggaaaactgaagactttaataacaaactctccaaggtgaaaatgaacacagatagcggtgggtgtgctcgcaaacgtgccgccatgt

SEQ ID NO: 20077 - DNA, 595 bp, Homo sapiens
  misc_feature 1..595: note = ENST00000476878
  source 1..595: mol_type = unassigned DNA
tccttttattgtggatgaacaccacgtacatgccgtaaatgctccctaggctggctgcggctacaaggcagacccgggagctgagaatagaggaatacctgcccaagcaactcattctgcacagcagccgacaagacagcgattttcctgtgctggaatgtgcccatccaaagacacttggattggacttaatcttaaacctctggagttcaagaccttttaaaaagggctaaataaacaatctctacatgtaaaaggccactgactcctacttcctctgtatagagcaactgttgaactcagctgcctgtaggtgcatttcctgtccatttcagaagctaattatgaaatggccacacaactggatgtttctgtttataaaatagtgttccttggaggggcttgcaacatctaaatatcttatgtcagaataaaagccactgagatccaaagaagtggactaaacttgacaatatctgaaagtcttctgctggaccaggaacccctacagtggacagtgtgcttcctgcttttccacgcagttcgacaggaaaaccatcccaaagtgaacaaaaatggaagcctgcgaagttca

SEQ ID NO: 20078 - DNA, 4964 bp, Homo sapiens
  misc_feature 1..4964: note = ENST00000462661
  source 1..4964: mol_type = unassigned DNA
agagctgagaggaccagccattttacttatggaaaacagtgtggcatattctgctgagcttcgccctggaagaagcctcttttatacatctcttcagggaagagagaagcaatgggcatgttagtatacaatgatcacagccacgcaggcctgcaagctgccttttggacaggctgttgactgccgttccaattagctgattggagaatgtggaatgcagagtgataatgctgcatatctgctatcaggcagcagcaaaggtttttgtcttgggaaggcaagctttccctgcaatattatctcagcagctccctagctgcttaccctgaaaacgagggatccaaacggagggtgttgcactctgctaacgctggtcctgtgcgtggctgtggcatatgagcggcaggtctgaaaaagcaggtgtgtgctgggacgggcactggactggaacgcaggcggacgctctcgggtttacctgcttcctgttaacagattgtgggctcccagggcatatgtctgcacgctgaggccgaggcggagaaggggcttcctgagcgtcccagtacactgacagagacacttggattggacttaatcttaaacctctggagttcaagaccttttaaaaagggctaaataaacaatctctacatgtaaaaggccactgactcctacttcctctgtatagagcaactgttgaactcagctgcctgtaggtaagattttttattctggaattatttaattgttttctggtatgttcataactaatgtctttaaaataacttacttatagtgaaaataataaggggagttgtgaacaattttcaggtaaacacggtgttccagaatacagcaggagcatctgggcatttttgtggctgtaagttttaaactttgcttaaagctctcataatagtgacctgcagtacacgcttgactatgactaagccatggatcagaggtctaattaagcctgattgccagagcaatgagaggatgtttcagacatcatatttttgttgtttagactgctttatttttaactttccaggggcattaaaaaaaaaaaaagaggaaaaagatgcaaccatccacctgagtaaagataatatatataagtaattgttctttaagggcaatgagcgagccgtattgtataatgttctcctttcatcactgtttcgttcattgctcgtgtggaattagagtggttgatttgggggaatctgggggttttgtttttgttattgttgttttgtatgttcctagcacattttaggggacagtgttgaggattccttactaagctgactgtcttttgctgggtacatctgctggcaggtttctctaacgtgacaatgtgatacttcgggtcagtttctgtggctcccctctccccctcgttacgcttgcacttgacattttgcgaagtactttgatctgtggactttaacttcaaacacagcatttactttgattgtggctatttactatgctcagtaaaaagtctccttttttttccttttggtttaatgctttcatagcatttcctttaaacaatttattggagctttagttttcctcactgatctgtcttagatttcacttctagagggacccccaattgtaagaaaagtgttctctggtaaagttctccccaacacagacttcaggacagttcatggcccctgtctggcagatgtgtaagagcaagcagcaaatgagagtgcacagagccccgcgctggctgccctgctgcctcagaatctccgtgtgccttggggcccaactggtgctttttaaaaacatggatgctgaaatctttggagttcagaaatacttttttttcagaaaagtttattggtatcacagagcacatatcaaaggaaagcatgcattttaaccacataaggatcgtctgagtaacaaaaacgggaagaaataacaaagaaaaagaaaattagaatcaaaagaaaactggaaaaaaaaaaaaaaccttagtagccagaagtctgttttacgagtgaaacttctgctgtgtaagggataagggatttcttaaaaatgtatttcctaaaatgggcaaaatgtagcacttactagccattcaatcagctttggaatattctcttcattgtgaagaaagcacaggtgtgtgtgacatttgttcccttcttctttcccaccccaagcacaaggtattttcacagtcctcagccaaatacagagtttgacgttccctggcaaacggtccctgcgtgttctgttgaaggttaggagtagaatgagcctaatcctgtcaggagactgtttaagtcccagtcaaggacgctagctcctcagcgctgacgcagtctgccccgtcctctgcaccttgctaagaaggacaaacgcaagtggccacaggacaaatctccaaaggggcggagctgtggagaaagctacggcagagatctccctggattaggagcagatgcaatcgaatctccagaacttggatttatagtagaaaaacctagagatgttcagtctaatctttaagtttcccaaacctgggcatttcattgccacttttccccttcaaatctacattataagaagcatgtcaatcatcgcatttatgtgtatggttaccattttaaatcctcccgttattttgagcctgggctttgttggggggatggggtgcgtctagctagaatactcactctcccttagtactgggaagccttggtctgcagggctgagtgcaaatatattgctagaggtgatagtccagcggcaaaattaaatggcaccaggatgaaatctttttggagaatggtaggtgatcattccattcccaggcaagccattttccccctgttttgttttgttttttttttctttctgtttctcttcacccctgaattttacgttgaaactttggattgtttgaatgtgaaacttcaggtgaaagctagccaaagccaccgagtttcacccagcttccacatgaaagaagtattctacccagccttgcacgaaacttggcctgtgttgccaaaggtttcatgaatgtcagtgagcctggatttgaaacataacccaaggccaggtgacttctggtgactttgaggctttattgtattagtatagaatctgctgaacagggacagtcctatttccgcatcttctactatagtttcatgagggcacacgttttcccccagtaaactcccatttatctcatgatgtttgaaagccaggttcaatcctaatgtgaatgtttgtagccgtgggatcgaagcactggcagatagaggtctgcgttttaaattccagcagcctggccctcagtggtgtgaacatgttggtataattcagctgaaggaaggaagtcccgggagagccgtggaatgcctttctttgcttaaatatacctctgtgctcgtgaggaacaaacagtaacattttgtccaggtctatccgcttgacagtatgccttttgttccctctccaaaggtggtgtcaaatatattggtggaaaaataataaacttccagatattttttttccgcctgctcaactgatatactccaagggaacattgcaagcattgagaagttcagtactgtggctgggaatgtaaggtatactgagaataaaggagctctcagtgaaggcaatgtccctcagaaaagcatggcgacccagagttgatgtgggtgtgaacggtcagatggtccccggttgggaaggggtgtgtgtgtgttttctgggtcggggtagtagcgagcagagaggaaaagggagatttgtaagctttgttcagcaaatctgtcacatcgaaaacaaaaataatcaagcccaggatctgaaaacattcctttcttttgtagatcatataaatttgtgttggctgaatattgaatttttttgtattatttttctcattagagacaccaagcattaggattccaggcatagtaaataatctccaatgaaaatatgacccattgggaaacataaaatcattgcagataactcccatgagtcagtcccaggaaggtcctcatggttctctggcagttatgaaatgctaagccacccaggacactaagatctgacttgtccttttcttagttgggagatttctaaactcatgtgaagaattttcataaaaatgaatgtgtggcctcactaaagatttaggctatctttggtgagatacatagatatagatttattataaaattaaattgccatcaaatttcattttgaaatttcatagtcacttatatattcaataaaacagactttcattaaagatgtggtttgcattttagcaggtgacatgcagtggatgccctagtagagaaagcactggaaaagctagcaataacacaatttggaagtgccatatgtagaagctgctttttagcactggcttcaccagtcatagtgtagcatttatcagcatatgtgatttgatagccccagactggtacagtgagcagaggaaaggaagatgttcaaatggaggttctagagaaaatcattcagaaccatcccacaaggaagctctcactaaccatatcaaggtataaggagttcagtagttttaagacattcatcatccataacaaaacagaaaaaggggaaggataggcttggcgtggtggctcacgcctataaccccagcacgttgggaggccgaggcaggtggatcacttgagatcaggagttcaagaccagcctgaccaaaatggtgaaaccccatctctactaaaaaaaaaaaaaaaatgcaaaattagccaggcatggtggtgcacacctataatcccagctacttgggaggctgaagtgggagaatagcttgaacctgggaggcggagggtgcagtgagccaagatcccaccattgcactccagcctgggcaacaagagtgaaactctgtctcaaaaaaaaaaaaaaaaaaa

SEQ ID NO: 20079 - DNA, 1575 bp, Homo sapiens
  misc_feature 1..1575: note = ENST00000469627
  source 1..1575: mol_type = unassigned DNA
accacgtacatgccgtaaatgctccctaggctggctgcggctacaaggcagacccgggagctgagaatagaggaatacctgcccaagcaactcattctgcacagcagccgacaagacagcgattttcctgtgctggaatgtgcccatccaaagacacttggattggacttaatcttaaacctctggagttcaagaccttttaaaaagggctaaataaacaatctctacatgtaaaaggccactgactcctacttcctctgtatagagcaactgttgaactcagctgcctgtaggtaagattttttattctggaattatttaattgttttctggtatgttcataactaatgtctttaaaataacttacttatagtgaaaataataaggggagttgtgaacaattttcaggtaaacacggtgttccagaatacagcaggagcatctgggcatttttgtggctgtaagttttaaactttgcttaaagctctcataatagtgacctgcagtacacgcttgactatgactaagccatggatcagaggtctaattaagcctgattgccagagcaatgagaggatgtttcagacatcatatttttgttgtttagactgctttatttttaactttccaggggcattaaaaaaaaaaaaagaggaaaaagatgcaaccatccacctgagtaaagataatatatataagtaattgttctttaagggcaatgagcgagccgtattgtataatgttctcctttcatcactgtttcgttcattgctcgtgtggaattagagtggttgatttgggggaatctgggggttttgtttttgttattgttgttttgtatgttcctagcacattttaggggacagtgttgaggattccttactaagctgactgtcttttgctgggtacatctgctggcaggtttctctaacgtgacaatgtgatacttcgggtcagtttctgtggctcccctctccccctcgttacgcttgcacttgacattttgcgaagtactttgatctgtggactttaacttcaaacacagcatttactttgattgtggctatttactatgctcagtaaaaagtctccttttttttccttttggtttaatgctttcatagcatttcctttaaacaatttattggagctttagttttcctcactgatctgtcttagatttcacttctagagggacccccaattgtaagaaaagtgttctctggtaaagttctccccaacacagacttcaggacagttcatggcccctgtctggcagatgtgtaagagcaagcagcaaatgagagtgcacagagccccgcgctggctgccctgctgcctcagaatctccgtgtgccttggggcccaactggtgctttttaaaaacatggatgctgaaatctttggagttcagaaatacttttttttcagaaaagtttattggtatcacagagcacatatcaaaggaaagcatgcattttaaccacataaggatcgtctgagtaacaaaaacgggaagaaataacaaagaaaaagaaaattagaatcaaaagaaaactggaaaaaaaaaaaaaa

SEQ ID NO: 20080 - DNA, 598 bp, Homo sapiens
  misc_feature 1..598: note = ENST00000488562
  source 1..598: mol_type = unassigned DNA
agacgaatagacccacagatgattcaaacactgttgtactttaatggttactgcaaaataccacagttcacgatgattctacagcgatactctagaactgctgtaacgttcgagtagacatgagatcactgggtggattgtgtttttaccaacatatgaaactgtaattatccatgagcaccgtactgcctttggagacactgctgggactgtgactcagacctcccttgagacaactggtcattaggagtcacagtgatgtggaatcaactttgtctttctgaaaagctggagatattcatcatagcctggactgcctgggatctacatgttttctccgtgttgtaatgatgtgaaacactttattagcagaggaagacatttttaggagaagcattttgaatcagaaggcttaagaagaattctgcttttctcccaaccaatttgttggaaaatcagtcaaaatctaattttgatgttctgcaagttccctgggggccatgaagcacctgacacttggattggacttaatcttaaacctctggagttcaagaccttttaaaaagggctaaataaacaatctctacatgtaaaaggc

SEQ ID NO: 20081 - DNA, 5529 bp, Homo sapiens
  misc_feature 1..5529: note = ENST00000418609
  source 1..5529: mol_type = unassigned DNA
gatttgggagttgggaggtgagatgattggagtgaagagagttaatgtcatggaaaggaaaagctgtctgaagaaaaatacacattttaatgtccctcttcagccgtgcctgctgagagctctcctgggatgataagtgaaagtgtttggatttttttttaagttttaaaactctgccaaagcattgctcagtgtatctgggcagccccttccggcaaaacgcagcagtagcagaggcagcttctgagagcctgggcaggcagcagctggctgaccaagtccactggaagagaaggcttgtgccagccgggagaaggaagccggggacaggatgaaagcaacaacacctttgcagacagtcgaccggcccaaggactggtacaagacgatgtttaagcaaattcacatggtgcacaagccgggtctgtacaacccaccctacagtgctcagtcacaccctgctgcaaagacccaaacctacagacctctttccaaaagccactccgacaacagccccaatgcctttaaggatgcgtcctccccagtgcctcccccacatgttccacctccagtcccgccgcttcgaccaagagatcggtcttcaacagaaaagcatgactgggatcctccagacagaaaagtggacacaagaaaatttcggtctgagccaaggagtatttttgaatatgaacctggcaagtcatcaattcttcagcatgaaagaccagcctccttgtatcagtcctctatagacagaagcctggaaagacccatgagttctgcaagcatggccagtgacttcaggaagcggaggaagagcgagcctgcagtgggtccaccacggggcttgggagatcaaagtgcgagcaggactagcccaggccgagtggacctcccaggatcaagcaccactcttacaaagtctttcactagctcttctccttcttccccatcaagagcaaaaggtggggatgatagcaaaatatgtccatccctttgcagttactcagggctcaacggcaacccctccagtgagttagattactgtagcacttacagacagcacttggatgtccctcgggactcaccaagagccattagtttcaagaacggctggcaaatggcccggcaaaacgcagaaatctggagcagcacggaagaaaccgtctctcccaaaatcaaatcccggagctgtgacgatctcctaaacgacgactgcgatagcttcccggacccgaaagtcaagtcggaaagcatgggctccctgttatgtgaggaggactccaaggagagctgccccatggcgtgggggtccccctacgtcccggaggttcgcagtaacggcagatcaaggatcagacacaggtcagcccgcaacgccccggggttcctgaagatgtacaagaaaatgcaccgcatcaaccgcaaggacctgatgaactccgaggtgatctgctccgtgaagtccaggattctgcagtacgagagcgagcagcagcacaaggacctgctgcgcgcctggagccagtgctccacggaggaggtgccccgggacatggtgcccacacgcatctccgaattcgaaaagctgatccagaagtccaaatccatgccaaatttaggggatgacatgctgtctcccgtaaccctagaaccaccgcaaaatggcctatgtcccaagaggcggttttccattgagtatttgctggaggaagaaaatcaaagcggcccccccgctcggggccggcgaggctgccagtctaacgccctggtgcccattcacattgaagtcaccagcgatgagcagccccgagcacacgtggagttttccgacagcgaccaggacggggttgtgtccgaccacagtgactacattcacctagaggggtcatccttctgcagtgaaagtgactttgatcacttttccttcacatcctccgaaagcttttacggatccagccaccaccaccaccatcaccaccaccaccaccaccgccacctcatcagctcctgcaaaggcaggtgcccggcctcctacactcgatttaccacaatgttaaaacacgaaagagccagacacgaaaacaccgaggagcccagaaggcaagaaatggaccctggcctttctaaacttgcttttctagtcagtcctgtgcctttccggaggaaaaaaaattcggctcctaagaaacagactgaaaaggcaaaatgtaaagcatctgtgtttgaggctctggactctgcccttaaagacatctgtgaccaaattaaagctgaaaagaaaagggggagcttgccggacaacagcatcctgcaccgcctcatcagtgagctgctgccagatgttcccgagaggaactcatccctgagagcgctgaggaggagccccctgcaccagcctctccacccactgcctcccgatggtgctattcattgtccaccctaccagaatgactgcgggagaatgccccgcagtgcctctttccaagacgtggacacagccaacagcagctgccaccaccaagaccgtggcggtgcactccaagaccgtgagtcccctagaagttactcatccactttgactgacatggggagaagtgcaccaagggaaagaagaggaactccagaaaaagagaaattgcctgcaaaagctgtttatgattttaaggctcagacatctaaggagttgtcatttaagaaaggagatactgtctacatcctcaggaaaattgatcaaaattggtatgagggagaacaccacgggagagtgggcatcttcccgatctcatacgtagagaaactcacacctcctgagaaagcacagcctgcaagaccacctccgccagcccagcccggagaaatcggagaagctatagccaaatacaacttcaacgcagacacaaatgtggagctgtcactgagaaagggagatagagttattcttcttaaaagagttgatcaaaactggtatgaaggtaaaatcccaggaaccaacagacaaggcatcttccctgtttcctatgtggaggtcgtcaagaagaacacaaaaggtgctgaggactaccctgaccctccaataccccacagctattctagtgataggattcacagcttgagctcaaataagccacagcgtcctgtgtttactcatgaaaatattcaaggtgggggggaaccgtttcaggctctgtataactatactcccaggaatgaagatgagctggagctcagagaaagtgatgtcattgatgtcatggaaaagtgtgatgacggctggtttgtggggacctcaagaagaaccaaattctttggtactttccccggaaactacgtcaagaggctgtgaattgcgctccctccttctgtagaggccgcctgccagccatgcacctgcgtcaacgcgcctgaaacaccccgcgggcctcccgttgtcatgccttacggtttccaatgcgccgtcaccatctccacctgccaccaaaccaccagcagagtagccgccgctgctgtgagcctggggacgacatggcaggctggtccccctccgtgaaagtgtggattcctacttcctgctctaagctttgacacgtcaaaatgtgggatcagaaagaaaaaaatcatgatatttaaaaatggtcaaatatttgaggcaaaaaaaaaaaaaaaaagtgtctccaggaggctgtccagcctcgtggctccatttcaacatctccccccaggcgatgttctcccccaagacgaccagaaaattgtttattggggaatgctgtggtttgcattttcatattcttcgcttggcagtgtgtattcttttcacaagtttgcctagtgtcttggtttacacaatatgacaactgtaactgtactttagctattgtttgcctgcacatacatgttgtaatatgcacagtgattacaacctttaaagcaagaggaggcgagttaatttggatgagtgtgattttgctgattgaatgtgagttttcaaataggagtctttttctgcaatttgtttgcattttttagaagtgcaaacagtaagtaaataaaagccttcggtaataatcatgacaatacaagaggctgagctaggctacaggggaaaactattgtgttgtaaagttgcatcgctattttatattaaaatgtaatgatcagcatcatgaacaatgagctcttagtgttttatttatctgaaaaaatgtaagtaaaagcagtgttagtgagaggtgcaaagaattattctaacagacacctgaaagtatctgtaagcaatactagtaggtaagatttcactgtgtgtacacatacacatttgagattgtatgagaacatataatccatatgatatgttgtacattttatggaaatgtaatagaatctcacacattattttatagaaatagagtacagaagcatcacaagtattaaagttggttttagcaaggattaggattactacaattatttttactataataattatttttcttctatggaactcagaatcctggctacatttgaggacaggaatatgttgagcctgattttcctggtgtgtgtaaaatatttcctaggaataaattaggcactttttagaagcaatgttaaatcattcaggttttattttctgccctgaagcagaaatttaaaaaatgatattgggacctggaaggtttaatatggttcacagtgcctgaattacacctgctccgaaaactagctttgtatttcttatgactttgcataagaactgttcatctttggatcttgagcaccttacagataaaactttttatggcatctctttcatggacagtgatattgatcttttcacaatgtacgtagcctctagaattttgtacatatgtttgctctttttttgtacagactagttgttgagaaaacaggggcgtttcctaatttggtctttatcctgcgacaacactttcagcagactagcctctccttatctcacagatcacaagcacccctagatagtgtgattctgtcagatagcatttatgcaaaaatctatgaagttaaaagatcgtagaagccaaatgaaatgtacatatctactgactgatgacaagggaatttcattaggaagaaggtaaagaaacatcgttgagtagcctaccttgatttctgtcaagttcataaccagcttcatattttaaaggcttcaggtttgaaattaagtcaactgcatgcagctttgctgataaatgaataattctctttgatgccatttatgagaaaagacttcaatatctgttgcctgtcatatttaagaaaaattactgtttctactctctgtatctgattttaaaagaaaaaactattcatacctggcttccaggtaattgactttgaattcttacaagcaaaggtcattgtgtttttcttgaatagacatctaataaattttgcttggaagtatacttcagtttttcttcttgacatttatctttataaaaattgtgtattttattccaacttgttaaactaagagaaaatgca

SEQ ID NO: 20082 - DNA, 4356 bp, Homo sapiens
  misc_feature 1..4356: note = ENST00000448662
  source 1..4356: mol_type = unassigned DNA
aagcagataggtttcagagataaagagtgaaaccaaaaacaccgcacacctcatccaaatctgcgctcatacttgcagcaaatgtttgctgtcagttgcttcataataacagcacagaccccgaattgcaggaggaattgcctggtagaaaactgaagactttaataacaaactctccaaggtgaaaatgaacacagggcgtgattctcagtcaccagactcagcttggagatcttacaatgatggcaatcaggagacactgaacggagatgctacatattcctctcttgcagcaaaaggttttagaagcgttcgaccaaacctacaagataaaagatcaccaactcagagccagataacagtgaatggaaactcaggaggtgccgtgagtcccatgagttactatcagaggccgttttccccctcggcatattctctcccagcctcactcaactccagcattgtcatgcagcacggcacatccctcgattccacagacacatatccccagcatgcgcagtctctggatggcaccaccagcagctctatccccctgtaccgatcctcagaggaagagaagagagtgacagtcatcaaagccccgcattacccagggatcgggcccgtggatgaatccggaatccccacagcaattagaacgacagtcgaccggcccaaggactggtacaagacgatgtttaagcaaattcacatggtgcacaagccggatgatgacacagacatgtataatactccttatacatacaatgcaggtctgtacaacccaccctacagtgctcagtcacaccctgctgcaaagacccaaacctacagacctctttccaaaagccactccgacaacagccccaatgcctttaaggatgcgtcctccccagtgcctcccccacatgttccacctccagtcccgccgcttcgaccaagagatcggtcttcaacagaaaagcatgactgggatcctccagacagaaaagtggacacaagaaaatttcggtctgagccaaggagtatttttgaatatgaacctggcaagtcatcaattcttcagcatgaaagaccacctcctaaaaagcctctggactatgttcaagatcattcttctggtgttttcaatgaggcctccttgtatcagtcctctatagacagaagcctggaaagacccatgagttctgcaagcatggccagtgacttcaggaagcggaggaagagcgagcctgcagtgggtccaccacggggcttgggagatcaaagtgcgagcaggactagcccaggccgagtggacctcccaggatcaagcaccactcttacaaagtctttcactagctcttctccttcttccccatcaagagcaaaagaccgtgagtcccctagaagttactcatccactttgactgacatggggagaagtgcaccaagggaaagaagaggaactccagaaaaagagaaattgcctgcaaaagctgtttatgattttaaggctcagacatctaaggagttgtcatttaagaaaggagatactgtctacatcctcaggaaaattgatcaaaattggtatgagggagaacaccacgggagagtgggcatcttcccgatctcatacgtagagaaactcacacctcctgagaaagcacagcctgcaagaccacctccgccagcccagcccggagaaatcggagaagctatagccaaatacaacttcaacgcagacacaaatgtggagctgtcactgagaaagggagatagagttattcttcttaaaagagttgatcaaaactggtatgaaggtaaaatcccaggaaccaacagacaaggcatcttccctgtttcctatgtggaggtcgtcaagaagaacacaaaaggtgctgaggactaccctgaccctccaataccccacagctattctagtgataggattcacagcttgagctcaaataagccacagcgtcctgtgtttactcatgaaaatattcaaggtgggggggaaccgtttcaggctctgtataactatactcccaggaatgaagatgagctggagctcagagaaagtgatgtcattgatgtcatggaaaagtgtgatgacggctggtttgtggggacctcaagaagaaccaaattctttggtactttccccggaaactacgtcaagaggctgtgaattgcgctccctccttctgtagaggccgcctgccagccatgcacctgcgtcaacgcgcctgaaacaccccgcgggcctcccgttgtcatgccttacggtttccaatgcgccgtcaccatctccacctgccaccaaaccaccagcagagtagccgccgctgctgtgagcctggggacgacatggcaggctggtccccctccgtgaaagtgtggattcctacttcctgctctaagctttgacacgtcaaaatgtgggatcagaaagaaaaaaatcatgatatttaaaaatggtcaaatatttgaggcaaaaaaaaaaaaaaaaagtgtctccaggaggctgtccagcctcgtggctccatttcaacatctccccccaggcgatgttctcccccaagacgaccagaaaattgtttattggggaatgctgtggtttgcattttcatattcttcgcttggcagtgtgtattcttttcacaagtttgcctagtgtcttggtttacacaatatgacaactgtaactgtactttagctattgtttgcctgcacatacatgttgtaatatgcacagtgattacaacctttaaagcaagaggaggcgagttaatttggatgagtgtgattttgctgattgaatgtgagttttcaaataggagtctttttctgcaatttgtttgcattttttagaagtgcaaacagtaagtaaataaaagccttcggtaataatcatgacaatacaagaggctgagctaggctacaggggaaaactattgtgttgtaaagttgcatcgctattttatattaaaatgtaatgatcagcatcatgaacaatgagctcttagtgttttatttatctgaaaaaatgtaagtaaaagcagtgttagtgagaggtgcaaagaattattctaacagacacctgaaagtatctgtaagcaatactagtaggtaagatttcactgtgtgtacacatacacatttgagattgtatgagaacatataatccatatgatatgttgtacattttatggaaatgtaatagaatctcacacattattttatagaaatagagtacagaagcatcacaagtattaaagttggttttagcaaggattaggattactacaattatttttactataataattatttttcttctatggaactcagaatcctggctacatttgaggacaggaatatgttgagcctgattttcctggtgtgtgtaaaatatttcctaggaataaattaggcactttttagaagcaatgttaaatcattcaggttttattttctgccctgaagcagaaatttaaaaaatgatattgggacctggaaggtttaatatggttcacagtgcctgaattacacctgctccgaaaactagctttgtatttcttatgactttgcataagaactgttcatctttggatcttgagcaccttacagataaaactttttatggcatctctttcatggacagtgatattgatcttttcacaatgtacgtagcctctagaattttgtacatatgtttgctctttttttgtacagactagttgttgagaaaacaggggcgtttcctaatttggtctttatcctgcgacaacactttcagcagactagcctctccttatctcacagatcacaagcacccctagatagtgtgattctgtcagatagcatttatgcaaaaatctatgaagttaaaagatcgtagaagccaaatgaaatgtacatatctactgactgatgacaagggaatttcattaggaagaaggtaaagaaacatcgttgagtagcctaccttgatttctgtcaagttcataaccagcttcatattttaaaggcttcaggtttgaaattaagtcaactgcatgcagctttgctgataaatgaataattctctttgatgccatttatgagaaaagacttcaatatctgttgcctgtcatatttaagaaaaattactgtttctactctctgtatctgattttaaaagaaaaaactattcatacctggcttccaggtaattgactttgaattcttacaagcaaaggtcattgtgtttttcttgaatagacatctaataaattttgcttggaagtatacttcagtttttcttcttgacatttatctttataaaaattgtgtattttattccaacttgttaaactaagagaaaatgca

SEQ ID NO: 20083 - DNA, 3381 bp, Homo sapiens
  misc_feature 1..3381: note = ENST00000437304
  source 1..3381: mol_type = unassigned DNA
agctttcaaaaatagcatagttgatgaaactggaaatttaggtgcgggctcttttaagaaatcatttgtcttcagtcttaagaatagactgacaacagatactgctaccagagggctctcaactatttcttaagaccccctaggaaatatcagaagaaaagcctccttctcaataaagcataagtaggacatctcgttttcagtgaatcagacacttggattggacttaatcttaaacctctggagttcaagaccttttaaaaagggctaaataaacaatctctacatgtaaaaggccactgactcctacttcctctgtatagagcaactgttgaactcagctgcctgtagggcgtgattctcagtcaccagactcagcaaaaggttttagaagcgttcgaccaaacctacaagataaaagatcaccaactcaggcaccccctccaccagaaagaaaagagagctttcatagctctttgataaccagtcacacaaagggtgtcattttagaccagttagtaactaacacacaaattccctccagtacagagtactttgctaacaaaaaacctcttcagggaactatgtattccaatgaagattcgagacagacaattgtatattctgaagaatctaacacaaccatgtcatatacacaaaaaatcactaatccactaccagcagcttccagcacggatcctgcaccattcgctaacatcaacaccccagttctacaagaggactacaggcaagattctcaaactcggaggatttctaccttgaaactaacccataaccaggatctaggaagtagcagccccattagtactccacagttctccaaatctgtcgaagtaccgtcatttctcaaaaggccccgctcactgacccctaatccagtgcctgagacacacacagcatctctttccattcagatagctcccctttcaggacaggatcttgaaagccacaaacagctacctgagctttctccagagactgcaaagatacctcttcagcaagagagacaaaaatctgcagttgcagcggcctctcagtcctcagactgcagagtgagccagataacagtgaatggaaactcaggaggtgccgtgagtcccatgagttactatcagaggccgttttccccctcggcatattctctcccagcctcactcaactccagcattgtcatgcagcacggcacatccctcgattccacagacacatatccccagcatgcgcagtctctggatggcaccaccagcagctctatccccctgtaccgatcctcagaggaagagaagagagtgacagtcatcaaagccccgcattacccagggatcgggcccgtggatgaatccggaatccccacagcaattagaacgacagtcgaccggcccaaggactggtacaagacgatgtttaagcaaattcacatggtgcacaagccggatgatgacacagacatgtataatactccttatacatacaatgcaggtctgtacaacccaccctacagtgctcagtcacaccctgctgcaaagacccaaacctacagacctctttccaaaagccactccgacaacagccccaatgcctttaaggatgcgtcctccccagtgcctcccccacatgttccacctccagtcccgccgcttcgaccaagagatcggtcttcaacagaaaagcatgactgggatcctccagacagaaaagtggacacaagaaaatttcggtctgagccaaggagtatttttgaatatgaacctggcaagtcatcaattcttcagcatgaaagaccaccccctctcccaacaactccgacacctgttccaagggaacctggccggaagcctctttctagctcccgactcggagaagtcactggtagcccctcccctccgccccggagtggcgcccccacaccaagctcgcgcgccccggctctgtctcccacccggcctcctaaaaagcctctggactatgttcaagatcattcttctggtgttttcaatgaggcctccttgtatcagtcctctatagacagaagcctggaaagacccatgagttctgcaagcatggccagtgacttcaggaagcggaggaagagcgagcctgcagtgggtccaccacggggcttgggagatcaaagtgcgagcaggactagcccaggccgagtggacctcccaggatcaagcaccactcttacaaagtctttcactagctcttctccttcttccccatcaagagcaaaagaccgtgagtcccctagaagttactcatccactttgactgacatggggagaagtgcaccaagggaaagaagaggaactccagaaaaagagaaattgcctgcaaaagctgtttatgattttaaggctcagacatctaaggagttgtcatttaagaaaggagatactgtctacatcctcaggaaaattgatcaaaattggtatgagggagaacaccacgggagagtgggcatcttcccgatctcatacgtagagaaactcacacctcctgagaaagcacagcctgcaagaccacctccgccagcccagcccggagaaatcggagaagctatagccaaatacaacttcaacgcagacacaaatgtggagctgtcactgagaaagggagatagagttattcttcttaaaagagttgatcaaaactggtatgaaggtaaaatcccaggaaccaacagacaaggcatcttccctgtttcctatgtggaggtcgtcaagaagaacacaaaaggtgctgaggactaccctgaccctccaataccccacagctattctagtgataggattcacagcttgagctcaaataagccacagcgtcctgtgtttactcatgaaaatattcaaggtgggggggaaccgtttcaggctctgtataactatactcccaggaatgaagatgagctggagctcagagaaagtgatgtcattgatgtcatggaaaagtgtgatgacggctggtttgtggggacctcaagaagaaccaaattctttggtactttccccggaaactacgtcaagaggctgtgaattgcgctccctccttctgtagaggccgcctgccagccatgcacctgcgtcaacgcgcctgaaacaccccgcgggcctcccgttgtcatgccttacggtttccaatgcgccgtcaccatctccacctgccaccaaaccaccagcagagtagccgccgctgctgtgagcctggggacgacatggcaggctggtccccctccgtgaaagtgtggattcctacttcctgctctaagctttgacacgtcaaaatgtgggatcagaaagaaaaaaatcatgatatttaaaaatggtcaaatatttgaggcaaaaaaaaaaaaaaaaa

SEQ ID NO: 20084 - DNA, 5996 bp, Homo sapiens
  misc_feature 1..5996: note = ENST00000284776
  source 1..5996: mol_type = unassigned DNA
tccttttattgtggatgaacaccacgtacatgccgtaaatgctccctaggctggctgcggctacaaggcagacccgggagctgagaatagaggaatacctgcccaagcaactcattctgcacagcagccgacaagacagcgattttcctgtgctggaatgtgcccatccaaagacacttggattggacttaatcttaaacctctggagttcaagaccttttaaaaagggctaaataaacaatctctacatgtaaaaggccactgactcctacttcctctgtatagagcaactgttgaactcagctgcctgtagggcgtgattctcagtcaccagactcagcttggagatcttacaatgatggcaatcaggagacactgaacggagatgctacatattcctctcttgcagcaaaaggttttagaagcgttcgaccaaacctacaagataaaagatcaccaactcagagccagataacagtgaatggaaactcaggaggtgccgtgagtcccatgagttactatcagaggccgttttccccctcggcatattctctcccagcctcactcaactccagcattgtcatgcagcacggcacatccctcgattccacagacacatatccccagcatgcgcagtctctggatggcaccaccagcagctctatccccctgtaccgatcctcagaggaagagaagagagtgacagtcatcaaagccccgcattacccagggatcgggcccgtggatgaatccggaatccccacagcaattagaacgacagtcgaccggcccaaggactggtacaagacgatgtttaagcaaattcacatggtgcacaagccggatgatgacacagacatgtataatactccttatacatacaatgcaggtctgtacaacccaccctacagtgctcagtcacaccctgctgcaaagacccaaacctacagacctctttccaaaagccactccgacaacagccccaatgcctttaaggatgcgtcctccccagtgcctcccccacatgttccacctccagtcccgccgcttcgaccaagagatcggtcttcaacagaaaagcatgactgggatcctccagacagaaaagtggacacaagaaaatttcggtctgagccaaggagtatttttgaatatgaacctggcaagtcatcaattcttcagcatgaaagaccagcctccttgtatcagtcctctatagacagaagcctggaaagacccatgagttctgcaagcatggccagtgacttcaggaagcggaggaagagcgagcctgcagtgggtccaccacggggcttgggagatcaaagtgcgagcaggactagcccaggccgagtggacctcccaggatcaagcaccactcttacaaagtctttcactagctcttctccttcttccccatcaagagcaaaaggtggggatgatagcaaaatatgtccatccctttgcagttactcagggctcaacggcaacccctccagtgagttagattactgtagcacttacagacagcacttggatgtccctcgggactcaccaagagccattagtttcaagaacggctggcaaatggcccggcaaaacgcagaaatctggagcagcacggaagaaaccgtctctcccaaaatcaaatcccggagctgtgacgatctcctaaacgacgactgcgatagcttcccggacccgaaagtcaagtcggaaagcatgggctccctgttatgtgaggaggactccaaggagagctgccccatggcgtgggggtccccctacgtcccggaggttcgcagtaacggcagatcaaggatcagacacaggtcagcccgcaacgccccggggttcctgaagatgtacaagaaaatgcaccgcatcaaccgcaaggacctgatgaactccgaggtgatctgctccgtgaagtccaggattctgcagtacgagagcgagcagcagcacaaggacctgctgcgcgcctggagccagtgctccacggaggaggtgccccgggacatggtgcccacacgcatctccgaattcgaaaagctgatccagaagtccaaatccatgccaaatttaggggatgacatgctgtctcccgtaaccctagaaccaccgcaaaatggcctatgtcccaagaggcggttttccattgagtatttgctggaggaagaaaatcaaagcggcccccccgctcggggccggcgaggctgccagtctaacgccctggtgcccattcacattgaagtcaccagcgatgagcagccccgagcacacgtggagttttccgacagcgaccaggacggggttgtgtccgaccacagtgactacattcacctagaggggtcatccttctgcagtgaaagtgactttgatcacttttccttcacatcctccgaaagcttttacggatccagccaccaccaccaccatcaccaccaccaccaccaccgccacctcatcagctcctgcaaaggcaggtgcccggcctcctacactcgatttaccacaatgttaaaacacgaaagagccagacacgaaaacaccgaggagcccagaaggcaagaaatggaccctggcctttctaaacttgcttttctagtcagtcctgtgcctttccggaggaaaaaaaattcggctcctaagaaacagactgaaaaggcaaaatgtaaagcatctgtgtttgaggctctggactctgcccttaaagacatctgtgaccaaattaaagctgaaaagaaaagggggagcttgccggacaacagcatcctgcaccgcctcatcagtgagctgctgccagatgttcccgagaggaactcatccctgagagcgctgaggaggagccccctgcaccagcctctccacccactgcctcccgatggtgctattcattgtccaccctaccagaatgactgcgggagaatgccccgcagtgcctctttccaagacgtggacacagccaacagcagctgccaccaccaagaccgtggcggtgcactccaagaccgtgagtcccctagaagttactcatccactttgactgacatggggagaagtgcaccaagggaaagaagaggaactccagaaaaagagaaattgcctgcaaaagctgtttatgattttaaggctcagacatctaaggagttgtcatttaagaaaggagatactgtctacatcctcaggaaaattgatcaaaattggtatgagggagaacaccacgggagagtgggcatcttcccgatctcatacgtagagaaactcacacctcctgagaaagcacagcctgcaagaccacctccgccagcccagcccggagaaatcggagaagctatagccaaatacaacttcaacgcagacacaaatgtggagctgtcactgagaaagggagatagagttattcttcttaaaagagttgatcaaaactggtatgaaggtaaaatcccaggaaccaacagacaaggcatcttccctgtttcctatgtggaggtcgtcaagaagaacacaaaaggtgctgaggactaccctgaccctccaataccccacagctattctagtgataggattcacagcttgagctcaaataagccacagcgtcctgtgtttactcatgaaaatattcaaggtgggggggaaccgtttcaggctctgtataactatactcccaggaatgaagatgagctggagctcagagaaagtgatgtcattgatgtcatggaaaagtgtgatgacggctggtttgtggggacctcaagaagaaccaaattctttggtactttccccggaaactacgtcaagaggctgtgaattgcgctccctccttctgtagaggccgcctgccagccatgcacctgcgtcaacgcgcctgaaacaccccgcgggcctcccgttgtcatgccttacggtttccaatgcgccgtcaccatctccacctgccaccaaaccaccagcagagtagccgccgctgctgtgagcctggggacgacatggcaggctggtccccctccgtgaaagtgtggattcctacttcctgctctaagctttgacacgtcaaaatgtgggatcagaaagaaaaaaatcatgatatttaaaaatggtcaaatatttgaggcaaaaaaaaaaaaaaaaagtgtctccaggaggctgtccagcctcgtggctccatttcaacatctccccccaggcgatgttctcccccaagacgaccagaaaattgtttattggggaatgctgtggtttgcattttcatattcttcgcttggcagtgtgtattcttttcacaagtttgcctagtgtcttggtttacacaatatgacaactgtaactgtactttagctattgtttgcctgcacatacatgttgtaatatgcacagtgattacaacctttaaagcaagaggaggcgagttaatttggatgagtgtgattttgctgattgaatgtgagttttcaaataggagtctttttctgcaatttgtttgcattttttagaagtgcaaacagtaagtaaataaaagccttcggtaataatcatgacaatacaagaggctgagctaggctacaggggaaaactattgtgttgtaaagttgcatcgctattttatattaaaatgtaatgatcagcatcatgaacaatgagctcttagtgttttatttatctgaaaaaatgtaagtaaaagcagtgttagtgagaggtgcaaagaattattctaacagacacctgaaagtatctgtaagcaatactagtaggtaagatttcactgtgtgtacacatacacatttgagattgtatgagaacatataatccatatgatatgttgtacattttatggaaatgtaatagaatctcacacattattttatagaaatagagtacagaagcatcacaagtattaaagttggttttagcaaggattaggattactacaattatttttactataataattatttttcttctatggaactcagaatcctggctacatttgaggacaggaatatgttgagcctgattttcctggtgtgtgtaaaatatttcctaggaataaattaggcactttttagaagcaatgttaaatcattcaggttttattttctgccctgaagcagaaatttaaaaaatgatattgggacctggaaggtttaatatggttcacagtgcctgaattacacctgctccgaaaactagctttgtatttcttatgactttgcataagaactgttcatctttggatcttgagcaccttacagataaaactttttatggcatctctttcatggacagtgatattgatcttttcacaatgtacgtagcctctagaattttgtacatatgtttgctctttttttgtacagactagttgttgagaaaacaggggcgtttcctaatttggtctttatcctgcgacaacactttcagcagactagcctctccttatctcacagatcacaagcacccctagatagtgtgattctgtcagatagcatttatgcaaaaatctatgaagttaaaagatcgtagaagccaaatgaaatgtacatatctactgactgatgacaagggaatttcattaggaagaaggtaaagaaacatcgttgagtagcctaccttgatttctgtcaagttcataaccagcttcatattttaaaggcttcaggtttgaaattaagtcaactgcatgcagctttgctgataaatgaataattctctttgatgccatttatgagaaaagacttcaatatctgttgcctgtcatatttaagaaaaattactgtttctactctctgtatctgattttaaaagaaaaaactattcatacctggcttccaggtaattgactttgaattcttacaagcaaaggtcattgtgtttttcttgaatagacatctaataaattttgcttggaagtatacttcagtttttcttcttgacatttatctttataaaaattgtgtattttattccaacttgttaaactaagagaaaatgca

SEQ ID NO: 20085 - DNA, 718 bp, Homo sapiens
  misc_feature 1..718: note = ENST00000522037
  source 1..718: mol_type = unassigned DNA
aggcagaaaagatggcagagggagggtgaacccagggcccatctgtgggtatgggctccaatttcctaaattgtttgtggttataaccatggcttccaccttgtctggcaccgggtccacatcttttctgagacctgctagaaggtcagagccctagagaataagagaagcttgctgctggtgagggggtatggccaggattcctggagtcggaagagcttcagcttcaccatcttgggagaagaaggaagaaagtgaaagcgatgtggtccttcttagtcccaaggaccctgacagaggacacgcagaggagcagctggcttgcccggagtcctcccaccttgacccaagcatgcagggcccaccccgcagcctccgcgctgggctcagcctggacgacttcatccctggccacctccagtcccacatagggtcttcctcccgggggacacggttccacgaccccgcgcccaggactgtgtgcaatgggggctacacaccaagacgagatgcttcccagcacccggaccctgcgtggtatcagacctggccaggccctgggagcaagccctctgcaagcacaaagatccctgcctcccagcacacccagaactggtcagccacgtggaccaaggacagcaagcgtcgggacaagcgctgggtcaagtacgagggaatcgggcccgtggacgagagcggcatgcccattgccccccga

SEQ ID NO: 20086 - DNA, 568 bp, Homo sapiens
  misc_feature 1..568: note = ENST00000523941
  source 1..568: mol_type = unassigned DNA
agaaaagatggcagagggagggtgaacccagggcccatctgtgggtatgggctccaatttcctaaattgtttgtggttataaccatggcttccaccttgtctggcaccgggtccacatcttttctgagacctgctagaaggtcagagccctagagaataagagaagcttgctgctggtgagggggtatggccaggattcctggagtcggaagagcttcagcttcaccatcttgggagaagaaggaagaaagtgaaagcgatgtggtccttcttagtcccaaggaccctgacagaggacacgcagaggagcagctggcttgcccggagtcctcccaccttgacccaagcatgcagggcccaccccgcagcctccgcgctgggctcagcctggacgacttcatccctggccacctccagtcccacatagggtcttcctcccgggggacacgggtgcccgtgatccggaatggtggctccaacacccttaatttccagttccacgaccccgcgcccaggactgtgtgcaatgggggctacacaccaagacgagatgcttcccagcacccgg

SEQ ID NO: 20087 - DNA, 3459 bp, Homo sapiens
  misc_feature 1..3459: note = ENST00000240123
  source 1..3459: mol_type = unassigned DNA
cgcgcgcgccccgacggacggagagcactcgcacgtccctcctctccggcccagccccggcccgcagtccagatccgagacccaaactccgcccgccccgccgcgcgactctcacggtccggcctccggcgcgcgccccttcggcctccctcttcctgcgccggcgcccggcccggcccggcccgtcctgacccggtcacgagggccgcgacggcccgcgcttctccttgcccttcctcctcgagcgcccgcgccaggcagcagccgggcagggatgctcctgcgctcccgggcggcctcgggcccagccacctgctcgccggggaagaggacacgcagaggagcagctggcttgcccggagtcctcccaccttgacccaagcatgcagggcccaccccgcagcctccgcgctgggctcagcctggacgacttcatccctggccacctccagtcccacatagggtcttcctcccgggggacacgggtgcccgtgatccggaatggtggctccaacacccttaatttccagttccacgaccccgcgcccaggactgtgtgcaatgggggctacacaccaagacgagatgcttcccagcacccggaccctgcgtggtatcagacctggccaggccctgggagcaagccctctgcaagcacaaagatccctgcctcccagcacacccagaactggtcagccacgtggaccaaggacagcaagcgtcgggacaagcgctgggtcaagtacgagggaatcgggcccgtggacgagagcggcatgcccattgccccccgatccagcgttgacagacccagagactggtaccggagaatgttccagcagattcaccggaaaatgccagacttgcagctggactggaccttcgaggagccacccagagaccccaggcatctaggagcccagcaaagacctgcccacaggcccggcccggcaacatcttccagtggaagaagctgggaccactctgaagagttacctagaagcaccttcaactacagacctggagcattctccactgtgctgcagccctcaaatcaggtgctcagacgccgggaaaaagtagacaatgtctggacggaagagtcctggaaccagtttctgcaggaactagagactgggcagaggcccaagaaaccgctggtggacgaccctggtgagaagccctcccagcccattgaggtgctgctggagagagagctggccgagctgagcgccgagctggacaaggacctgcgggcaattgagacccgactgccgtcccccaagagctcgccggcgccccgacgggccccggagcagcggcccccggccggcccggcctcagcctggagctccagctacccacatgcaccttacctgggttccgcccggtccctgagtccccacaaaatggctgatggaggaagccccttcctaggtcggagggactttgtctacccttcctcaacccgagaccctagtgcctctaacggagggggcagcccagccaggagggaagagaagaagagaaaggccgccaggctcaagtttgacttccaggcgcagtcccccaaggagctgactctgcagaagggtgacattgtctacatccacaaggaggtggacaagaactggctggagggagagcaccacggccgcctgggcatcttccctgctaattatgtggaggtgctgcccgcagatgagatccctaagcccatcaagcccccgacctaccaggtgctggagtatggagaggctgtggcccagtacaccttcaagggggacctggaggtggagctgtccttccgcaagggagagcacatctgcctgatccgcaaggtgaacgagaactggtacgagggacgcatcacgggcacggggcgccaaggcatattccctgccagctacgtgcaggtgtctcgtgaaccccggctccggctctgtgacgacggcccccagctccccacgtctccccgcctgaccgctgccgcccgctcagcccgtcaccccagctccccctcagccctgcgcagcccagctgaccccatcgacttggggggacagacctccccccgtcgcactggcttctccttccccacccaggagcctagaccccagacccagaatcttggcacccctggtccagctctgtcccactctcgaggtcccagccatcccctggacctggggacctcctctcctaacacctctcagatacactggaccccgtaccgggcgatgtaccagtacaggccccagaacgaagacgagctggagctgcgcgagggggacagggtggatgtcatgcagcagtgtgacgatggctggtttgtgggtgtctcccggaggacccagaaattcggaacgttccctggaaattacgttgccccggtgtgagtggtctccatggcaacttggagccagccaggatggggtggggagcggtggcactcgtgggagggagaggacccccgcccacatcctccttccccaggacctgagctcccagcatctgcagacgacccccgcagcctttccctcggacccccctcgaagccccctggactgattcccacccacgactcacaggcattcctcccacagccctttcatttcctccccaccccactccccaaatacagaggtctgctttgaagcggagaccatttccaggccttattgagaccagaccccaagtcccccacccccatcctgctccagcgtttcctctaacagggaccagctctccgctttgcccccacggggttcctctaaccagaaccagcttcctagcctcgtagagaccaaaggccgcccccgcctgctggggttcctcccagcaccccagcttgctggctgccctctttgccttctggcctccagctgggtgtgggggggcggagcaaggcgggggacagacgcagcaccttcttagcgatctaggcctggcaagagctctggccccaaggcctcctcttcccaggggctgccaagtcctggccctggccctggcatatcaccccgcactgtggggccaggcaccactagcctggctcaaatattccccagggagactgctgtgtgctgcccgcctgcctgctggctctcccccagccccacatcccctctggaagagaatgtaaaataaacctggacacaagggaccttgtctctgcggccttttccttggggtaggggatgcctcctcctgtctaggagatgggaattccttctgtggagggctgtgctgggagacaggtgggacaggtgtgtgtgtaagaggaggaggatggaaaaacaccattattacctccaaagatctctgcccttgggtgtcaggcaggttgcggcagcccccacaattgggcagctgtgtggcaagaagtgctgggagaatgaacagtgccaggccctggtagcagggagacaccagagatgggggactgaatgtggcctt

SEQ ID NO: 20088 - DNA, 1228 bp, Homo sapiens
  misc_feature 1..1228: note = ENST00000517500
  source 1..1228: mol_type = unassigned DNA
cttcctcctcgagcgcccgcgccaggcagcagccgggcagggatgctcctgcgctcccgggcggcctcgggcccagccacctgctcgccggggaagaggacacgcagaggagcagctggcttgcccggagtcctcccaccttgacccaagcatgcagggcccaccccgcagcctccgcgctgggctcagcctggacgacttcatccctggccacctccagtcccacatagggtcttcctcccgggggacacgggtgcccgtgatccggaatggtggctccaacacccttaatttccagttccacgaccccgcgcccaggactgtgtgcaatgggggctacacaccaagacgagatgcttcccagcacccggaccctgcgtggtatcagacctggccaggccctgggagcaagccctctgcaagcacaaagatccctgcctcccagcacacccagaactggtcagccacgtggaccaaggacagcaagcgtcgggacaagcgctgggtcaagtacgagggaatcgggcccgtggacgagagcggcatgcccattgccccccgatccagcgttgacagacccagagactggtaccggagaatgttccagcagattcaccggaaaatgccagacttgcagctggactggaccttcgaggagccacccagagaccccaggcatctaggagcccagcaaagacctgcccacaggcccggcccggcaacatcttccagtggaagaagctgggaccactctgaagagttacctagaagcaccttcaactacagacctggagcattctccactgtgctgcagccctcaaatcaggtgctcagacgccgggaaaaagtagacaatgtctggacggaagagtcctggaaccagtttctgcaggaactagagactgggcagaggcccaagaaaccgctggtggacgaccctggtgagaagccctcccagcccattgaggtgctgctggagagagagctggccgagctgagcgccgagctggacaaggacctgcgggcaattgagacccgactgccgtcccccaagcccggcctcagcctggagctccagctacccacatgcaccttacctgggttccgcccggtccctgagtccccacaaaatggctgatggaggaagccccttcctaggtcggagggactttgtctacccttcctcaacccgagaccctagtgcctctaacggagggggcagcccagc

SEQ ID NO: 20089 - DNA, 3067 bp, Homo sapiens
  misc_feature 1..3067: note = ENST00000517535
  source 1..3067: mol_type = unassigned DNA
attgtgcccctgggagccggcaggcacgggcagcctgcaggcgggtgcctggcgtggcctgtttcctgggtccttgagctagtacccagctggtcctgaccccctcccacagccggcccctcctcccctatcccagggtcgagccaagagggcatgggcagcctagcctagcagggctttcccttccttcctccttccccacagaggacacgcagaggagcagctggcttgcccggagtcctcccaccttgacccaagcatgcagggcccaccccgcagcctccgcgctgggctcagcctggacgacttcatccctggccacctccagtcccacatagggtcttcctcccgggggacacgggtgcccgtgatccggaatggtggctccaacacccttaatttccagttccacgaccccgcgcccaggactgtgtgcaatgggggctacacaccaagacgagatgcttcccagcacccggaccctgcgtggtatcagacctggccaggccctgggagcaagccctctgcaagcacaaagatccctgcctcccagcacacccagaactggtcagccacgtggaccaaggacagcaagcgtcgggacaagcgctgggtcaagtacgagggaatcgggcccgtggacgagagcggcatgcccattgccccccgatccagcgttgacagacccagagactggtaccggagaatgttccagcagattcaccggaaaatgccagacttgcagctggactggaccttcgaggagccacccagagaccccaggcatctaggagcccagcaaagacctgcccacaggcccggcccggcaacatcttccagtggaagaagctgggaccactctgaagagttacctagaagcaccttcaactacagacctggagcattctccactgtgctgcagccctcaaatcaggtgctcagacgccgggaaaaagtagacaatgtctggacggaagagtcctggaaccagtttctgcaggaactagagactgggcagaggcccaagaaaccgctggtggacgaccctggtgagaagccctcccagcccattgaggtgctgctggagagagagctggccgagctgagcgccgagctggacaaggacctgcgggcaattgagacccgactgccgtcccccaagagctcgccggcgccccgacgggccccggagcagcggcccccggccgggtgagtgggagacgcgggaggaggaagggggctgtcccaggccgggcgggagggaacgtggcgcggccgggcggggcggacgggggcgatcgcggggcccagccgggggaggaaggaaccgcagagccgtgtccgggagggaccgcagcgccactctctgcggggcgccgttcccgcgccaccgagggcagctaactcctagcagaggaccggggtcgcggccgccgggggcgcagcgcggttagggcggccccgccacggcccaggcactcccgctgggccctgccgggcctcacccttccccgcgcagcgactcgggaagtaggacatcctgtggagagcccaggacccgggagacgccctgggaggaggtggcagggatgggggcgatggggggtcagagcggtctaggggtgaccagggtggggtgcggagccccaggctggaggctcagtctctgtgccccgtgcagcccggcctcagcctggagctccagctacccacatgcaccttacctgggttccgcccggtccctgagtccccacaaaatggctgatggaggaagccccttcctaggtcggagggactttgtctacccttcctcaacccgagaccctagtgcctctaacggagggggcagcccagccaggagggaagagaagaagagaaaggccgccaggctcaagtttgacttccaggcgcagtcccccaaggagctgactctgcagaagggtgacattgtctacatccacaaggaggtggacaagaactggctggagggagagcaccacggccgcctgggcatcttccctgctaattatgtggaggtgctgcccgcagatgagatccctaagcccatcaagcccccgacctaccaggtgctggagtatggagaggctgtggcccagtacaccttcaagggggacctggaggtggagctgtccttccgcaagggagagcacatctgcctgatccgcaaggtgaacgagaactggtacgagggacgcatcacgggcacggggcgccaaggcatattccctgccagctacgtgcaggtgtctcgtgaaccccggctccggctctgtgacgacggcccccagctccccacgtctccccgcctgaccgctgccgcccgctcagcccgtcaccccagctccccctcagccctgcgcagcccagctgaccccatcgacttggggggacagacctccccccgtcgcactggcttctccttccccacccaggagcctagaccccagacccagaatcttggcacccctggtccagctctgtcccactctcgaggtcccagccatcccctggacctggggacctcctctcctaacacctctcagatacactggaccccgtaccgggcgatgtaccagtacaggccccagaacgaagacgagctggagctgcgcgagggggacagggtggatgtcatgcagcagtgtgacgatggctggtttgtgggtgtctcccggaggacccagaaattcggaacgttccctggaaattacgttgccccggtgtgagtggtctccatggcaacttggagccagccaggatggggtggggagcggtggcactcgtgggagggagaggacccccgcccacatcctccttccccaggacctgagctcccagcatctgcagacgacccccgcagcctttccctcggacccccctcgaagccccctggactgattcccacccacgactcacaggcattcctcccacagccctttcatttcctccccaccccactccccaaatacagaggtctgctttgaagcggagaccatttccaggccttattgagaccagaccccaagtcccccacccccatcctgct

SEQ ID NO: 20090 - DNA, 889 bp, Homo sapiens
  misc_feature 1..889: note = ENST00000523402
  source 1..889: mol_type = unassigned DNA
gaggacacgcagaggagcagctggcttgcccggagtcctcccaccttgacccaagcatgcagggcccaccccgcagcctccgcgctgggctcagcctggacgacttcatccctggccacctccagtcccacatagggtcttcctcccgggggacacgggtgcccgtgatccggaatggtggctccaacacccttaatttccagttccacgaccccgcgcccaggactgtgtgcaatgggggctacacaccaagacgagatgcttcccagcacccggaccctgcgtggtatcagacctggccaggccctgggagcaagccctctgcaagcacaaagatccctgcctcccagcacacccagaactggtcagccacgtggaccaaggacagcaagcgtcgggacaagcgctgggtcaagtacgagggaatcgggcccgtggacgagagcggcatgcccattgccccccgatccagcgttgacagacccagagactggtaccggagaatgttccagcagattcaccggaaaatgccagacttgcagctggactggaccttcgaggagccacccagaggtgaggggatgcgggcccacctgcctgccatagccctgcgcctgcgtccgcccctccctggggctgggactcgcagccccgcctggctttggggctctccagttggctcagttcaacctgagaggtttttatagctcatttccagagcacttcaaatcccccggtaggtggtaattaacagcctcagcttgcacggggaacgcgcgctctgccactccctggccgggatttctctgggcctccctttcctcatctataagatgagatcatcacctactcggagttgttttgaagatgtagtaaatgtcgtaaagct

SEQ ID NO: 20091 - DNA, 456 bp, Homo sapiens
  misc_feature 1..456: note = ENST00000520563
  source 1..456: mol_type = unassigned DNA
taatttccagttccacgaccccgcgcccaggactgtgtgcaatgggggctacacaccaagacgagatgcttcccagcacccggaccctgcgtggtatcagacctggccaggccctgggagcaagccctctgcaagcacaaagatccctgcctcccagcacacccagaactggtcagccacgtggaccaaggacagcaagcgtcgggacaagcgctgggtcaagtacgagggaatcgggcccgtggacgagagcggcatgcccattgccccccgatccagcgttgacagacccagagactggtaccggagaatgttccagcagattcaccggaaaatgccagaagaagctgggaccactctgaagagttacctagaagcaccttcaactacagacctggagcattctccactgtgctgcagccctcaaatcaggtgctcagacgccgggaaaaagta

SEQ ID NO: 20092 - DNA, 564 bp, Homo sapiens
  misc_feature 1..564: note = ENST00000524057
  source 1..564: mol_type = unassigned DNA
actaatgctctcctgcacgcacccaacagaccctgcgtggtatcagacctggccaggccctgggagcaagccctctgcaagcacaaagatccctgcctcccagcacacccagaactggtcagccacgtggaccaaggacagcaagcgtcgggacaagcgctgggtcaagtacgagggaatcgggcccgtggacgagagcggcatgcccattgccccccgatccagcgttgacagacccagagactggtaccggagaatgttccagcagattcaccggaaaatgccagacttgcagctggactggaccttcgaggagccacccagagaccccaggcatctaggagcccagcaaagacctgcccacaggcccggcccggcaacatcttccagtggaagaagctgggaccactctgaagagttacctagaagcaccttcaactacagacctggagcattctccactgtgctgcagccctcaaatcaggtgctcagacgccgggaaaaagtagacaatgtctggacggaagagtcctggaaccagtttctgcaggaactagagactgg

SEQ ID NO: 20093 - DNA, 755 bp, Homo sapiens
  misc_feature 1..755: note = ENST00000518512
  source 1..755: mol_type = unassigned DNA
gaaattcccaggcaccttgaggagctaggagtgggtcttggcaaatggggaaggaaagcgtttggaagagggtgcaagtcgagtttccccagcctgagtggtgagggcaagtccacaaagacttgcagctggactggaccttcgaggagccacccagaggtgaggggatgcgggcccacctgcctgccatagccctgcgcctgcgtccgcccctccctggggctgggactcgcagccccgcctggctttggggctctccagttggctcagttcaacctgagaggtttttatagctcatttccagagcacttcaaatcccccgaccccaggcatctaggagcccagcaaagacctgcccacaggcccggcccggcaacatcttccagtggaagaagctgggaccactctgaagagttacctagaagcaccttcaactacagacctggagcattctccactgtgctgcagccctcaaatcaggtgctcagacgccgggaaaaagtagacaatgtctggacggaagagtcctggaaccagtttctgcaggaactagagactgggcagaggcccaagaaaccgctggtggacgaccctggtgagaagccctcccagcccattgaggtgctgctggagagagagctggccgagctgagcgccgagctggacaaggacctgcgggcaattgagacccgactgccgtcccccaagagctcgccggcgccccgacgggccccggagcagcggcccccggccgg

SEQ ID NO: 20094 - DNA, 699 bp, Homo sapiens
  misc_feature 1..699: note = ENST00000520574
  source 1..699: mol_type = unassigned DNA
atcaggaaatattcttggaggtggagctggacccttgagaagctccgagggcctgattcggcgaagacccatagcagaggctggcaggaagcagcgtgggggtgggggctccggtccctggggtggcgggggaacctggatgggcacagtgaagccaggccttggagggcgggagaagatgggagaggaaatggggaaccccattggtgctgtaacagagacacaacttggcagaaactggcaggactgcggaatcgcgggatcaggaagcgcgtaggcactcccggggcgtgctgggcaggtgctgctggagagagagctggccgagctgagcgccgagctggacaaggacctgcgggcaattgagacccgactgccgtcccccaaggtaccagcccccagggttcacccgcggggcacgccggcgaccgcagggtcggggcgagccgggagcctcggcggctgggctgggcggaggacgggcagccgaggtccggcctccagcggcgcgcaccggcctcgggccctcctgggcgctggcgggctcgctcctccataaataaaatacagggcgtcgactttcgcaagtgaccccgaggagcctttctaagcggactccacgtcagcccgacgaccgggcgcccgccccgtccggcccccgggccccagcctcggggacccccgccccttcccctagtt

SEQ ID NO: 20095 - DNA, 561 bp, Homo sapiens
  misc_feature 1..561: note = ENST00000521787
  source 1..561: mol_type = unassigned DNA
gattcggcgaagacccatagcagaggctggcaggaagcagcgtgggggtgggggctccggtccctggggtggcgggggaacctggatgggcacagtgaagccaggccttggagggcgggagaagatgggagaggaaatggggaaccccattggtgctgtaacagagacacaacttggcagaaactggcaggactgcggaatcgcgggatcaggaagcgcgtaggcactcccggggcgtgctgggcaggtgctgctggagagagagctggccgagctgagcgccgagctggacaaggacctgcgggcaattgagacccgactgccgtcccccaagcccggcctcagcctggagctccagctacccacatgcaccttacctgggttccgcccggtccctgagtccccacaaaatggctgatggaggaagccccttcctaggtcggagggactttgtctacccttcctcaacccgagaccctagtgcctctaacggagggggcagcccagccaggagggaagagaagaagagaaaggccgccaggctcaagtttgacttccagg

SEQ ID NO: 20096 - DNA, 983 bp, Homo sapiens
  misc_feature 1..983: note = ENST00000523740
  source 1..983: mol_type = unassigned DNA
gtgggggtgggggctccggtccctggggtggcgggggaacctggatgggcacagtgaagccaggccttggagggcgggagaagatgggagaggaaatggggaaccccattggtgctgtaacagagacacaacttggcagaaactggcaggactgcggaatcgcgggatcaggaagcgcgtaggcactcccggggcgtgctgggcaggtgctgctggagagagagctggccgagctgagcgccgagctggacaaggacctgcgggcaattgagacccgactgccgtcccccaagagctcgccggcgccccgacgggccccggagcagcggcccccggccggcccggcctcagcctggagctccagctacccacatgcaccttacctgggttccgcccggtccctgagtccccacaaaatggctgatggaggaagccccttcctaggtcggagggactttgtctacccttcctcaacccgagaccctagtgcctctaacggagggggcagcccagccaggagggaagagaagaagagaaaggccgccaggctcaagtttgacttccaggcgcagtcccccaaggagctgactctgcagaagggtgacattgtctacatccacaaggaggtggacaagaactggctggagggagagcaccacggccgcctgggcatcttccctgctaattatgtggaggtgctgcccgcagatgagatccctaagcccatcaagcccccgacctaccaggtgctggagtatggagaggctgtggcccagtacaccttcaagggggacctggaggtggagctgtccttccgcaagggagagcacatctgcctgatccgcaaggtgaacgagaactggtacgagggacgcatcacgggcacggggcgccaaggcatattccctgccagctacgtgcaggtgtctcgtgaaccccggctccggctctgtgacgacggcccccagctccccacgtctccc

SEQ ID NO: 20097 - DNA, 563 bp, Homo sapiens
  misc_feature 1..563: note = ENST00000522315
  source 1..563: mol_type = unassigned DNA
actcccggggcgtgctgggcaggtgagaggccgtggcggggatgccctcttggcaccctgggccacacctcctggcaggagcccggcccgtgcgctgaggcctgcccttacgccggcccggtgcgctggccttgcttttcacagtcgatctttgaccgctgcctcccacccccacggtgcgctgcccctcactgcccagcctctccccgcccccaggtgctgctggagagagagctggccgagctgagcgccgagctggacaaggacctgcgggcaattgagacccgactgccgtcccccaagaccctagtgcctctaacggagggggcagcccagccaggagggaagagaagaaggtaaggaggggaccaggtgtgggggacctggagtggtcccaaggctgccatcctggatctgccacccgcccaactgagagagcccactctgtcctctcccctgcctagagaaaggccgccaggctcaagtttgacttccaggcgcagtcccccaaggagctgactctgcagaagggtgacattgtctacatccacaaggaggtggac

SEQ ID NO: 20098 - DNA, 560 bp, Homo sapiens
  misc_feature 1..560: note = ENST00000519453
  source 1..560: mol_type = unassigned DNA
aggtgctgctggagagagagctggccgagctgagcgccgagctggacaaggacctgcgggcaattgagacccgactgccgtcccccaagagctcgccggcgccccgacgggccccggagcagcggcccccggccggaccctagtgcctctaacggagggggcagcccagccaggagggaagagaagaaggtaaggaggggaccaggtgtgggggacctggagtggtcccaaggctgccatcctggatctgccacccgcccaactgagagagcccactctgtcctctcccctgcctagagaaaggccgccaggctcaagtttgacttccaggcgcagtcccccaaggagctgactctgcagaagggtgacattgtctacatccacaaggaggtggacaagaactggctggagggagagcaccacggccgcctgggcatcttccctgctaattatgtggaggtgctgcccgcagatgagatccctaagcccatcaagcccccgacctaccaggtgctggagtatggagaggctgtggcccagtacaccttcaagggggacct

SEQ ID NO: 20099 - DNA, 670 bp, Homo sapiens
  misc_feature 1..670: note = ENST00000523900
  source 1..670: mol_type = unassigned DNA
gagctggccgagctgagcgccgagctggacaaggacctgcgggcaattgagacccgactgccgtcccccaagcccggcctcagcctggagctccagctacccacatgcaccttacctgggttccgcccggtccctgagtccccacaaaatggctgatggaggaagccccttcctaggtcggagggactttgtctacccttcctcaacccgagaccctagtgcctctaacggagggggcagcccagccaggagggaagagaagaagagaaaggccgccaggctcaagtttgacttccaggcgcagtcccccaaggagctgactctgcagaagggtgacattgtctacatccacaaggaggtggacaagaactggctggagggagagcaccacggccgcctgggcatcttccctgctaattatgtggaggtgctgcccgcagatgagatccctaagcccatcaagcccccgacctaccaggtgctggagtatggagaggctgtggcccagtacaccttcaagggggacctggaggtggagctgtccttccgcaagggagagcacatctgcctgatccgcaaggtgaacgagaactggtacgagggacgcatcacgggcacggggcgccaaggcatattccctgccagctacgtgcaggtgtctcgtgaaccc

SEQ ID NO: 20100 - DNA, 2028 bp, Homo sapiens
  misc_feature 1..2028: note = ENST00000523965
  source 1..2028: mol_type = unassigned DNA
ccgggatcggccgcgcgggcgcctctaggaccccgcgtcccgcccgctctcctcccctcccgagccgcgaacttttccggaggcggcggcctcggctgccgctgggtcccggggtcgcgggccctgattgcgccgtttccccgcgcagagctcgccggcgccccgacgggccccggagcagcggcccccggccggcccggcctcagcctggagctccagctacccacatgcaccttacctgggttccgcccggtccctgagtccccacaaaatggctgatggaggaagccccttcctaggtcggagggactttgtctacccttcctcaacccgagaccctagtgcctctaacggagggggcagcccagccaggagggaagagaagaagagaaaggccgccaggctcaagtttgacttccaggcgcagtcccccaaggagctgactctgcagaagggtgacattgtctacatccacaaggaggtggacaagaactggctggagggagagcaccacggccgcctgggcatcttccctgctaattatgtggaggtgctgcccgcagatgagatccctaagcccatcaagcccccgacctaccaggtgctggagtatggagaggctgtggcccagtacaccttcaagggggacctggaggtggagctgtccttccgcaagggagagcacatctgcctgatccgcaaggtgaacgagaactggtacgagggacgcatcacgggcacggggcgccaaggcatattccctgccagctacgtgcaggtgtctcgtgaaccccggctccggctctgtgacgacggcccccagctccccacgtctccccgcctgaccgctgccgcccgctcagcccgtcaccccagctccccctcagccctgcgcagcccagctgaccccatcgacttggggggacagacctccccccgtcgcactggcttctccttccccacccaggagcctagaccccagacccagaatcttggcacccctggtccagctctgtcccactctcgaggtcccagccatcccctggacctggggacctcctctcctaacacctctcagatacactggaccccgtaccgggcgatgtaccagtacaggccccagaacgaagacgagctggagctgcgcgagggggacagggtggatgtcatgcagcagtgtgacgatggctggtttgtgggtgtctcccggaggacccagaaattcggaacgttccctggaaattacgttgccccggtgtgagtggtctccatggcaacttggagccagccaggatggggtggggagcggtggcactcgtgggagggagaggacccccgcccacatcctccttccccaggacctgagctcccagcatctgcagacgacccccgcagcctttccctcggacccccctcgaagccccctggactgattcccacccacgactcacaggcattcctcccacagccctttcatttcctccccaccccactccccaaatacagaggtctgctttgaagcggagaccatttccaggccttattgagaccagaccccaagtcccccacccccatcctgctccagcgtttcctctaacagggaccagctctccgctttgcccccacggggttcctctaaccagaaccagcttcctagcctcgtagagaccaaaggccgcccccgcctgctggggttcctcccagcaccccagcttgctggctgccctctttgccttctggcctccagctgggtgtgggggggcggagcaaggcgggggacagacgcagcaccttcttagcgatctaggcctggcaagagctctggccccaaggcctcctcttcccaggggctgccaagtcctggccctggccctggcatatcaccccgcactgtggggccaggcaccactagcctggctcaaatattccccagggagactgctgtgtgctgcccgcctgcctgctggctctcccccagccccacatcccctctggaagagaatgtaaaataaacctggacacaaggga

SEQ ID NO: 20101 - DNA, 858 bp, Homo sapiens
  misc_feature 1..858: note = ENST00000521554
  source 1..858: mol_type = unassigned DNA
tcggctgccgctgggtcccggggtcgcgggccctgattgcgccgtttccccgcgcagagctcgccggcgccccgacgggccccggagcagcggcccccggccggaccctagtgcctctaacggagggggcagcccagccaggagggaagagaagaagagaaaggccgccaggctcaagtttgacttccaggcgcagtcccccaaggagctgactctgcagaagggtgacattgtctacatccacaaggaggtggacaagaactggctggagggagagcaccacggccgcctgggcatcttccctgctaattatgtggaggtgctgcccgcagatgagatccctaagcccatcaagcccccgacctaccaggtgctggagtatggagaggctgtggcccagtacaccttcaagggggacctggaggtggagctgtccttccgcaagggagagcacatctgcctgatccgcaaggtgaacgagaactggtacgagggacgcatcacgggcacggggcgccaaggcatattccctgccagctacgtgcaggtgtctcgtgaaccccggctccggctctgtgacgacggcccccagctccccacgtctccccgcctgaccgctgccgcccgctcagcccgtcaccccagctccccctcagccctgcgcagcccagctgaccccatcgacttggggggacagacctccccccgtcgcactggcttctccttccccacccaggagcctagaccccagacccagaatcttggcacccctggtccagctctgtcccactctcgaggtcccagccatcccctggacctggggacctcctctcctaacacctctcagatacactggac

SEQ ID NO: 20102 - DNA, 601 bp, Homo sapiens
  misc_feature 1..601: note = ENST00000522721
  source 1..601: mol_type = unassigned DNA
gtgtccgggagggaccgcagcgccactctctgcggggcgccgttcccgcgccaccgagggcagctaactcctagcagaggaccggggtcgcggccgccgggggcgcagcgcggttagggcggccccgccacggcccaggcactcccgctgggccctgccgggcctcacccttccccgcgcagcgactcgggaagtaggacatcctgtggagagcccaggacccgggagacgccctgggaggagcccggcctcagcctggagctccagctacccacatgcaccttacctgggttccgcccggtccctgagtccccacaaaatggctgatggaggaagccccttcctaggtcggagggactttgtctacccttcctcaacccgagaccctagtgcctctaacggagggggcagcccagccaggagggaagagaagaagagaaaggccgccaggctcaagtttgacttccaggcgcagtcccccaaggagctgactctgcagaagggtgacattgtctacatccacaaggaggtggacaagaactggctggagggagagcaccacggccgcctgggcatcttccctgctaattatgtggaggtg

SEQ ID NO: 20103 - DNA, 680 bp, Homo sapiens
  misc_feature 1..680: note = ENST00000523348
  source 1..680: mol_type = unassigned DNA
gcggtcctcgtccccacctgcagggagctgactctgcagaagggtgacattgtctacatccacaaggaggtggacaagaactggctggagggagagcaccacggccgcctgggcatcttccctgctaattatgtggaggtgctgcccgcagatgagatccctaagcccatcaagcccccgacctaccaggtgctggagtatggagaggctgtggcccagtacaccttcaagggggacctggaggtggagctgtccttccgcaagggagagcacatctgcctgatccgcaaggtgaacgagaactggtacgagggacgcatcacgggcacggggcgccaaggcatattccctgccagctacgtgcaggtgtctcgtgaaccccggctccggctctgtgacgacggcccccagctccccacgtctccccgcctgaccgctgccgcccgctcagcccgtcaccccagctccccctcagccctgcgcagcccagctgaccccatcgacttggggggacagacctccccccgtcgcactggcttctccttccccacccaggagcctagaccccagacccagaatcttggcacccctggtccagctctgtcccactctcgaggtcccagccatcccctggacctggggacctcctctcctaacacctctcagatacactggacccc

SEQ ID NO: 20104 - DNA, 885 bp, Homo sapiens
  misc_feature 1..885: note = ENST00000517962
  source 1..885: mol_type = unassigned DNA
agaactggtacgagggacgcatcacgggcacggggcgccaaggcatattccctgccagctacgtgcaggtgtctcgtgaaccccggctccggctctgtgacgacggcccccagctccccacgtctccccgcctgaccgctgccgcccgctcagcccgtcaccccagctccccctcagccctgcgcagcccagctgaccccatcgacttggggggacagacctccccccgtcgcactggcttctccttccccacccaggagcctagaccccagacccagaatcttggcacccctggtccagctctgtcccactctcgaggtcccagccatcccctggacctggggacctcctctcctaacacctctcagatacactggaccccgtaccgggcgatgtaccagtacaggccccagaacgaagacgagctggagctgcgcgagggggacagggtggatgtcatgcagcagtgtgacgatggctggtttgtgggtgtctcccggaggacccagaaattcggaacgttccctggaaattacgttgccccggtaggtctgctttgaagcggagaccatttccaggccttattgagaccagaccccaagtcccccacccccatcctgctccagcgtttcctctaacagggaccagctctccgctttgcccccacggggttcctctaaccagaaccagcttcctagcctcgtagagaccaaaggccgcccccgcctgctggggttcctcccagcaccccagcttgctggctgccctctttgccttctggcctccagctgggtgtgggggggcggagcaaggcgggggacagacgcagcaccttcttagcgatctaggcctggcaagagctctggccccaaggcctcctcttcc

SEQ ID NO: 20105 - DNA, 576 bp, Homo sapiens
  misc_feature 1..576: note = ENST00000520207
  source 1..576: mol_type = unassigned DNA
atccctttcttcctgtcaactcccagaatcttggcacccctggtccagctctgtcccactctcgaggtcccagccatcccctggacctggggacctcctctcctaacacctctcagatacactggaccccgtaccgggcgatgtaccagtacaggccccagaacgaagacgagctggagctgcgcgagggggacagggtggatgtcatgcagcagtgtgacgatggctggtttgtgggtgtctcccggaggacccagaaattcggaacgttccctggaaattacgttgccccggtgtgagtggtctccatggcaacttggagccagccaggatggggtggggagcggtggcactcgtgggagggagaggacccccgcccacatcctccttccccaggacctgagctcccagcatctgcagacgacccccgcagcctttccctcggacccccctcgaagccccctggactgattcccacccacgactcacaggcattcctcccacagccctttcatttcctccccaccccactccccaaatacagaggtctgctttgaagcggagaccatttccagg

SEQ ID NO: 20106 - DNA, 209 bp, Homo sapiens
  misc_feature 1..209: note = ENST00000519127
  source 1..209: mol_type = unassigned DNA
tatgcagacaagaagaaaaagtaccacttttgtattaggagccacaagcgctttgagaggaatgggcgagacctgtgccctttccggtgtctcccggaggacccagaaattcggaacgttccctggaaattacgttgccccggtgtgagtggtctccatggcaacttggagccagccaggatggggtggggagcggtggcactcgtggg

SEQ ID NO: 20107 - DNA, 5757 bp, Homo sapiens
  misc_feature 1..5757: note = ENST00000369701
  source 1..5757: mol_type = unassigned DNA
atcaccctctggacaagagaacgggcgagcgggagctaggagggaagagtggagaggaccggcgaggcgcgccagccggagccacctccttcccggccgccccctccccactccccctacacacacacgctcgctcgctcgccggcgcgcgcacaccccccgcgccggacccgcacctcggcgggcgccacacactcggcagcccgagccgcggtagccgcagcgggatggaggcggcgcgcacggagcgccccgcaggcaggccgggggcgccgcttgtccggacggggctcctactcttgtcgacgtgggtcctggccggcgccgagatcacttgggacgcgacaggcggtcccggacgcccggcggccccggcttcgcggccaccggcgttgtctccactctcgccgcgggcagtggccagccagtggccggaggagctggcgtcggcgcggagagccgccgtgctggggcgccgggccggaccagagctgctgccccagcagggcggcggcagaggcggtgagatgcaggtggaagccggagggacatcaccggcaggcgagcggcggggccggggcatcccagctcctgccaagcttggcggcgcgaggaggagtcgccgggcgcagcccccaatcacccaggaacgcggggacgcctgggccactgctccggccgatggttccagaggaagccgtccccttgctaagggttcccgggaggaggtgaaggcgccgcgggctggggggtcggcggctgaagacctccggctgcccagcacctccttcgcgctgaccggggactcggcccacaaccaagccatggtgcactggtcgggacacaacagcagcgtcatacttatcctgacgaagctgtatgacttcaacctgggcagcgtgactgagagttcactatggaggtcgacagattatggcaccacctatgaaaagctgaatgacaaagtgggtttgaagactgtcctcagttacctctatgtcaatccaaccaacaaaaggaagattatgcttctcagtgatcctgagatggagagcagcatattgatcagctcagacgaaggggcgacctatcagaagtatcggctcaccttctatatccagagcctgctctttcatcccaagcaagaggactgggtgctggcctacagtttggatcaaaagctctacagctccatggactttggaagacggtggcaactcatgcatgaacgcatcacacccaacaggttttattggtcggtggccggattggataaggaggcggacctggtgcacatggaggtgcggaccacggatggatatgctcactacctcacctgcaggatccaggaatgtgccgagacaactagaagtgggccttttgcccgctccattgacatcagttccctggttgtccaggatgaatatatcttcattcaggtaacaactagtggaagagccagctactacgtgtcttatcgaagagaggcctttgctcagataaagctgcctaagtactcgttgccaaaggacatgcacatcatcagtacagacgagaaccaagtatttgctgcggtccaagaatggaaccagaacgacacgtacaacctctacatctcagacacgcgtgggatttacttcactctggccatggagaacatcaagagcagcagaggtctaatggggaacatcattattgaattgtatgaggtagcaggtatcaaagggatatttctggcaaacaagaaggtggacgaccaggtgaagacatacatcacttacaacaaaggcagggattggcgcctgctgcaagctccggatgtggacctgagaggaagcccagtgcactgcctgctgcccttctgttccttacatctgcacctgcaactctctgaaaatccatattcctcaggaagaatctctagcaaggagacagccccaggacttgtggtggctacaggcaacattggcccggagctctcatatactgatattggtgtgttcatctcctccgatgggggcaacacatggagacagatctttgatgaagagtacaatgtctggttcctagactggggtggtgccctcgtggccatgaaacacacacctctgccagtcaggcatttgtgggtgagttttgatgagggccactcttgggacaagtatggtttcacttcggttcctctctttgttgacggggctctggtggaggcaggaatggagacccacatcatgacagtttttggccacttcagcctccgctccgaatggcaattggtgaaagtggactacaaatctatcttcagccggcattgcaccaaggaggactatcagacctggcacctgctcaatcagggagagccttgtgtcatgggagaaaggaaaatattcaagaaacgtaagccaggagctcagtgtgccctgggccgagaccactcaggatcagtggtctcagaaccctgtgtctgtgccaattgggacttcgagtgtgactatgggtatgagagacatggggagagccagtgtgtcccagctttctggtacaatccagcatccccatcaaaggactgcagccttggtcaaagctaccttaacagcactgggtatcggcggattgtgtccaacaactgcacagatgggctaagggagaagtacaccgccaaggcccagatgtgccctggaaaagcccctcggggcctccatgtggtgacgaccgatgggcggctggtggcagagcaggggcacaatgcaactttcatcatcctcatggaggagggtgatctacaaaggacaaacatccagcttgactttggggatgggattgctgtgtcctacgcaaacttcagccccatcgaggacggcatcaagcacgtgtataagagtgcggggatcttccaggtgacagcctatgcagagaacaaccttggctcagacacagctgtcctcttcctgcatgtggtttgtcctgtggagcatgttcatctccgagttccatttgttgccataagaaataaggaggtcaacatcagtgcagtcgtgtggcccagtcaactggggacccttacctatttctggtggttcggcaatagcacaaagcctctcatcactttggacagcagcatttccttcacattccttgcagaaggaaccgacaccatcacagtccaggtggctgctgggaatgccctcatccaggacacaaaagagattgcagttcatgaatatttccagtcccagcttttatcattctctcctaatctggattaccacaatcctgacattcctgagtggagaaaagatattggcaatgtcatcaagcgagctctggttaaagtaaccagtgtcccagaggaccagatcctcattgccgtgtttcctggtctccccacttcagcagagcttttcattcttccacccaagaacctgacagagaggaggaaaggcaatgaaggggacctggaacaaattgtagaaacactgtttaatgctctcaaccaaaatttggtccagtttgagctgaagccgggggtacaagtcattgtgtatgtcacacagctgacgttagctccattggtggactccagtgctgggcacagcagctcagccatgcttatgctattatcagtggtatttgttggcctggctgtgtttttgatctacaagtttaaaaggaaaatcccttggattaacatctatgctcaagtccaacacgacaaggagcaggagatgattgggtcagtgagccaaagtgaaaacgcccccaaaatcacactcagtgactttacggagcctgaggagctgctggacaaagagctggacacgcgggtcataggaggcattgccactattgcaaacagcgaaagcacaaaggagatccccaactgcactagtgtttaataccagcaagccacgtggtcaaccacctttctgactttttatttttgatgattactattactattattatggaaaaattaaaatgtcttttttaccttttgtttaccaagggccccttcataaatagcaggcaaatgcctagctttgggagaaaagggcattcttagctgattgaaatgagacaaagggaataaatggctgtatttgtgctaagagcaaaggatgcatcttcccacagcctcctcgctttactctgccattggtagcttaaagactttctttttccttgtggtctcccttttttcaaaattgaagttgggttggctctttgtgaacctctcatccccacagcagaatcaccaacactctccgcttcccccagcacacacacatacaacacagatcatttcccagttagatccgcaggaagtaggttggtgggggtggatgtagctgcagaaagcatgcacaactttgtgaaagaggccctgccttgtgcatgtccatagtgaggctacagatggcttattgtatataattacaatgtaaatagctttttatttcctaagaaataatttaatgtttagtaaaaaagaaaacagaaaaaagaaagatgcgtgtgttggcttacgcactggccctcagagctgaccaacccgccaggcctgctcaatgcattgggtttggatgctctcctgttgtctgtcacacttaactcttgcatctccttgtccatgccatagctggtttctacttatgtatataaaggggggtggggggaggggcttctctggggcaattgataaaggaaggactctagtgacatcatagaacatggcagtcgtttttgttccaagaatgatatgaaaggtgaagaagaggcccactagaggcttcatactgagacccagatgggggaaaacagcttcctctctaaaaggaaaaacttgatatttatcagtctgagaaaatatttttttctaaagaaggcagtcagtggatcttaaaatgacaatctgtttttaaattggattctatgaaaatgcataatgcttatggtgaattctcaggctattctgagctcagaaaagtcccctgggcactaggtaaagcccagtgaatgtctcttggcatgggaggagttaaagaggttggaagggaagaggcatttgtggaattatgagttcatgcaaaactctccaggccaagtaggggtctagcctttaatgatattagtcaaaggcaattttagcaaagctgtgctatttgcttgtcagatgtacacaacttccttaaagtcaaatgtctgccttcagttcccttaaggtagttcttgcctctggggtgagtggctttcaaagccttttagcttttccagcacctcagccccttcacacatttacacataccaatttttttcaatagggtcacgttaagccatgctgtaagcattgtttttattttcaggcttagcctgagcacacttatttttgaaaatgatataatgtatatatatgggaggaaaggccacattttgtacctgttaatttttgtgggatgttgttcccattcttctttgtgagacagagagaatgtgatatagagaaatctggctggctacagtgtagatcagtattaggaatatttctaaagatcctgcttttttgtttcaagggttaaatggggcagacaattgcaatacttgtactaaacactggaatacaaatgcatgactcatatctatatatacagtatatgtacatatactgttcttggttttattgttccacttgaatatttctactgtaaaaaaaagacagtggttttgaaattgttgaaaataaatgtatttttgtacatc

SEQ ID NO: 20108 - DNA, 458 bp, Homo sapiens
  misc_feature 1..458: note = ENST00000393176
  source 1..458: mol_type = unassigned DNA
gaaaatccatattcctcaggaagaatctctagcaaggagacagccccaggacttgtggtggctacaggcaacattggcccggagctctcatatactgatattggtgtgttcatctcctccgatgggggcaacacatggagacagatctttgatgaagagtacaatgtctggttcctagactggggtggtgccctcgtggccatgaaacacacacctctgccagtcaggcatttgtgggtgagttttgatgagggccactcttgggacaagtatggtttcacttcggttcctctctttgttgacggggctctggtggaggcaggaatggagacccacatcatgactgactatgggtatgagagacatggggagagccagtgtgtcccagctttctggtacaatccagcatccccatcaaaggactgcagccttggtcaaagctaccttaacagcactgg

SEQ ID NO: 20109 - DNA, 5530 bp, Homo sapiens
  misc_feature 1..5530: note = ENST00000369699
  source 1..5530: mol_type = unassigned DNA
atggaggcggcgcgcacggagcgccccgcaggcaggccgggggcgccgcttgtccggacggggctcctactcttgtcgacgtgggtcctggccggcgccgagatcacttgggacgcgacaggcggtcccggacgcccggcggccccggcttcgcggccaccggcgttgtctccactctcgccgcgggcagtggccagccagtggccggaggagctggcgtcggcgcggagagccgccgtgctggggcgccgggccggaccagagctgctgccccagcagggcggcggcagaggcggtgagatgcaggtggaagccggagggacatcaccggcaggcgagcggcggggccggggcatcccagctcctgccaagcttggcggcgcgaggaggagtcgccgggcgcagcccccaatcacccaggaacgcggggacgcctgggccactgctccggccgatggttccagaggaagccgtccccttgctaagggttcccgggaggaggtgaaggcgccgcgggctggggggtcggcggctgaagacctccggctgcccagcacctccttcgcgctgaccggggactcggcccacaaccaagccatggtgcactggtcgggacacaactcctctgtcatacttatcctgacgaagctgtatgacttcaacctgggcagcgtgactgagagttcactatggaggtcgacagattatggcaccacctatgaaaagctgaatgacaaagtgggtttgaagactgtcctcagttacctctatgtcaatccaaccaacaaaaggaagattatgcttctcagtgatcctgagatggagagcagcatattgatcagctcagacgaaggggcgacctatcagaagtatcggctcaccttctatatccagagcctgctctttcatcccaagcaagaggactgggtgctggcctacagtttggatcaaaagctctacagctccatggactttggaagacggtggcaactcatgcatgaacgcatcacacccaacaggttttattggtcggtggccggattggataaggaggcggacctggtgcacatggaggtgcggaccacggatggatatgctcactacctcacctgcaggatccaggaatgtgccgagacaactagaagtgggccttttgcccgctccattgacatcagttccctggttgtccaggatgaatatatcttcattcaggtaacaactagtggaagagccagctactacgtgtcttatcgaagagaggcctttgctcagataaagctgcctaagtactcgttgccaaaggacatgcacatcatcagtacagacgagaaccaagtatttgctgcggtccaagaatggaaccagaacgacacgtacaacctctacatctcagacacgcgtgggatttacttcactctggccatggagaacatcaagagcagcagaggtctaatggggaacatcattattgaattgtatgaggtagcaggtatcaaagggatatttctggcaaacaagaaggtggacgaccaggtgaagacatacatcacttacaacaaaggcagggattggcgcctgctgcaagctccggatgtggacctgagaggaagcccagtgcactgcctgctgcccttctgttccttacatctgcacctgcaactctctgaaaatccatattcctcaggaagaatctctagcaaggagacagccccaggacttgtggtggctacaggcaacattggcccggagctctcatatactgatattggtgtgttcatctcctccgatgggggcaacacatggagacagatctttgatgaagagtacaatgtctggttcctagactggggtggtgccctcgtggccatgaaacacacacctctgccagtcaggcatttgtgggtgagttttgatgagggccactcttgggacaagtatggtttcacttcggttcctctctttgttgacggggctctggtggaggcaggaatggagacccacatcatgacagtttttggccacttcagcctccgctccgaatggcaattggtgaaagtggactacaaatctatcttcagccggcattgcaccaaggaggactatcagacctggcacctgctcaatcagggagagccttgtgtcatgggagaaaggaaaatattcaagaaacgtaagccaggagctcagtgtgccctgggccgagaccactcaggatcagtggtctcagaaccctgtgtctgtgccaattgggacttcgagtgtgactatgggtatgagagacatggggagagccagtgtgtcccagctttctggtacaatccagcatccccatcaaaggactgcagccttggtcaaagctaccttaacagcactgggtatcggcggattgtgtccaacaactgcacagatgggctaagggagaagtacaccgccaaggcccagatgtgccctggaaaagcccctcggggcctccatgtggtgacgaccgatgggcggctggtggcagagcaggggcacaatgcaactttcatcatcctcatggaggagggtgatctacaaaggacaaacatccagcttgactttggggatgggattgctgtgtcctacgcaaacttcagccccatcgaggacggcatcaagcacgtgtataagagtgcggggatcttccaggtgacagcctatgcagagaacaaccttggctcagacacagctgtcctcttcctgcatgtggtttgtcctgtggagcatgttcatctccgagttccatttgttgccataagaaataaggaggtcaacatcagtgcagtcgtgtggcccagtcaactggggacccttacctatttctggtggttcggcaatagcacaaagcctctcatcactttggacagcagcatttccttcacattccttgcagaaggaaccgacaccatcacagtccaggtggctgctgggaatgccctcatccaggacacaaaagagattgcagttcatgaatatttccagtcccagcttttatcattctctcctaatctggattaccacaatcctgacattcctgagtggagaaaagatattggcaatgtcatcaagcgagctctggttaaagtaaccagtgtcccagaggaccagatcctcattgccgtgtttcctggtctccccacttcagcagagcttttcattcttccacccaagaacctgacagagaggaggaaaggcaatgaaggggacctggaacaaattgtagaaacactgtttaatgctctcaaccaaaatttggtccagtttgagctgaagccgggggtacaagtcattgtgtatgtcacacagctgacgttagctccattggtggactccagtgctgggcacagcagctcagccatgcttatgctattatcagtggtatttgttggcctggctgtgtttttgatctacaagtttaaaaggaaaatcccttggattaacatctatgctcaagtccaacacgacaaggagcaggagatgattgggtcagtgagccaaagtgaaaacgcccccaaaatcacactcagtgactttacggagcctgaggagctgctggacaaagagctggacacgcgggtcataggaggcattgccactattgcaaacagcgaaagcacaaaggagatccccaactgcactagtgtttaataccagcaagccacgtggtcaaccacctttctgactttttatttttgatgattactattactattattatggaaaaattaaaatgtcttttttaccttttgtttaccaagggccccttcataaatagcaggcaaatgcctagctttgggagaaaagggcattcttagctgattgaaatgagacaaagggaataaatggctgtatttgtgctaagagcaaaggatgcatcttcccacagcctcctcgctttactctgccattggtagcttaaagactttctttttccttgtggtctcccttttttcaaaattgaagttgggttggctctttgtgaacctctcatccccacagcagaatcaccaacactctccgcttcccccagcacacacacatacaacacagatcatttcccagttagatccgcaggaagtaggttggtgggggtggatgtagctgcagaaagcatgcacaactttgtgaaagaggccctgccttgtgcatgtccatagtgaggctacagatggcttattgtatataattacaatgtaaatagctttttatttcctaagaaataatttaatgtttagtaaaaaagaaaacagaaaaaagaaagatgcgtgtgttggcttacgcactggccctcagagctgaccaacccgccaggcctgctcaatgcattgggtttggatgctctcctgttgtctgtcacacttaactcttgcatctccttgtccatgccatagctggtttctacttatgtatataaaggggggtggggggaggggcttctctggggcaattgataaaggaaggactctagtgacatcatagaacatggcagtcgtttttgttccaagaatgatatgaaaggtgaagaagaggcccactagaggcttcatactgagacccagatgggggaaaacagcttcctctctaaaaggaaaaacttgatatttatcagtctgagaaaatatttttttctaaagaaggcagtcagtggatcttaaaatgacaatctgtttttaaattggattctatgaaaatgcataatgcttatggtgaattctcaggctattctgagctcagaaaagtcccctgggcactaggtaaagcccagtgaatgtctcttggcatgggaggagttaaagaggttggaagggaagaggcatttgtggaattatgagttcatgcaaaactctccaggccaagtaggggtctagcctttaatgatattagtcaaaggcaattttagcaaagctgtgctatttgcttgtcagatgtacacaacttccttaaagtcaaatgtctgccttcagttcccttaaggtagttcttgcctctggggtgagtggctttcaaagccttttagcttttccagcacctcagccccttcacacatttacacataccaatttttttcaatagggtcacgttaagccatgctgtaagcattgtttttattttcaggcttagcctgagcacacttatttttgaaaatgatataatgtatatatatgggaggaaaggccacattttgtacctgttaatttttgtgggatgttgttcccattcttctttgtgagacagagagaatgtgatatagagaaatctggctggctacagtgtagatcagtattaggaatatttctaaagatcctgcttttttgtttcaagggttaaatggggcagacaattgcaatacttgtactaaacactggaatacaaatgcatgactcatatctatatatacagtatatgtacatatactgttcttggttttattgttccacttgaatatttctactgtaaaaaaaagacagtggttttgaaattgttgaaaataaatgtatttttgtacatc

SEQ ID NO: 20110 - DNA, 8517 bp, Homo sapiens
  misc_feature 1..8517: note = ENST00000426016
  source 1..8517: mol_type = unassigned DNA
agtagcgagcaggttcagttcgctagtaggaagctccagcgctacaccgccgcccctctccccgcccagaggcgccccgggggcaccatgcaggcgcagcagctgccctacgagtttttcagcgaagagaacgcgcccaagtggcggggactactggtgcctgcgctgaaaaaggtccaggggcaagttcatcctactctcgagtctaatgatgatgctcttcagtatgttgaagaattaattttgcaattattaaatatgctatgccaagctcagccccgaagtgcttcagatgtagaggaacgtgttcaaaaaagtttccctcatccaattgataaatgggcaatagctgatgcccaatcagctattgaaaagaggaagcgaagaaaccctttatctctcccagtagaaaaaattcatcctttattaaaggaggtcctaggttataaaattgaccaccaggtttctgtttacatagtagcagtcttagaatacatttctgcagacattttaaagctggttgggaattatgtaagaaatatacggcattatgaaattacaaaacaagatattaaagtggcaatgtgtgctgacaaggtattgatggatatgtttcatcaagatgtagaagatattaatatattatctttaactgacgaagagccttccacctcaggagaacaaacttactatgatttggtaaaagcatttatggcagaaattcgacaatatataagggaactaaatctaattataaaagtttttagagagccctttgtctccaattcaaaattgttttcagctaatgatgtagaaaatatatttagtcgcatagtagatatacatgaacttagtgtaaagttactgggccatatagaagatacagtagaaatgacagatgaaggcagtccccatccactagtaggaagctgctttgaagacttagcagaggaactggcatttgatccatatgaatcgtatgctcgagatattttgcgacctggttttcatgatcgtttccttagtcagttatcaaagcctggggcagcactttatttgcagtcaataggcgaaggtttcaaagaagctgttcaatatgttttacccaggctgcttctggcccctgtttaccactgtctccattactttgaacttttgaagcagttagaagaaaaaagtgaagatcaagaagacaaggaatgtttaaaacaagcaataacagctttgcttaatgttcagagtggtatggaaaaaatatgttctaaaagtcttgcaaaacgaagactgagtgaatctgcatgtcggttttatagtcagcaaatgaaggggaaacaactagcaatcaagaagatgaacgagattcagaagaatattgatggttgggagggaaaagacattggacagtgttgtaatgaatttataatggaaggaactcttacacgtgtaggagccaaacatgagagacacatatttctctttgatggcttaatgatttgctgtaaatcaaatcatgggcagccaagacttcctggtgctagcaatgcagaatatcgtcttaaagaaaagttttttatgcgaaaggtacaaattaatgataaagatgacaccaatgaatacaagcatgcttttgaaataattttaaaagatgaaaatagtgttatattttctgccaagtcagctgaagagaaaaacaattggatggcagcattgatatctttacagtaccggagtacactggaaaggatgcttgatgtaacaatgctacaggaagagaaagaggagcagatgaggctgcctagtgctgatgtttatagatttgcagagcctgactctgaagagaatattatatttgaagagaacatgcagcccaaggctggaattccaattatcaaagcaggaactgttattaaacttatagagaggcttacgtaccatatgtacgcagatcccaattttgttcggacatttcttacaacatacagatccttttgcaaacctcaagaactactgagtcttataatagaaaggtttgaaattccagagcctgagccaacagaagctgatcgcatagctatagagaatggagatcaacccttgagtgcagaactgaaaagatttagaaaagaatatatacagcctgtgcaactgcgagtattaaatgtatgtcggcactgggtagagcaccacttctatgattttgaaagagatgcatatcttttgcaacgaatggaagaatttattggaacagtaagaggtaaagcaatgaaaaaatgggttgaatccatcactaaaataatccaaaggaaaaaaattgcaagagacaatggaccaggtcataatattacatttcagagttcacctcccacagttgagtggcatataagcagacctgggcacatagagacttttgacctgctcaccttacacccaatagaaattgctcgacaactcactttacttgaatcagatctataccgagctgtacagccatcagaattagttggaagtgtgtggacaaaagaagacaaagaaattaactctcctaatcttctgaaaatgattcgacataccaccaacctcactctgtggtttgagaaatgtattgtagaaactgaaaatttagaagaaagagtagctgtggtgagtcgaattattgagattctacaagtctttcaagagttgaacaactttaatggtgtccttgaggttgtcagtgctatgaattcatcacctgtttacagactagaccacacatttgagcaaataccaagtcgccagaagaaaattttagaagaagctcatgaattgagtgaagatcactataagaaatatttggcaaaactcaggtctattaatccaccatgtgtgcctttctttggaatttatctcactaatatcttgaaaacagaagaaggcaaccctgaggtcctaaaaagacatggaaaagagcttataaactttagcaaaaggaggaaagtagcagaaataacaggagagatccagcagtaccaaaatcagccttactgtttacgagtagaatcagatatcaaaaggttctttgaaaacttgaatccgatgggaaatagcatggagaaggaatttacagattatcttttcaacaaatccctagaaatagaaccacgaaaccctaagcctctcccaagatttccaaaaaaatatagctatcccctaaaatctcctggtgttcgtccatcaaacccaagaccaggtaccatgaggcatcccacacctctgcagcaggagccaaggaaaattagttatagtaggatccctgaaagtgaaacagaaagtacagcatctgcaccaaattctccaagaacaccgttaacacctccgcctgcttctggtgcttccagtaccacagatgtttgcagtgtatttgattccgatcattcgagcccttttcactcaagcaatgataccgtctttatccaagttactctgccccatggcccaagatctgcttctgtatcatctataagtttaaccaaaggcactgatgaagtgcctgtccctcctcctgttcctccacgaagacgaccagaatctgccccagcagaatcttcaccatctaagattatgtctaagcatttggacagtcccccagccattcctcctaggcaacccacatcaaaagcctattcaccacgatattcaatatcagaccggacctctatctcagaccctcctgaaagccctcccttattaccaccacgagaacctgtgaggacacctgatgttttctcaagctcaccactacatctccaacctccccctttgggcaaaaaaagtgaccatggcaatgccttcttcccaaacagcccttccccctttacaccacctcctcctcaaacaccttctcctcacggcacaagaaggcatctgccatcaccaccattgacacaagaagtggaccttcattccattgctgggccgcctgttcctccacgacaaagcacttctcaacatatccctaaactccctccaaaaacttacaaaagggagcacacacacccatccatgcacagagatggaccaccactgttggagaatgcccattcttcctgagttcctctgtactgggatgtatattttcctagccccaaatccattgctggcaatggatgcactgaatgtgccagcactgaggagttaaaatgagaactccaaacactaacgactcttcttcaagatgcagtataagacaatgaattttaacctagatgtaattatacaatggaaatggtattccagtttagaatatggaaagaccgacctagaggaattggacaactgattgcacctgaaaatcataaagggactttttctggccaataggcaggagtcctctttttgtgaagtgatcttttgtgaagtgatcattaaagggatggaaaacacagtctagtgtccagcaggcccacatgacagtttttgtaattcaaattatgcacttttaaaaaaaaaaacttaaacagggatcttaatatcttcctttgttttcctttgctttactcttctactttagaatattttcttaaaaatcactcaaaggactgtgaggaaaggctgtggtacctgaccttgttgaaatcaaggcccggcactgtactacaggcctgtttacagattattacggtgaactgaatgggtaccgaggcttcaccaaagaggtacttttttgttgttgttgttgttttaggaataattgtaccaattttaagagcattccccccacctgtccccacacacccaaacaaaatgtggtggtgttgccttcaaaaaagagaagttttgtgtcattaacatgacagaagaactttttaaaaaaaaataactgtcaactattctatttgcatttaggagactgttcatctatgctagattgtcattttccctccttctcccacagaagtttactggtagtccatgtcatggctcgtagctatccctctaaccataccatggaaatgcaggcacccaatgtgaaaaggagcacttgctgggcatcactgacaccgctcatgttttacacatagttgagtaatcagcatatctagaattatcttgcattgcctaaatcatatgtatatagtgaatgttatataatatacctggcaggtctgttttaatttaattgaataaagatacaaatactttgtttggctggcatatattaaattattatatgaagaaaatggttgattcttatttcttttagttgaaaaacacacaaaaacactaaacataaaagcacgttttgtggtacgccttggtttctagttctggatatatgtattaatcttaaagaatgatctaaagtcacagcttggcatataggaagatacttggttagaataggatgggtatcttttaagcagaactttgtaagtaagttttaagttcctaagcaacaagtatacagtttgttaaggtttatattgaacattctaccttgcttgaggttttctgctttatcaaaactattcataatagaacatctacctgcatcattactatcataatatggattattcataaagcgtatgtactgttcttctgagtctaacaaatactgtgactgaaatgcatgcaccttgttgaagagaaaacattttattaatctccactataatgtctgtgaaatgtgcagtattccatccttagagagtttatctggttcatcagcatctgcatgtatcctctgaataatgaagcaacatttcagcaattctgttaaccacaccattagagacatttttagaagtgctgcaacatggtgggaacctagtactttaataatttcctatgatatttattagagcataaaatgtacatcacgatagtacagtatgtagtcctttaagaccagaaggtatgttaactgcaccatcattaagcagtctatcctattttcttatttatttgttagaattgaatcctttctcaatatctgtaccattcctatgatggtagccattcttctctttataaaatatttcctctttgaaaagcgtcctaaaacattaatttcaaatcccctcttggatgcaaagtgtccctaagaccatccattcaacagtatttatgtgagccaacttactagagccgctacaactaatcatgatagacagtccagaatctccctggactttatactgggccagcctcattgtccctaagatttctctttttatgtctcatggattacttctctttttaattgccccaggcacattccaaatgagaacctggtaaaagtcacattggacccccttcagtatgtcttcggctaatgtgttagccttcaataaggtgataaccccttttcaacctatctagtctataaagaggaaaaattcagatttggagttctaatcctatttctcccaaagggaactattcttctaccccatggttctaggagaccacttcactgtgcaacagttttacatgcattgtggatggaggatatttttattctgaactgttacatttaggtaaaaatattttctgcagtggtaactgattagaaaaatgccaattggatgcccttaggtggaggtgagaaaatggcatccttgccttcttctcaatatgaaacattaactagttgacaaatttatccttgtagtaatgaaaatctatttaatcagggaccagaaatggctgaggagataaatgcatcattacaaaattctgcttttgaatcctggacattacaagggggtaaatgcagcatgactttttgttaaccacattccaaaatgtggaacatttcttttagaaatgaaaatatttcaaggctgatgtattttaagactacacattatcaggaaacatacattgagagttcgcttaattaaaggttgttgggcatcaaattatgtttagtaggttactattctctaacaactcaaggatgctttaatggatctgaatttgacaaagagcatgccacactaatactacagtcaacaacagcccagagaacaattactatgtcagctggaggctatattatgattctaaattcttaaaggtttttttccctccataaatcaaaaattaccttatgtaaaccaaaaattagttggtatttatggtcatgatcttaattctcaagtttagcttaatcttgtatttcattgtttgtcttctaatatgacagcttaaattcagatttttaagtgactcagcaaaataggaggagtgtcccaatttattagtgttgtacatattgaagaaaacctttttgttccttcagatttagaaagaaacagtttaaccatttatttcttggtattctgctgctgtgaataggtttacttattcttttaacatatattgtgtgactacgcaagtataggtcctgttgtattgcattaatctttaccagtaactaaacatcacaaggttaatattggtttggctgaaagaattatgcagtaaagttatttataagggaacatgatgactttattcaatatttttcttctttgaaacatctcattactaacttttaagattatttcataatcccttatacatgagccaatgaaatattttgagctctacttaagaagcatgaagtctatattataaatctaaacaacaaaagcacttgtaacttgtttagtaaattccatgccttattttccatttttgacaccgtaaagtgcattttctgtcgactgtgagcaaatttcccttttgcctttaatgaaaatagtgcattaagtagccaattgctgcagaattataaagcaaattagctaacagtgggtcacattggactaccactcaaagaaacaagatgcataacagatgatggaaggtacatgtggtgtggcttagggagagcgcacctgtgccagatgcatgccactttcagtagctgccaaatgtgcctttaattaagaacatctctaatttttttcttcagatcaagtcagcatttggggtcgggatttgggcagggaactttggggtgcaaatatctggtgaaaccaccagagaatttgtttgtcaaagtgacatgtataattttagttgagacgtgtttgtgtatatatgtgtatttgcctttgtttagtagcacggttatttgctaaaataattgtcaaaaaattgctctgtcggtcggtctttgatgtaagaacaaagtgtggtctatacatctaatatggcctttgtacctaaccatgttcataggtaatctttgtactctgtgtgcagcagtatttggtttgcatttaaagtgaaaataacggctgttatttttctggcattactaagataaactgaaaaataataaagaaaaatgccttacatagcccacaagtgtattatttttgcatgtatttattttagagggcagtatttttgaaatcattagtgattctcatttagctcatatatgccatatagaaatattttgcatttttattgtggtctttctttggaggcacttttttcctgtatcaagttataaaa

SEQ ID NO: 20111 - DNA, 4123 bp, Homo sapiens
  misc_feature 1..4123: note = ENST00000395038
  source 1..4123: mol_type = unassigned DNA
ccccgcccagaggcgccccgggggcaccatgcaggcgcagcagctgccctacgagtttttcagcgaagagaacgcgcccaagtggcggggactactggtgcctgcgctgaaaaaggtccaggggcaagttcatcctactctcgagtctaatgatgatgctcttcagtatgttgaagaattaattttgcaattattaaatatgctatgccaagctcagccccgaagtgcttcagatgtagaggaacgtgttcaaaaaagtttccctcatccaattgataaatgggcaatagctgatgcccaatcagctattgaaaagaggaagcgaagaaaccctttatctctcccagtagaaaaaattcatcctttattaaaggaggtcctaggttataaaattgaccaccaggtttctgtttacatagtagcagtcttagaatacatttctgcagacattttaaagctggttgggaattatgtaagaaatatacggcattatgaaattacaaaacaagatattaaagtggcaatgtgtgctgacaaggtattgatggatatgtttcatcaagatgtagaagatattaatatattatctttaactgacgaagagccttccacctcaggagaacaaacttactatgatttggtaaaagcatttatggcagaaattcgacaatatataagggaactaaatctaattataaaagtttttagagagccctttgtctccaattcaaaattgttttcagctaatgatgtagaaaatatatttagtcgcatagtagatatacatgaacttagtgtaaagttactgggccatatagaagatacagtagaaatgacagatgaaggcagtccccatccactagtaggaagctgctttgaagacttagcagaggaactggcatttgatccatatgaatcgtatgctcgagatattttgcgacctggttttcatgatcgtttccttagtcagttatcaaagcctggggcagcactttatttgcagtcaataggcgaaggtttcaaagaagctgttcaatatgttttacccaggctgcttctggcccctgtttaccactgtctccattactttgaacttttgaagcagttagaagaaaaaagtgaagatcaagaagacaaggaatgtttaaaacaagcaataacagctttgcttaatgttcagagtggtatggaaaaaatatgttctaaaagtcttgcaaaacgaagactgagtgaatctgcatgtcggttttatagtcagcaaatgaaggggaaacaactagcaatcaagaagatgaacgagattcagaagaatattgatggttgggagggaaaagacattggacagtgttgtaatgaatttataatggaaggaactcttacacgtgtaggagccaaacatgagagacacatatttctctttgatggcttaatgatttgctgtaaatcaaatcatgggcagccaagacttcctggtgctagcaatgcagaatatcgtcttaaagaaaagttttttatgcgaaaggtacaaattaatgataaagatgacaccaatgaatacaagcatgcttttgaaataattttaaaagatgaaaatagtgttatattttctgccaagtcagctgaagagaaaaacaattggatggcagcattgatatctttacagtaccggagtacactggaaaggatgcttgatgtaacaatgctacaggaagagaaagaggagcagatgaggctgcctagtgctgatgtttatagatttgcagagcctgactctgaagagaatattatatttgaagagaacatgcagcccaaggctggaattccaattatcaaagcaggaactgttattaaacttatagagaggcttacgtaccatatgtacgcagatcccaattttgttcggacatttcttacaacatacagatccttttgcaaacctcaagaactactgagtcttataatagaaaggtttgaaattccagagcctgagccaacagaagctgatcgcatagctatagagaatggagatcaacccttgagtgcagaactgaaaagatttagaaaagaatatatacagcctgtgcaactgcgagtattaaatgtatgtcggcactgggtagagcaccacttctatgattttgaaagagatgcatatcttttgcaacgaatggaagaatttattggaacagtaagaggtaaagcaatgaaaaaatgggttgaatccatcactaaaataatccaaaggaaaaaaattgcaagagacaatggaccaggtcataatattacatttcagagttcacctcccacagttgagtggcatataagcagacctgggcacatagagacttttgacctgctcaccttacacccaatagaaattgctcgacaactcactttacttgaatcagatctataccgagctgtacagccatcagaattagttggaagtgtgtggacaaaagaagacaaagaaattaactctcctaatcttctgaaaatgattcgacataccaccaacctcactctgtggtttgagaaatgtattgtagaaactgaaaatttagaagaaagagtagctgtggtgagtcgaattattgagattctacaagtctttcaagagttgaacaactttaatggtgtccttgaggttgtcagtgctatgaattcatcacctgtttacagactagaccacacatttgagcaaataccaagtcgccagaagaaaattttagaagaagctcatgaattgagtgaagatcactataagaaatatttggcaaaactcaggtctattaatccaccatgtgtgcctttctttggaatttatctcactaatatcttgaaaacagaagaaggcaaccctgaggtcctaaaaagacatggaaaagagcttataaactttagcaaaaggaggaaagtagcagaaataacaggagagatccagcagtaccaaaatcagccttactgtttacgagtagaatcagatatcaaaaggttctttgaaaacttgaatccgatgggaaatagcatggagaaggaatttacagattatcttttcaacaaatccctagaaatagaaccacgaaaccctaagcctctcccaagatttccaaaaaaatatagctatcccctaaaatctcctggtgttcgtccatcaaacccaagaccaggtaccatgaggcatcccacacctctgcagcaggagccaaggaaaattagttatagtaggatccctgaaagtgaaacagaaagtacagcatctgcaccaaattctccaagaacaccgttaacacctccgcctgcttctggtgcttccagtaccacagatgtttgcagtgtatttgattccgatcattcgagcccttttcactcaagatctgcttctgtatcatctataagtttaaccaaaggcactgatgaagtgcctgtccctcctcctgttcctccacgaagacgaccagaatctgccccagcagaatcttcaccatctaagattatgtctaagcatttggacagtcccccagccattcctcctaggcaacccacatcaaaagcctattcaccacgatattcaatatcagaccggacctctatctcagaccctcctgaaagccctcccttattaccaccacgagaacctgtgaggacacctgatgttttctcaagctcaccactacatctccaacctccccctttgggcaaaaaaagtgaccatggcaatgccttcttcccaaacagcccttccccctttacaccacctcctcctcaaacaccttctcctcacggcacaagaaggcatctgccatcaccaccattgacacaagaagtggaccttcattccattgctgggccgcctgttcctccacgacaaagcacttctcaacatatccctaaactccctccaaaaacttacaaaagggagcacacacacccatccatgcacagagatggaccaccactgttggagaatgcccattcttcctgagttcctctgtactgggatgtatattttcctagccccaaatccattgctggcaatggatgcactgaatgtgccagcactgaggagttaaaatgagaactccaaacactaacgactcttcttcaagatgcagtataagac

SEQ ID NO: 20112 - DNA, 523 bp, Homo sapiens
  misc_feature 1..523: note = ENST00000469581
  source 1..523: mol_type = unassigned DNA
tggtttattgaacagcttttggtatttctacacattacttttaattataagcaatttccagctaagacttttcaaggtaaataaatgaaataaaattcctgtggactttttcttaaaaatttaacatcccacaggatctgcttctgtatcatctataagtttaaccaaaggcactgatgaagtgcctgtccctcctcctgttcctccacgaagacgaccagaatctgccccagcagaatcttcaccatctaagattatgtctaagcatttggacagtcccccagccattcctcctaggcaacccacatcaaaagcctattcaccacgatattcaatatcagaccggacctctatctcagaccctcctgaaagccctcccttattaccaccacgagaacctgtgaggacacctgatgttttctcaagctcaccactacatctccaacctccccctttgggcaaaaaaagtgaccatggcaatgccttcttcccaaacagcccttccccctttacaccacctcct

SEQ ID NO: 20113 - DNA, 672 bp, Homo sapiens
  misc_feature 1..672: note = ENST00000474390
  source 1..672: mol_type = unassigned DNA
aaagacctccatacattccacaagatagtggcctcaccagttaattctgatgctaatagaggatgcaccaaatatagtaggaaaatgattgtttgactgtaccagtctagaagacgggaaagagcagtatgcctgactggaggcactgccttccttctatcagtcaccctgaatgtgtcttctctatagtagttatactatcgccacccccctactctctacattattttatttactaaattctttaagctataactttattggaaaaactctaaaacctttagttcactttttttttattcccagatgtattgtagaaactgaaaatttagaagaaagagtagctgtggtgagtcgaattattgagattctacaagtctttcaagagttgaacaactttaatggtgtccttgaggttgtcagtgctatgaattcatcacctgtttacagactagaccacacatttgagcaaataccaagtcgccagaagaaaattttagaagaagctcatgaattgagtgaagatcactataagaaatatttggcaaaactcaggtctattaatccaccatgtgtgcctttctttggaatttatctcactaatatcttgaaaacagaagaaggcaaccctgaggtcctaaaaagacatggaaaagagcttataaactttag

SEQ ID NO: 20114 - DNA, 396 bp, Homo sapiens
  misc_feature 1..396: note = ENST00000472480
  source 1..396: mol_type = unassigned DNA
cattttccttgcatactcccagacaagacctcctgagagtcaactgtgaatctgcatgtcggttttatagtcagcaaatgaaggggaaacaactagcaatcaagaagatgaacgagattcagaagaatattgatggttgggagggaaaagacattggacagtgttgtaatgaatttataatggaaggaactcttacacgtgtaggagccaaacatgagagacacatatttctctttgatggcttaatgatttgctgtaaatcaaatcatgggcagccaagacttcctggtgctagcaatgcagaatatcgtcttaaagaaaagttttttatgcgaaaggtacaaattaatgataaagatgacaccaatgaatacaagcatgcttttgaaataattt

SEQ ID NO: 20115 - DNA, 441 bp, Homo sapiens
  misc_feature 1..441: note = ENST00000461545
  source 1..441: mol_type = unassigned DNA
attggctcaaaatttgtttaatattataataatacagcctcactgaattaatgtgttttcccccaaacaggatgtagaaaatatatttagtcgcatagtagatatacatgaacttagtgtaaagttactgggccatatagaagatacagtagaaatgacagatgaaggcagtccccatccactagtaggaagctgctttgaagacttagcagaggaactggcatttgatccatatgaatcgtatgctcgagatattttgcgacctggttttcatgatcgtttccttagtcagttatcaaagcctggggcagcactttatttgcagtcaataggcgaaggtttcaaagaagctgttcaatatgttttacccaggctgcttctggcccctgtttaccactgtctccattactttgaacttttgaagcagttagaagaaaaaag

SEQ ID NO: 20116 - DNA, 579 bp, Homo sapiens
  misc_feature 1..579: note = ENST00000451331
  source 1..579: mol_type = unassigned DNA
aagaagcctctgcgcctgcgccagggcgcacccgtcggcggtaaaagctgaggggctggcgcgggggattggtgggcgacacttttacgtctacacgtgcctacccgtctgcacgtttctgagtccgcacggttgtcttctcttgctgaatggacataggtgttttgttttgtcccaagagatacaggtccaggggcaagttcatcctactctcgagtctaatgatgatgctcttcagtatgttgaagaattaattttgcaattattaaatatgctatgccaagctcagccccgaagtgcttcagatgtagaggaacgtgttcaaaaaagtttccctcatccaattgataaatgggcaatagctgatgcccaatcagctattgaaaagaggaagcgaagaaaccctttatctctcccagtagaaaaaattcatcctttattaaaggaggtcctaggttataaaattgaccaccaggtttctgtttacatagtagcagtcttagaatacatttctgcagacattttaaagctggttgggaattatgtaagaaatatacggcattatgaaattacaaaaca

SEQ ID NO: 20117 - DNA, 8314 bp, Homo sapiens
  misc_feature 1..8314: note = ENST00000402219
  source 1..8314: mol_type = unassigned DNA
ccgccgcccctctccccgcccagaggcgccccgggggcaccatgcaggcgcagcagctgccctacgagtttttcagcgaagagaacgcgcccaagtggcggggactactggtgcctgcgctgaaaaaggtccaggggcaagttcatcctactctcgagtctaatgatgatgctcttcagtatgttgaagaattaattttgcaattattaaatatgctatgccaagctcagccccgaagtgcttcagatgtagaggaacgtgttcaaaaaagtttccctcatccaattgataaatgggcaatagctgatgcccaatcagctattgaaaagaggaagcgaagaaaccctttatctctcccagtagaaaaaattcatcctttattaaaggaggtcctaggttataaaattgaccaccaggtttctgtttacatagtagcagtcttagaatacatttctgcagacattttaaagctggttgggaattatgtaagaaatatacggcattatgaaattacaaaacaagatattaaagtggcaatgtgtgctgacaaggtattgatggatatgtttcatcaagatgtagaagatattaatatattatctttaactgacgaagagccttccacctcaggagaacaaacttactatgatttggtaaaagcatttatggcagaaattcgacaatatataagggaactaaatctaattataaaagtttttagagagccctttgtctccaattcaaaattgttttcagctaatgatgtagaaaatatatttagtcgcatagtagatatacatgaacttagtgtaaagttactgggccatatagaagatacagtagaaatgacagatgaaggcagtccccatccactagtaggaagctgctttgaagacttagcagaggaactggcatttgatccatatgaatcgtatgctcgagatattttgcgacctggttttcatgatcgtttccttagtcagttatcaaagcctggggcagcactttatttgcagtcaataggcgaaggtttcaaagaagctgttcaatatgttttacccaggctgcttctggcccctgtttaccactgtctccattactttgaacttttgaagcagttagaagaaaaaagtgaagatcaagaagacaaggaatgtttaaaacaagcaataacagctttgcttaatgttcagagtggtatggaaaaaatatgttctaaaagtcttgcaaaacgaagactgagtgaatctgcatgtcggttttatagtcagcaaatgaaggggaaacaactagcaatcaagaagatgaacgagattcagaagaatattgatggttgggagggaaaagacattggacagtgttgtaatgaatttataatggaaggaactcttacacgtgtaggagccaaacatgagagacacatatttctctttgatggcttaatgatttgctgtaaatcaaatcatgggcagccaagacttcctggtgctagcaatgcagaatatcgtcttaaagaaaagttttttatgcgaaaggtacaaattaatgataaagatgacaccaatgaatacaagcatgcttttgaaataattttaaaagatgaaaatagtgttatattttctgccaagtcagctgaagagaaaaacaattggatggcagcattgatatctttacagtaccggagtacactggaaaggatgcttgatgtaacaatgctacaggaagagaaagaggagcagatgaggctgcctagtgctgatgtttatagatttgcagagcctgactctgaagagaatattatatttgaagagaacatgcagcccaaggctggaattccaattatcaaagcaggaactgttattaaacttatagagaggcttacgtaccatatgtacgcagatcccaattttgttcggacatttcttacaacatacagatccttttgcaaacctcaagaactactgagtcttataatagaaaggtttgaaattccagagcctgagccaacagaagctgatcgcatagctatagagaatggagatcaacccttgagtgcagaactgaaaagatttagaaaagaatatatacagcctgtgcaactgcgagtattaaatgtatgtcggcactgggtagagcaccacttctatgattttgaaagagatgcatatcttttgcaacgaatggaagaatttattggaacagtaagaggtaaagcaatgaaaaaatgggttgaatccatcactaaaataatccaaaggaaaaaaattgcaagagacaatggaccaggtcataatattacatttcagagttcacctcccacagttgagtggcatataagcagacctgggcacatagagacttttgacctgctcaccttacacccaatagaaattgctcgacaactcactttacttgaatcagatctataccgagctgtacagccatcagaattagttggaagtgtgtggacaaaagaagacaaagaaattaactctcctaatcttctgaaaatgattcgacataccaccaacctcactctgtggtttgagaaatgtattgtagaaactgaaaatttagaagaaagagtagctgtggtgagtcgaattattgagattctacaagtctttcaagagttgaacaactttaatggtgtccttgaggttgtcagtgctatgaattcatcacctgtttacagactagaccacacatttgagcaaataccaagtcgccagaagaaaattttagaagaagctcatgaattgagtgaagatcactataagaaatatttggcaaaactcaggtctattaatccaccatgtgtgcctttctttggaatttatctcactaatatcttgaaaacagaagaaggcaaccctgaggtcctaaaaagacatggaaaagagcttataaactttagcaaaaggaggaaagtagcagaaataacaggagagatccagcagtaccaaaatcagccttactgtttacgagtagaatcagatatcaaaaggttctttgaaaacttgaatccgatgggaaatagcatggagaaggaatttacagattatcttttcaacaaatccctagaaatagaaccacgaaaccctaagcctctcccaagatttccaaaaaaatatagctatcccctaaaatctcctggtgttcgtccatcaaacccaagaccaggtaccatgaggcatcccacacctctgcagcaggagccaaggaaaattagttatagtaggatccctgaaagtgaaacagaaagtacagcatctgcaccaaattctccaagaacaccgttaacacctccgcctgcttctggtgcttccagtaccacagatgtttgcagtgtatttgattccgatcattcgagcccttttcactcaagcaatgataccgtctttatccaagttactctgccccatggcccaagatctgcttctgtatcatctataagtttaaccaaaggcactgatgaagtgcctgtccctcctcctgttcctccacgaagacgaccagaatctgccccagcagaatcttcaccatctaagattatgtctaagcatttggacagtcccccagccattcctcctaggcaacccacatcaaaagcctattcaccacgatattcaatatcagaccggacctctatctcagaccctcctgaaagccctcccttattaccaccacgagaacctgtgaggacacctgatgttttctcaagctcaccactacatctccaacctccccctttgggcaaaaaaagtgaccatggcaatgccttcttcccaaacagcccttccccctttacaccacctcctcctcaaacaccttctcctcacggcacaagaaggcatctgccatcaccaccattgacacaagaagtggaccttcattccattgctgggccgcctgttcctccacgacaaagcacttctcaacatatccctaaactccctccaaaaacttacaaaagggagcacacacacccatccatgcacagagatggaccaccactgttggagaatgcccattcttcctgagttcctctgtactgggatgtatattttcctagccccaaatccattgctggcaatggatgcactgaatgtgccagcactgaggagttaaaatgagaactccaaacactaacgactcttcttcaagatgcagtataagacaatgaattttaacctagatgtaattatacaatggaaatggtattccagtttagaatatggaaagaccgacctagaggaattggacaactgattgcacctgaaaatcataaagggactttttctggccaataggcaggagtcctctttttgtgaagtgatcttttgtgaagtgatcattaaagggatggaaaacacagtctagtgtccagcaggcccacatgacagtttttgtaattcaaattatgcacttttaaaaaaaaaaacttaaacagggatcttaatatcttcctttgttttcctttgctttactcttctactttagaatattttcttaaaaatcactcaaaggactgtgaggaaaggctgtggtacctgaccttgttgaaatcaaggcccggcactgtactacaggcctgtttacagattattacggtgaactgaatgggtaccgaggcttcaccaaagaggtacttttttgttgttgttgttgttttaggaataattgtaccaattttaagagcattccccccacctgtccccacacacccaaacaaaatgtggtggtgttgccttcaaaaaagagaagttttgtgtcattaacatgacagaagaactttttaaaaaaaaataactgtcaactattctatttgcatttaggagactgttcatctatgctagattgtcattttccctccttctcccacagaagtttactggtagtccatgtcatggctcgtagctatccctctaaccataccatggaaatgcaggcacccaatgtgaaaaggagcacttgctgggcatcactgacaccgctcatgttttacacatagttgagtaatcagcatatctagaattatcttgcattgcctaaatcatatgtatatagtgaatgttatataatatacctggcaggtctgttttaatttaattgaataaagatacaaatactttgtttggctggcatatattaaattattatatgaagaaaatggttgattcttatttcttttagttgaaaaacacacaaaaacactaaacataaaagcacgttttgtggtacgccttggtttctagttctggatatatgtattaatcttaaagaatgatctaaagtcacagcttggcatataggaagatacttggttagaataggatgggtatcttttaagcagaactttgtaagtaagttttaagttcctaagcaacaagtatacagtttgttaaggtttatattgaacattctaccttgcttgaggttttctgctttatcaaaactattcataatagaacatctacctgcatcattactatcataatatggattattcataaagcgtatgtactgttcttctgagtctaacaaatactgtgactgaaatgcatgcaccttgttgaagagaaaacattttattaatctccactataatgtctgtgaaatgtgcagtattccatccttagagagtttatctggttcatcagcatctgcatgtatcctctgaataatgaagcaacatttcagcaattctgttaaccacaccattagagacatttttagaagtgctgcaacatggtgggaacctagtactttaataatttcctatgatatttattagagcataaaatgtacatcacgatagtacagtatgtagtcctttaagaccagaaggtatgttaactgcaccatcattaagcagtctatcctattttcttatttatttgttagaattgaatcctttctcaatatctgtaccattcctatgatggtagccattcttctctttataaaatatttcctctttgaaaagcgtcctaaaacattaatttcaaatcccctcttggatgcaaagtgtccctaagaccatccattcaacagtatttatgtgagccaacttactagagccgctacaactaatcatgatagacagtccagaatctccctggactttatactgggccagcctcattgtccctaagatttctctttttatgtctcatggattacttctctttttaattgccccaggcacattccaaatgagaacctggtaaaagtcacattggacccccttcagtatgtcttcggctaatgtgttagccttcaataaggtgataaccccttttcaacctatctagtctataaagaggaaaaattcagatttggagttctaatcctatttctcccaaagggaactattcttctaccccatggttctaggagaccacttcactgtgcaacagttttacatgcattgtggatggaggatatttttattctgaactgttacatttaggtaaaaatattttctgcagtggtaactgattagaaaaatgccaattggatgcccttaggtggaggtgagaaaatggcatccttgccttcttctcaatatgaaacattaactagttgacaaatttatccttgtagtaatgaaaatctatttaatcagggaccagaaatggctgaggagataaatgcatcattacaaaattctgcttttgaatcctggacattacaagggggtaaatgcagcatgactttttgttaaccacattccaaaatgtggaacatttcttttagaaatgaaaatatttcaaggctgatgtattttaagactacacattatcaggaaacatacattgagagttcgcttaattaaaggttgttgggcatcaaattatgtttagtaggttactattctctaacaactcaaggatgctttaatggatctgaatttgacaaagagcatgccacactaatactacagtcaacaacagcccagagaacaattactatgtcagctggaggctatattatgattctaaattcttaaaggtttttttccctccataaatcaaaaattaccttatgtaaaccaaaaattagttggtatttatggtcatgatcttaattctcaagtttagcttaatcttgtatttcattgtttgtcttctaatatgacagcttaaattcagatttttaagtgactcagcaaaataggaggagtgtcccaatttattagtgttgtacatattgaagaaaacctttttgttccttcagatttagaaagaaacagtttaaccatttatttcttggtattctgctgctgtgaataggtttacttattcttttaacatatattgtgtgactacgcaagtataggtcctgttgtattgcattaatctttaccagtaactaaacatcacaaggttaatattggtttggctgaaagaattatgcagtaaagttatttataagggaacatgatgactttattcaatatttttcttctttgaaacatctcattactaacttttaagattatttcataatcccttatacatgagccaatgaaatattttgagctctacttaagaagcatgaagtctatattataaatctaaacaacaaaagcacttgtaacttgtttagtaaattccatgccttattttccatttttgacaccgtaaagtgcattttctgtcgactgtgagcaaatttcccttttgcctttaatgaaaatagtgcattaagtagccaattgctgcagaattataaagcaaattagctaacagtgggtcacattggactaccactcaaagaaacaagatgcataacagatgatggaaggtacatgtggtgtggcttagggagagcgcacctgtgccagatgcatgccactttcagtagctgccaaatgtgcctttaattaagaacatctctaatttttttcttcagatcaagtcagcatttggggtcgggatttgggcagggaactttggggtgcaaatatctggtgaaaccaccagagaatttgtttgtcaaagtgacatgtataattttagttgagacgtgtttgtgtatatatgtgtatttgcctttgtttagtagcacggttatttgctaaaataattgtcaaaaaattgctctgtcggtcggtctttgatgtaagaacaaagtgtggtctatacatctaatatggcctttgtacctaaccatgttcataggtaatctttgtactctgtgtgcagcagtatttggtttgcatttaaagtgaaaataacggctgttatttttctggcattactaagataaactgaaaaataataaagaaaaatgccttacatagccc

SEQ ID NO: 20118 - DNA, 873 bp, Homo sapiens
  misc_feature 1..873: note = ENST00000427770
  source 1..873: mol_type = unassigned DNA
ccgaggaggtgagtgcgcagcctgctcctccctggcccgcccaggcctgggaccctgctgtgaggtggagagaggcgacaccccgcccttgccccccacctggctctcctctaaaccccgttggggcaggctgagggaagaaggaaaggtgggcgttggactctttgcgaggaccccggcggctggcccgggggaggcggccgaggcggcggcggcggcggccgggggcgacatggcggaggagcaggacctatcggaggtggagctgagccccgtgggctcggaggagccccgctgcctgtccccggggagcgcgccctcgctagggcccgacggcggcggcggcggatcgggcctgcgagccagcccggggccaggcgagctgggcaaggtcaagaaggagcagcaggacggcgaggcggacgatgacaagttccccgtgtgcatccgcgaggccgtcagccaggtgctcagcggctacgactggacgctggtgcccatgcccgtgcgcgtcaacggcgccagcaaaagcaagccgcacgtcaagcggcccatgaacgccttcatggtgtgggctcaggcagcgcgcaggaagctcgcggaccagtacccgcacctgcacaacgctgagctcagcaagacgctgggcaagctctggaggctgctgaacgaaagtgacaagcgccccttcatcgaggaggctgagcggctccgtatgcagcacaagaaagaccacccggactacaagtaccagcccaggcggcggaagaacgggaaggccgcccagggcgaggcggagtgccccggtggggaggccgagcaaggtgggaccgccgccatccaggcccactacaagagcgcccacttggacca

SEQ ID NO: 20119 - DNA, 124 bp, Homo sapiens
  misc_feature 1..124: note = ENST00000470555
  source 1..124: mol_type = unassigned DNA
ccgcacaccttgggacacggttttccacttcctaaggacgagccccagactggaggagaggtccgaggaggctgctgaacgaaagtgacaagcgccccttcatcgaggaggctgagcggctccg

SEQ ID NO: 20120 - DNA, 2861 bp, Homo sapiens
  misc_feature 1..2861: note = ENST00000360880
  source 1..2861: mol_type = unassigned DNA
ggggggtgaagggtcactgctgaccggaggcagctctgccaggcagtgtcatcagtgggcttcacgtttgactgacagcccaccagcgtcacctcccagccccgagctggaccgcacaccttgggacacggttttccacttcctaaggacgagccccagactggaggagaggtccgaggaggtgggcgttggactctttgcgaggaccccggcggctggcccgggggaggcggccgaggcggcggcggcggcggccgggggcgacatggcggaggagcaggacctatcggaggtggagctgagccccgtgggctcggaggagccccgctgcctgtccccggggagcgcgccctcgctagggcccgacggcggcggcggcggatcgggcctgcgagccagcccggggccaggcgagctgggcaaggtcaagaaggagcagcaggacggcgaggcggacgatgacaagttccccgtgtgcatccgcgaggccgtcagccaggtgctcagcggctacgactggacgctggtgcccatgcccgtgcgcgtcaacggcgccagcaaaagcaagccgcacgtcaagcggcccatgaacgccttcatggtgtgggctcaggcagcgcgcaggaagctcgcggaccagtacccgcacctgcacaacgctgagctcagcaagacgctgggcaagctctggaggctgctgaacgaaagtgacaagcgccccttcatcgaggaggctgagcggctccgtatgcagcacaagaaagaccacccggactacaagtaccagcccaggcggcggaagaacgggaaggccgcccagggcgaggcggagtgccccggtggggaggccgagcaaggtgggaccgccgccatccaggcccactacaagagcgcccacttggaccaccggcacccaggagagggctcccccatgtcagatgggaaccccgagcacccctcaggccagagccatggcccacccacccctccaaccaccccgaagacagagctgcagtcgggcaaggcagacccgaagcgggacgggcgctccatgggggagggcgggaagcctcacatcgacttcggcaacgtggacattggtgagatcagccacgaggtaatgtccaacatggagacctttgatgtggctgagttggaccagtacctgccgcccaatgggcacccaggccatgtgagcagctactcagcagccggctatgggctgggcagtgccctggccgtggccagtggacactccgcctggatctccaagccaccaggcgtggctctgcccacggtctcaccacctggtgtggatgccaaagcccaggtgaagacagagaccgcggggccccaggggcccccacactacaccgaccagccatccacctcacagatcgcctacacctccctcagcctgccccactatggctcagccttcccctccatctcccgcccccagtttgactactctgaccatcagccctcaggaccctattatggccactcgggccaggcctctggcctctactcggccttctcctatatggggccctcgcagcggcccctctacacggccatctctgaccccagcccctcagggccccagtcccacagccccacacactgggagcagccagtatatacgacactgtcccggccctaaagggggccctgtcgccaccaccccccgcccagcccctgcccccagcctgtgtgccctgttccttgcccacctcaggcctggtggtggcagtggaggaggctgaggaggctgaagaggctgacaggtcggggggctttctgtctggctcactgccctgatgacccacccgccccatccaggctccagcagcaaagccccaggagaacaggctggacagaggagaaggaggttgactgttgcacccacactgaaagatgaggggctgcaccttcccccaggaatgaccctctatcccaggacctgagaagggcctgctcaccctcctcggggaggggaagcaccagggttggtggcatcggaggccttaccactcctatgactcctgttttctctctcacagatagtgagggtctgacatgcccatgccacctatgccacagtgcctaagggctaggccacccagagactgtgcccggagctggccgtgtctcccactcaggggctgagagtagctttgaggagcctcattggggagtggggggttcgagggacttagtggagttctcatcccttcaatgccccctccctttctgaaggcaggaaggagttggcacagaggccccctgatccaattctgtgccaataacctcattctttgtctgagaaacagcccccagtcctcctccactacaacctccatgaccttgagacgcatcccaggaggtgacgaggcaggggctccaggaaaggaatcagagacaattcacagagcctccctccctgggctccttgccagctccctcttcccttactaggctctatggcccctgctcagtcagccccactccctgggcttcccagagagtgacagctgctcaggccctaacccttggctccaggagacacagggcccagcacccaggttgctgtcggcaggctgaagacactagaatcctgacctgtacattctgcccttgcctcttaccccttgcctcccagtggtatttgaataaagtatgtagctatatctgcccctattttcctgttctgcagccccccaaatccacatgtaactcattactgtctcctgttatttatctcagtagtcccctctcctagccactctagcccctattaactctgcattaagcattccacataataaaattaaaggttccggttacctgcttggtga

SEQ ID NO: 20121 - DNA, 1095 bp, Homo sapiens
  misc_feature 1..1095: note = ENST00000446929
  source 1..1095: mol_type = unassigned DNA
accagtacccgcacctgcacaacgctgagctcagcaagacgctgggcaagctctggaggctgctgaacgaaagtgacaagcgccccttcatcgaggaggctgagcggctccgtatgcagcacaagaaagaccacccggactacaagtaccagcccaggcggcggaagaacgggaaggccgcccagggcgaggcggagtgccccggtggggaggccgagcaaggtgggaccgccgccatccaggcccactacaagagcgcccacttggaccaccggcacccaggagagggctcccccatgtcagatgggaaccccgagcacccctcaggccagagccatggcccacccacccctccaaccaccccgaagacagagctgcagtcgggcaaggcagacccgaagcgggacgggcgctccatgggggagggcgggaagcctcacatcgacttcggcaacgtggacattggtgagatcagccacgagatggggaaactgaagtttgcgaggctgatgctaagaagtgctggtgccagaatctgaacccagctctgactccaaggcttgcatttttaaccatcatcccctccacctgcctgtggtttgcagcccctgcttctgctttgtatctggagcaatgcatcttccactgctccagactgggcatcctcagctcccttccttccatctgcggtctccagcccctagtcaggaccaggggagaggcagggcaccaagaagtagcccagtccccagggtggccaaaatccctccatctaggacctgcatcatggaagctcttcaagcaacctccccaaaactgctggttcccgtgaagctggatggtaaccgaaaccccgatcttttagacaatatccattgcaaagtcatatccaaattgtatgtatgctgtttttgttttgttttagataaaagcaggactttacactgatctttaacagatctcaccttgttgggtttgacccatttccccacctgtattaaactttttagaacttagctctcctttagagctttatgtatctgcaaacttgaatagcctcattcaagtcactaataaaggtcgaaatgaagaggg

SEQ ID NO: 20122 - DNA, 2879 bp, Homo sapiens
  misc_feature 1..2879: note = ENST00000396884
  source 1..2879: mol_type = unassigned DNA
gggctgtccggccagggtggttggtggtaaggattcaggctccgtcctaacgaggccgtggcctgaggctcagggccccccgcccctccctcccagcccaccagcgtcacctcccagccccgagctggaccgcacaccttgggacacggttttccacttcctaaggacgagccccagactggaggagaggtccgaggaggtgggcgttggactctttgcgaggaccccggcggctggcccgggggaggcggccgaggcggcggcggcggcggccgggggcgacatggcggaggagcaggacctatcggaggtggagctgagccccgtgggctcggaggagccccgctgcctgtccccggggagcgcgccctcgctagggcccgacggcggcggcggcggatcgggcctgcgagccagcccggggccaggcgagctgggcaaggtcaagaaggagcagcaggacggcgaggcggacgatgacaagttccccgtgtgcatccgcgaggccgtcagccaggtgctcagcggctacgactggacgctggtgcccatgcccgtgcgcgtcaacggcgccagcaaaagcaagccgcacgtcaagcggcccatgaacgccttcatggtgtgggctcaggcagcgcgcaggaagctcgcggaccagtacccgcacctgcacaacgctgagctcagcaagacgctgggcaagctctggaggctgctgaacgaaagtgacaagcgccccttcatcgaggaggctgagcggctccgtatgcagcacaagaaagaccacccggactacaagtaccagcccaggcggcggaagaacgggaaggccgcccagggcgaggcggagtgccccggtggggaggccgagcaaggtgggaccgccgccatccaggcccactacaagagcgcccacttggaccaccggcacccaggagagggctcccccatgtcagatgggaaccccgagcacccctcaggccagagccatggcccacccacccctccaaccaccccgaagacagagctgcagtcgggcaaggcagacccgaagcgggacgggcgctccatgggggagggcgggaagcctcacatcgacttcggcaacgtggacattggtgagatcagccacgaggtaatgtccaacatggagacctttgatgtggctgagttggaccagtacctgccgcccaatgggcacccaggccatgtgagcagctactcagcagccggctatgggctgggcagtgccctggccgtggccagtggacactccgcctggatctccaagccaccaggcgtggctctgcccacggtctcaccacctggtgtggatgccaaagcccaggtgaagacagagaccgcggggccccaggggcccccacactacaccgaccagccatccacctcacagatcgcctacacctccctcagcctgccccactatggctcagccttcccctccatctcccgcccccagtttgactactctgaccatcagccctcaggaccctattatggccactcgggccaggcctctggcctctactcggccttctcctatatggggccctcgcagcggcccctctacacggccatctctgaccccagcccctcagggccccagtcccacagccccacacactgggagcagccagtatatacgacactgtcccggccctaaagggggccctgtcgccaccaccccccgcccagcccctgcccccagcctgtgtgccctgttccttgcccacctcaggcctggtggtggcagtggaggaggctgaggaggctgaagaggctgacaggtcggggggctttctgtctggctcactgccctgatgacccacccgccccatccaggctccagcagcaaagccccaggagaacaggctggacagaggagaaggaggttgactgttgcacccacactgaaagatgaggggctgcaccttcccccaggaatgaccctctatcccaggacctgagaagggcctgctcaccctcctcggggaggggaagcaccagggttggtggcatcggaggccttaccactcctatgactcctgttttctctctcacagatagtgagggtctgacatgcccatgccacctatgccacagtgcctaagggctaggccacccagagactgtgcccggagctggccgtgtctcccactcaggggctgagagtagctttgaggagcctcattggggagtggggggttcgagggacttagtggagttctcatcccttcaatgccccctccctttctgaaggcaggaaggagttggcacagaggccccctgatccaattctgtgccaataacctcattctttgtctgagaaacagcccccagtcctcctccactacaacctccatgaccttgagacgcatcccaggaggtgacgaggcaggggctccaggaaaggaatcagagacaattcacagagcctccctccctgggctccttgccagctccctcttcccttactaggctctatggcccctgctcagtcagccccactccctgggcttcccagagagtgacagctgctcaggccctaacccttggctccaggagacacagggcccagcacccaggttgctgtcggcaggctgaagacactagaatcctgacctgtacattctgcccttgcctcttaccccttgcctcccagtggtatttgaataaagtatgtagctatatctgcccctattttcctgttctgcagccccccaaatccacatgtaactcattactgtctcctgttatttatctcagtagtcccctctcctagccactctagcccctattaactctgcattaagcattccacataataaaattaaaggttccggttacctgcttggtga

SEQ ID NO: 20123 - DNA, 3525 bp, Homo sapiens
  misc_feature 1..3525: note = ENST00000367203
  source 1..3525: mol_type = unassigned DNA
agtcgcctcgcagcagcgagccgcgagcgcccttctccagtcccggcttggaactgaactgtgtgagcacgggtcctggaacccgggcccagaaccggcgagcccaggtctgagcccagagctcagcggtcagcctcgtaggccctgactcggaatcgagccgaggcgctgaggttggagccggagagcgtgagagccgaagagcagggagggcgggccggctgcgcgtccgacgagtcgcagagcaggaccgcggaaggcagggagacggccgcaagcccagggcagagggcagagggcagagagcggcctggctcggcggagagggcgccgcccggccggaaccaagctcgccgcccgggacggcgggccccgtggggcgcggacccagggtggccgtgggtccgcagcgactccccggccgacggcggggggcgtgccccctcccagcccagcctccccaacccggcccgcccgccgcgtcgcgggggcatgtgagcgggaagcctaggctgccagccgcgaggaccgcacggaggaggagcaggagcgcggagccgcgagccccgagccccgagcccggcgcctggctgagtagatgtccatgaggagccccatctctgcccagctggccctggatggcgttggcaccatggtgaactgcaccatcaagtcagaggagaagaaagagccttgccacgaggccccccagggctcagccactgccgctgaacctcagcctggagacccagcccgggcctcccaggatagtgctgacccccaagctccagcccaggggaatttcaggggctcctgggactgtagctctccagagggtaatgggtccccagaacccaagagaccaggagtgtcggaggctgcctctggaagccaggagaagctggacttcaaccgaaatttgaaagaagtggtgccagccatagagaagctgttgtccagtgactggaaggagaggtttctaggaaggaactctatggaagccaaagatgtcaaagggacccaagagagcctagcagagaaggagctccagcttctggtcatgattcaccagctgtccaccctgcgggaccagctcctgacagcccactcggagcagaagaacatggctgccatgctgtttgagaagcagcagcagcagatggagcttgcccggcagcagcaggagcagattgcaaagcagcagcagcagctgattcagcagcagcataagatcaacctccttcagcagcagatccagcaggttaacatgccttatgtcatgatcccagccttccccccaagccaccaacctctgcctgtcacccctgactcccagctggccttacccattcagcccattccctgcaaaccaggtgagtgtgagaagggaggttccaccactgcggccagcctgtcctgaggtcagggaaagcgccctggagccactctcatccattaatttgctatgtggactttctgggcctcagttttggatctgtctggtagaagaatcatcctctttttctgaatcttgctgaatttctctgaacttcactgggagaatgaaaaaccataaagccctttccagatgtaaaatgatgtagcaatccaggtctagtctctccaactctagtacatttactgtgtcagagtattaatatctggaatattgccaggtgtggtggctcacgcatgtaatcccagcactttgggaggccgaagtgggtggatcacttgaggtcaggaattcgaggccagcctggccaacatggtgaaaccccatctttactaaaaatacaaaaattagctgggtgtggtggtgcatgcctgtagtcccagctactcagaagactgaggcaggagaatcgcttgaacctgggaggtggaggttgcagtgagctgagatcatgccactgcactccagcctaggtgacagagcgagactccatttcaaaaaaaaaaaaaaaatctggaatattaactgggttttacaaatctcccaaattcttttttgtttgtttgtgttttgtgttttgagacagagtcttacttgttctgtcacctgggctctggagtgcagtggtgtaatctcagctcactgctgcagcctccacctcccatgttcaagcgattctcctgcctcagcctcctgagtagctggaattgcaggtgcacaccaccatacctggctaatttttgtatttttagtagagacgaaatttcgccgcgttgcccaggctggtctcctgaccgcaagtgatcctcccgcctcagcctcccaaaatgctgggattacaggcgtgagccaacatctcccaaattctaacagccacgattcctaccttcacactcttgtccctgcctacaccatgtcactctggccttctaccccatcactgaaattcagcagaatggccatgtgtcagacaagggtgtgggacctgacggtacagggcagttggggagggagcatggagtctgggatttattttgtaggctgtggggtgcatgtgaacatttgagaagtgagtgtgtcgttctggctttgaggggtggggagtggaggggagactggccagaagcaggacctgctaggtgattctagcagcaggggatgatacctgaactagggcagtgacagagagttatggggacagggcagagatgctgcccataattaccccaggagtgtggacagctttaaaggcaacacgtgctagatcatcctccctgttccacaggcgagaaagagagagagaagaggaaattccctgaggcctataggccatgggcttgggtagactgctcagccccactggctctctgctcctgcctggtttgtgccgggcactgtagggtggtgtgaaggggaaacacaaaggactgagaaagccaggccccatcttcatccattcaggggctgtagaaagacaccatggaccgtgtggctcataaacaacagatgttattcctcacatacagttctgggggctgtgaattccaagatcataaagccagcatatttggtgtctggtgagggctgactttctggttcacagatggcgtctctcactgtgtcctcaggtggtgaaaggggtaaacgggctccctcaggcctctaatctcattcctgagggctccaccctcatgacccaggcacctcccaaaggtcccacctcctaagtctatcacattgggaattagatttcaacataggaattggggtgggggaggcacattcagaccatagcattctgccccagactctccccagttcattttcttgtcatatgcaaaatatattcattccatcccaataggctcccaaatcttaacttgttccagcatcagttcaaaagtttcaagtccagagcctcatctaatctcacctaggccaggcacagtggtcatgtctgtgatcccagcactttgggaggctaaggcaggaggattgcttgaggccaggagttcaagaccagcctgggcaacaaagtgagaccctgtctctacaaaaaaaaaaaaaaa

SEQ ID NO: 20124 - DNA, 723 bp, Homo sapiens
  misc_feature 1..723: note = ENST00000534185
  source 1..723: mol_type = unassigned DNA
agtcccggcttggaactgaactgtgtgagcacgggtcctggaacccgggcccagaaccggcgagcccaggtctgagcccagagctcagcggtcagcctcgtaggccctgactcggaatcgagccgaggcgctgaggttggagccggagagcgtgagagccgaagagcagggagggcgggccggctgcgcgtccgacgagtcgcagagcaggaccgcggaaggcagggagacggccgcaagcccagggcagagggcagagggcagagagcggcctggctcggcggagagggcgccgcccggccggaaccaagctcgccgcccgggacggcgggccccgtggggcgcggacccagggtggccgtgggtccgcagcgactccccggccgacggcggggggcgtgccccctcccagcccagcctccccaacccggcccgcccgccgcgtcgcgggggcatgtgagcgggaagcctaggctgccagccgcgaggaccgcacggaggaggagcaggagcgcggagccgcgagccccgagccccgagcccggcgcctggctgagtagactgtagctctccagagggtaatgggtccccagaacccaagagaccaggagtgtcggaggctgcctctggaagccaggagaagctggacttcaaccgaaatttgaaagaagtggtgccagccatagagaagctgttgtccagtgactggaaggagaggtttct

SEQ ID NO: 20125 - DNA, 769 bp, Homo sapiens
  misc_feature 1..769: note = ENST00000530882
  source 1..769: mol_type = unassigned DNA
cccggcttggaactgaactgtgtgagcacgggtcctggaacccgggcccagaaccggcgagcccaggtctgagcccagagctcagcggtcagcctcgtaggccctgactcggaatcgagccgaggcgctgaggttggagccggagagcgtgagagccgaagagcagggagggcgggccggctgcgcgtccgacgagtcgcagagcaggaccgcggaaggcagggagacggccgcaagcccagggcagagggcagagggcagagagcggcctggctcggcggagagggcgccgcccggccggaaccaagctcgccgcccgggacggcgggccccgtggggcgcggacccagggtggccgtgggtccgcagcgactccccggccgacggcggggggcgtgccccctcccagcccagcctccccaacccggcccgcccgccgcgtcgcgggggcatgtgagcgggaagcctaggctgccagccgcgaggaccgcacggaggaggagcaggagcgcggagccgcgagccccgagccccgagcccggcgcctggctgagtacagggacccaagagagcctagcagagaaggagctccagcttctggtcatgattcaccagctgtccaccctgcgggaccagctcctgacagcccactcggagcagaagaacatggctgccatgctgtttgagaagcagcagcagcagatggagcttgcccggcagcagcaggagcagattgcaaagcagcagcagcagctgattcagcagcagc

SEQ ID NO: 20126 - DNA, 3587 bp, Homo sapiens
  misc_feature 1..3587: note = ENST00000367204
  source 1..3587: mol_type = unassigned DNA
ggcatgtgagcgggaagcctaggctgccagccgcgaggaccgcacggaggaggagcaggagcgcggagccgcgagccccgagccccgagcccggcgcctggctgagtagatgtccatgaggagccccatctctgcccagctggccctggatggcgttggcaccatggtgaactgcaccatcaagtcagaggagaagaaagagccttgccacgaggccccccagggctcagccactgccgctgaacctcagcctggagacccagcccgggcctcccaggatagtgctgacccccaagctccagcccaggggaatttcaggggctcctgggactgtagctctccagagggtaatgggtccccagaacccaagagaccaggagtgtcggaggctgcctctggaagccaggagaagctggacttcaaccgaaatttgaaagaagtggtgccagccatagagaagctgttgtccagtgactggaaggagaggtttctaggaaggaactctatggaagccaaagatgtcaaagggacccaagagagcctagcagagaaggagctccagcttctggtcatgattcaccagctgtccaccctgcgggaccagctcctgacagcccactcggagcagaagaacatggctgccatgctgtttgagaagcagcagcagcagatggagcttgcccggcagcagcaggagcagattgcaaagcagcagcagcagctgattcagcagcagcataagatcaacctccttcagcagcagatccagcaggttaacatgccttatgtcatgatcccagccttccccccaagccaccaacctctgcctgtcacccctgactcccagctggccttacccattcagcccattccctgcaaaccagtggagtatccgctgcagctgctgcacagcccccctgccccagtggtgaagaggcctggggccatggccacccaccaccccctgcaggagccctcccagcccctgaacctcacagccaagcccaaggcccccgagctgcccaacacctccagctccccaagcctgaagatgagcagctgtgtgccccgcccccccagccatggaggccccacgcgggacctgcagtccagccccccgagcctgcctctgggcttccttggtgaaggggacgctgtcaccaaagccatccaggatgctcggcagctgctgcacagccacagtggggccttggatggctcccccaacacccccttccgtaaggacctcatcagcctggactcatccccagccaaggagcggctggaggacggctgtgtgcacccactggaggaagccatgctgagctgcgacatggatggctcccgccacttccccgagtcccgaaacagcagccacatcaagaggcccatgaacgccttcatggtgtgggccaaggatgagcggaggaagatcctgcaagccttcccagacatgcacaactccagcatcagcaagatccttggatctcgctggaagtccatgaccaaccaggagaagcagccctactatgaggaacaggcgcggctgagccggcagcacctggagaagtatcctgactacaagtacaagccgcggcccaagcgcacctgcatcgtggagggcaagcggctgcgcgtgggagagtacaaggccctgatgaggacccggcgtcaggatgcccgccagagctacgtgatccccccgcaggctggccaggtgcagatgagctcctcagatgtcctgtaccctcgggcagcaggcatgccgctggcacagccactggtggagcactatgtccctcgtagcctggaccccaacatgcctgtgatcgtcaacacctgcagcctcagagaggagggtgagggcacagatgacaggcactcggtggctgatggcgagatgtaccggtacagcgaggacgaggactcggagggcgaagagaagagcgatggggagttggtggtgctcacagactgatcccggctgggtgggcctggccccttctcctctggggaagaccttgtcccaactcgatgggcacagccagccaacctaagactatgttggtacttggacttgttcgtgccccagagatgggcaaagctgtgcacttgcagatacattcatgaggggagaggcgccctcccttcctgaggagctgttggcctgggtgggcaggaactgcagtatggccatgggctgagcaggctgagcacctcagcctttagggcttatggccaggggacactgtatgactctcctctcctgcaggtgtctatccacctggggtatggcatctaccgacctgtctccctggggtcacatgctttgtttccattcttgtcctggctggaccagccactgtgggaccaacacccctcccacactcccccagactgctcgtctatcaccaggatcgctttgtactttgtgcaaaagggtctggctgtcccttgctgttttcatctctgccaagcctattgtgcctctggctgctgtatgtgtgcgcgtgcacgtgtgtgtgtttcatctgttcattcactgcacaagatatttattgagtgcccactacgtgccaggcactgttgctgagttcctgtgggtgtgtctctcgatgccactcctgcttctctgggggcctctttctgtgcttctctttgtccccaaattgctacctctttgtcagtctgggtgtctcaggttctgtgtgtccttgtgtgcatttctgtctctctctgtcctcgtctctctgcaaggccctctatttctctctttcttggtgtctgtcctttgccccctgtgccctctggattctctgggtctatgtaggcccctggtctgccctgggctcatcagccttcctgacctcctcctgccctccccttcactccctccctggctctgccagtcggttcccacggagccatttttagctctgatcagcatgggaatgtgcctcggcctccaaggggctttgtcctggtgcccccgcccctggtcccaacctgatcccacgagggagttgggacaggaggattgatggtgctccccttcctgccagcgtcagaggccctggagaggggctgtccatggcagctggtctttattcctccctcatgagcacagggtcgggggggtccccattcttggaagaggttgagaagactcctgggcttcagcctctcccacccagccctgcccctcacctgcctgccctcccctcccccactctatactagggactggatctcagcctctgatcagtttcacaaagtttgttccctaaggaaatcaaatcccattgtcacctaactctgaagatctaaatagcccttggatcagtatgggaaccccaaatcccacagggccagatgtggagtctgtgtctgcccccgtcttctctccatcctcaaagcccccacttctctccaggctgtttctttttttatgactgtaaacatagatagtgctttattttgttaataataagataatgatgagtaacttaaccagcacatttctcctgtttacactcgggggatttttttgttttctgatgacataataaagacagatcatttcagaa

SEQ ID NO: 20127 - DNA, 538 bp, Homo sapiens
  misc_feature 1..538: note = ENST00000525442
  source 1..538: mol_type = unassigned DNA
acgcgggtcgagcttagggtgcacccccaacccgctcctcgccgaccgcagaggactaggtctttctcatcagcccgactatgcgcctagtttaaggatttctcagcgggaagccgaagcgacctgcgcgcgtcctgcgtggggctcaggtgcctgcgacgaggcgcagagctcctccaccatggttgcgtggggtgctgggggacagacgcgctccccttgccacggtttcagggtcgttccccagcggaccagaccagcgcggcatcctgtttgttttctgctccggctgctcctgtcccacccccacccccaccgcaggctgcttcttgctacccccacctcccgccctgggatatcgtaggatgtccatgaggagccccatctctgcccagctggccctggatggcgttggcaccatggtgaactgcaccatcaagtcagaggagaagaaagagccttgccacgaggccccccagggctcagccactgccgctgaacctcagcctggagacccagcccgggcctcccaggatag

SEQ ID NO: 20128 - DNA, 597 bp, Homo sapiens
  misc_feature 1..597: note = ENST00000528591
  source 1..597: mol_type = unassigned DNA
agaactgttgggaggctaatggctgatgatgtctgcggcagcagtgctccatgaatggatgtccatgaggagccccatctctgcccagctggccctggatggcgttggcaccatggtgaactgcaccatcaagtcagaggagaagaaagagccttgccacgaggccccccagggctcagccactgccgctgaacctcagcctggagacccagcccgggcctcccaggatagtgctgacccccaagctccagcccaggggaatttcaggggctcctgggactgtagctctccagagggtaatgggtccccagaacccaagagaccaggagtgtcggaggctgcctctggaagccaggagaagctggacttcaaccgaaatttgaaagaagtggtgccagccatagagaagctgttgtccagtgactggaaggagaggtttctaggaaggaactctatggaagccaaagatgtcaaagggacccaagagagcctagcagagaaggagctccagcttctggtcatgattcaccagctgtccaccctgcgggaccagctcctgacagcccactcggagcagaagaacatggctgccatgct

SEQ ID NO: 20129 - DNA, 1754 bp, Homo sapiens
  misc_feature 1..1754: note = ENST00000272193
  source 1..1754: mol_type = unassigned DNA
aacttgcctaacagctcacagacaggatgggttgaaatgggaatttgaccccagacctgtcttgcttcaaagcctgagtgtgtcccactggatccctccgatgggatggttgtccaccctgaccctgtgtggcgctgagcactcgaggacattgaagaggcctggggctctggggctgacatgtcccactgtcagcattttcagggggcctggaattcatggctaataggggagaacttctaggctagtagttgccaggtagcaacatgaagagcccccttcaagggacccaagagagcctagcagagaaggagctccagcttctggtcatgattcaccagctgtccaccctgcgggaccagctcctgacagcccactcggagcagaagaacatggctgccatgctgtttgagaagcagcagcagcagatggagcttgcccggcagcagcaggagcagattgcaaagcagcagcagcagctgattcagcagcagcataagatcaacctccttcagcagcagatccagcaggttaacatgccttatgtcatgatcccagccttccccccaagccaccaacctctgcctgtcacccctgactcccagctggccttacccattcagcccattccctgcaaaccagtggagtatccgctgcagctgctgcacagcccccctgccccagtggtgaagaggcctggggccatggccacccaccaccccctgcaggagccctcccagcccctgaacctcacagccaagcccaaggcccccgagctgcccaacacctccagctccccaagcctgaagatgagcagctgtgtgccccgcccccccagccatggaggccccacgcgggacctgcagtccagccccccgagcctgcctctgggcttccttggtgaaggggacgctgtcaccaaagccatccaggatgctcggcagctgctgcacagccacagtggggccttggatggctcccccaacacccccttccgtaaggacctcatcagcctggactcatccccagccaaggagcggctggaggacggctgtgtgcacccactggaggaagccatgctgagctgcgacatggatggctcccgccacttccccgagtcccgaaacagcagccacatcaagaggcccatgaacgccttcatggtgtgggccaaggatgagcggaggaagatcctgcaagccttcccagacatgcacaactccagcatcagcaagatccttggatctcgctggaagtccatgaccaaccaggagaagcagccctactatgaggaacaggcgcggctgagccggcagcacctggagaagtatcctgactacaagtacaagccgcggcccaagcgcacctgcatcgtggagggcaagcggctgcgcgtgggagagtacaaggccctgatgaggacccggcgtcaggatgcccgccagagctacgtgatccccccgcaggctggccaggtgcagatgagctcctcagatgtcctgtaccctcgggcagcaggcatgccgctggcacagccactggtggagcactatgtccctcgtagcctggaccccaacatgcctgtgatcgtcaacacctgcagcctcagagaggagggtgagggcacagatgacaggcactcggtggctgatggcgagatgtaccggtacagcgaggacgaggactcggagggcgaagagaagagcgatggggagttggtggtgctcacagactgatcccggctgggtgggcct

SEQ ID NO: 20130 - DNA, 699 bp, Homo sapiens
  misc_feature 1..699: note = ENST00000480326
  source 1..699: mol_type = unassigned DNA
ggacccaagagagcctagcagagaaggagctccagcttctggtcatgattcaccagctgtccaccctgcgggaccagctcctgacagcccactcggagcagaagaacatggctgccatgctgtttgagaagcagcagcagcagatggagcttgcccggcagcagcaggagcagattgcaaagcagcagcagcagctgattcagcagcagcataagatcaacctccttcagcagcagatccagcaggttaacatgccttatgtcatgatcccagccttccccccaagccaccaacctctgcctgtcacccctgactcccagctggccttacccattcagcccattccctgcaaaccaggacttttctccttgctgccttttccatagtggagtatccgctgcagctgctgcacagcccccctgccccagtggtgaagaggcctggggccatggccacccaccaccccctgcaggagccctcccagcccctgaacctcacagccaagcccaaggcccccgagctgcccaacacctccagctccccaagcctgaagatgagcagctgtgtgccccgcccccccagccatggaggccccacgcgggacctgcagtccagccccccgagcctgcctctgggcttccttggtgaaggggacgctgtcaccaaagccatccaggatgctcggcagctgctgcacag

SEQ ID NO: 20131 - DNA, 744 bp, Homo sapiens
  misc_feature 1..744: note = ENST00000525258
  source 1..744: mol_type = unassigned DNA
gagcctgcctctgggtaagcctcctgctgcctgcacttgtccctcagccctcttaggggagagccggcggcatgatgcgaccttgagcaggtcccttctcctccctgggttccagattttatcaaatgaggggttagacttgctcttagcagaagatccccttcttcctctccctcatcatatctgtctgggcattccaagcatcagggattcaggccagagtcacatagttccagggggtactgttgtcatttctagtctattgacatgcacaataactagccagtgtaagtggcatatccctgaggacatgcaatgcagccgccctgtggaagaacaggagggaacactaactcaggtgcctcatgggagtggcatggcgggaagctgatggagtttgggctcatgctgggctgatgccctcagcttctctcgcttctcttccctctcttctgccctctcccacaggcttccttggtgaaggggacgctgtcaccaaagccatccaggatgctcggcagctgctgcacagccacagtggggccttggatggctcccccaacacccccttccgtaaggacctcatcagcctggactcatccccagccaaggagcggctggaggacggctgtgtgcacccactggaggaagccatgctgagctgcgacatggatggctcccgccacttccccgagtcccgaaacagcagccacatcaagaggcccatgaacgccttcatggtgt

SEQ ID NO: 20132 - DNA, 3476 bp, Homo sapiens
  misc_feature 1..3476: note = ENST00000618875
  source 1..3476: mol_type = unassigned DNA
atgtccatgaggagccccatctctgcccagctggccctggatggcgttggcaccatggtgaactgcaccatcaagtcagaggagaagaaagagccttgccacgaggccccccagggctcagccactgccgctgaacctcagcctggagacccagcccgggcctcccaggatagtgctgacccccaagctccagcccaggggaatttcaggggctcctgggactgtagctctccagagggtaatgggtccccagaacccaagagaccaggagtgtcggaggctgcctctggaagccaggagaagctggacttcaaccgaaatttgaaagaagtggtgccagccatagagaagctgttgtccagtgactggaaggagaggtttctaggaaggaactctatggaagccaaagatgtcaaagggacccaagagagcctagcagagaaggagctccagcttctggtcatgattcaccagctgtccaccctgcgggaccagctcctgacagcccactcggagcagaagaacatggctgccatgctgtttgagaagcagcagcagcagatggagcttgcccggcagcagcaggagcagattgcaaagcagcagcagcagctgattcagcagcagcataagatcaacctccttcagcagcagatccagcaggttaacatgccttatgtcatgatcccagccttccccccaagccaccaacctctgcctgtcacccctgactcccagctggccttacccattcagcccattccctgcaaaccagtggagtatccgctgcagctgctgcacagcccccctgccccagtggtgaagaggcctggggccatggccacccaccaccccctgcaggagccctcccagcccctgaacctcacagccaagcccaaggcccccgagctgcccaacacctccagctccccaagcctgaagatgagcagctgtgtgccccgcccccccagccatggaggccccacgcgggacctgcagtccagccccccgagcctgcctctgggcttccttggtgaaggggacgctgtcaccaaagccatccaggatgctcggcagctgctgcacagccacagtggggccttggatggctcccccaacacccccttccgtaaggacctcatcagcctggactcatccccagccaaggagcggctggaggacggctgtgtgcacccactggaggaagccatgctgagctgcgacatggatggctcccgccacttccccgagtcccgaaacagcagccacatcaagaggcccatgaacgccttcatggtgtgggccaaggatgagcggaggaagatcctgcaagccttcccagacatgcacaactccagcatcagcaagatccttggatctcgctggaagtccatgaccaaccaggagaagcagccctactatgaggaacaggcgcggctgagccggcagcacctggagaagtatcctgactacaagtacaagccgcggcccaagcgcacctgcatcgtggagggcaagcggctgcgcgtgggagagtacaaggccctgatgaggacccggcgtcaggatgcccgccagagctacgtgatccccccgcaggctggccaggtgcagatgagctcctcagatgtcctgtaccctcgggcagcaggcatgccgctggcacagccactggtggagcactatgtccctcgtagcctggaccccaacatgcctgtgatcgtcaacacctgcagcctcagagaggagggtgagggcacagatgacaggcactcggtggctgatggcgagatgtaccggtacagcgaggacgaggactcggagggcgaagagaagagcgatggggagttggtggtgctcacagactgatcccggctgggtgggcctggccccttctcctctggggaagaccttgtcccaactcgatgggcacagccagccaacctaagactatgttggtacttggacttgttcgtgccccagagatgggcaaagctgtgcacttgcagatacattcatgaggggagaggcgccctcccttcctgaggagctgttggcctgggtgggcaggaactgcagtatggccatgggctgagcaggctgagcacctcagcctttagggcttatggccaggggacactgtatgactctcctctcctgcaggtgtctatccacctggggtatggcatctaccgacctgtctccctggggtcacatgctttgtttccattcttgtcctggctggaccagccactgtgggaccaacacccctcccacactcccccagactgctcgtctatcaccaggatcgctttgtactttgtgcaaaagggtctggctgtcccttgctgttttcatctctgccaagcctattgtgcctctggctgctgtatgtgtgcgcgtgcacgtgtgtgtgtttcatctgttcattcactgcacaagatatttattgagtgcccactacgtgccaggcactgttgctgagttcctgtgggtgtgtctctcgatgccactcctgcttctctgggggcctctttctgtgcttctctttgtccccaaattgctacctctttgtcagtctgggtgtctcaggttctgtgtgtccttgtgtgcatttctgtctctctctgtcctcgtctctctgcaaggccctctatttctctctttcttggtgtctgtcctttgccccctgtgccctctggattctctgggtctatgtaggcccctggtctgccctgggctcatcagccttcctgacctcctcctgccctccccttcactccctccctggctctgccagtcggttcccacggagccatttttagctctgatcagcatgggaatgtgcctcggcctccaaggggctttgtcctggtgcccccgcccctggtcccaacctgatcccacgagggagttgggacaggaggattgatggtgctccccttcctgccagcgtcagaggccctggagaggggctgtccatggcagctggtctttattcctccctcatgagcacagggtcgggggggtccccattcttggaagaggttgagaagactcctgggcttcagcctctcccacccagccctgcccctcacctgcctgccctcccctcccccactctatactagggactggatctcagcctctgatcagtttcacaaagtttgttccctaaggaaatcaaatcccattgtcacctaactctgaagatctaaatagcccttggatcagtatgggaaccccaaatcccacagggccagatgtggagtctgtgtctgcccccgtcttctctccatcctcaaagcccccacttctctccaggctgtttctttttttatgactgtaaacatagatagtgctttattttgttaataataagataatgatgagtaacttaaccagcacatttctcctgtttacactcgggggatttttttgttttctgatgacataataaagacagatcatttcag

SEQ ID NO: 20133 - DNA, 2513 bp, Homo sapiens
  misc_feature 1..2513: note = ENST00000325404
  source 1..2513: mol_type = unassigned DNA
ggatggttgtctattaacttgttcaaaaaagtatcaggagttgtcaaggcagagaagagagtgtttgcaaaagggggaaagtagtttgctgcctctttaagactaggactgagagaaagaagaggagagagaaagaaagggagagaagtttgagccccaggcttaagcctttccaaaaaataataataacaatcatcggcggcggcaggatcggccagaggaggagggaagcgctttttttgatcctgattccagtttgcctctctctttttttcccccaaattattcttcgcctgattttcctcgcggagccctgcgctcccgacacccccgcccgcctcccctcctcctctccccccgcccgcgggccccccaaagtcccggccgggccgagggtcggcggccgccggcgggccgggcccgcgcacagcgcccgcatgtacaacatgatggagacggagctgaagccgccgggcccgcagcaaacttcggggggcggcggcggcaactccaccgcggcggcggccggcggcaaccagaaaaacagcccggaccgcgtcaagcggcccatgaatgccttcatggtgtggtcccgcgggcagcggcgcaagatggcccaggagaaccccaagatgcacaactcggagatcagcaagcgcctgggcgccgagtggaaacttttgtcggagacggagaagcggccgttcatcgacgaggctaagcggctgcgagcgctgcacatgaaggagcacccggattataaataccggccccggcggaaaaccaagacgctcatgaagaaggataagtacacgctgcccggcgggctgctggcccccggcggcaatagcatggcgagcggggtcggggtgggcgccggcctgggcgcgggcgtgaaccagcgcatggacagttacgcgcacatgaacggctggagcaacggcagctacagcatgatgcaggaccagctgggctacccgcagcacccgggcctcaatgcgcacggcgcagcgcagatgcagcccatgcaccgctacgacgtgagcgccctgcagtacaactccatgaccagctcgcagacctacatgaacggctcgcccacctacagcatgtcctactcgcagcagggcacccctggcatggctcttggctccatgggttcggtggtcaagtccgaggccagctccagcccccctgtggttacctcttcctcccactccagggcgccctgccaggccggggacctccgggacatgatcagcatgtatctccccggcgccgaggtgccggaacccgccgcccccagcagacttcacatgtcccagcactaccagagcggcccggtgcccggcacggccattaacggcacactgcccctctcacacatgtgagggccggacagcgaactggaggggggagaaattttcaaagaaaaacgagggaaatgggaggggtgcaaaagaggagagtaagaaacagcatggagaaaacccggtacgctcaaaaagaaaaaggaaaaaaaaaaatcccatcacccacagcaaatgacagctgcaaaagagaacaccaatcccatccacactcacgcaaaaaccgcgatgccgacaagaaaacttttatgagagagatcctggacttctttttgggggactatttttgtacagagaaaacctggggagggtggggagggcgggggaatggaccttgtatagatctggaggaaagaaagctacgaaaaactttttaaaagttctagtggtacggtaggagctttgcaggaagtttgcaaaagtctttaccaataatatttagagctagtctccaagcgacgaaaaaaatgttttaatatttgcaagcaacttttgtacagtatttatcgagataaacatggcaatcaaaatgtccattgtttataagctgagaatttgccaatatttttcaaggagaggcttcttgctgaattttgattctgcagctgaaatttaggacagttgcaaacgtgaaaagaagaaaattattcaaatttggacattttaattgtttaaaaattgtacaaaaggaaaaaattagaataagtactggcgaaccatctctgtggtcttgtttaaaaagggcaaaagttttagactgtactaaattttataacttactgttaaaagcaaaaatggccatgcaggttgacaccgttggtaatttataatagcttttgttcgatcccaactttccattttgttcagataaaaaaaaccatgaaattactgtgtttgaaatattttcttatggtttgtaatatttctgtaaatttattgtgatattttaaggttttcccccctttattttccgtagttgtattttaaaagattcggctctgtattatttgaatcagtctgccgagaatccatgtatatatttgaactaatatcatccttataacaggtacattttcaacttaagtttttactccattatgcacagtttgagataaataaatttttgaaatatggacactgaaa

SEQ ID NO: 20134 - DNA, 8808 bp, Homo sapiens
  misc_feature 1..8808: note = ENST00000316399
  source 1..8808: mol_type = unassigned DNA
ctgttttttttctgcagaagaatgtcttccaagcaagccacctctccatttgcctgtgcagctgatggagaggatgcaatgacccaggatttaacctcaagggaaaaggaagagggcagtgatcaacatgtggcctcccatctgcctctgcaccccataatgcacaacaaacctcactctgaggagctaccaacacttgtcagtaccattcaacaagatgctgactgggacagcgttctgtcatctcagcaaagaatggaatcagagaataataagttatgttccctatattccttccgaaatacctctacctcaccacataagcctgacgaagggagtcgggaccgtgagataatgaccagtgttacttttggaaccccagagcgccgcaaagggagtcttgccgatgtggtggacacactgaaacagaagaagcttgaggaaatgactcggactgaacaagaggattcctcctgcatggaaaaactactttcaaaagattggaaggaaaaaatggaaagactaaataccagtgaacttcttggagaaattaaaggtacacctgagagcctggcagaaaaagaacggcagctctccaccatgattacccagctgatcagtttacgggagcagctactggcagcgcatgatgaacagaaaaaactggcagcgtcacaaattgagaaacaacggcagcaaatggaccttgctcgccaacagcaagaacagattgcgagacaacagcagcaacttctgcaacagcagcacaaaattaatctcctgcagcaacagatccaggttcagggtcacatgcctccgctcatgatcccaatttttccacatgaccagcggactctggcagcagctgctgctgcccaacagggattcctcttcccccctggaataacatacaaaccaggtgataactaccccgtacagttcattccatcaacaatggcagctgctgctgcttctggactcagccctttacagctccagaagggtcatgtctcccacccacaaattaaccaaaggctaaagggcctaagtgaccgttttggcaggaatttggacacctttgaacatggtggtggccactcttacaaccacaaacagattgagcagctctatgccgctcagctggccagcatgcaggtgtcacctggagcaaagatgccatcaactccacagccaccaaacacagcagggacggtctcacctactgggataaaaaatgaaaagagagggaccagccctgtaactcaagttaaggatgaagcagcagcacagcctctgaatctctcatcccgacccaagacagcagagcctgtaaagtccccaacgtctcccacccagaacctcttcccagccagcaaaaccagccctgtcaatctgccaaacaaaagcagcatccctagccccattggaggaagcctgggaagaggatcctctttagatatcctatctagtctcaactcccctgccctttttggggatcaggatacagtgatgaaagccattcaggaggcgcggaagatgcgagagcagatccagcgggagcaacagcagcaacagccacatggtgttgacgggaaactgtcctccataaataatatggggctgaacagctgcaggaatgaaaaggaaagaacgcgctttgagaatttggggccccagttaacgggaaagtcaaatgaagatggaaaactgggcccaggtgtcatcgaccttactcggccagaagatgcagagggaggtgccactgtggctgaagcacgagtctacagggacgcccgcggccgtgccagcagcgagccacacattaagcgaccaatgaatgcattcatggtttgggcaaaggatgagaggagaaaaatccttcaggccttccccgacatgcataactccaacattagcaaaatcttaggatctcgctggaaatcaatgtccaaccaggagaagcaaccttattatgaagagcaggcccggctaagcaagatccacttagagaagtacccaaactataaatacaaaccccgaccgaaacgcacctgcattgttgatggcaaaaagcttcggattggggagtataagcaactgatgaggtctcggagacaggagatgaggcagttctttactgtggggcaacagcctcagattccaatcaccacaggaacaggtgttgtgtatcctggtgctatcactatggcaactaccacaccatcgcctcagatgacatctgactgctctagcacctcggccagcccggagcccagcctcccggtcatccagagcacttatggtatgaagacagatggcggaagcctagctggaaatgaaatgatcaatggagaggatgaaatggaaatgtatgatgactatgaagatgaccccaaatcagactatagcagtgaaaatgaagccccggaggctgtcagtgccaactgaggagtttttgtttgctgaattaaagtactctgacatttcacccccctccccaacaaagagttattaaagagcccgcatgcatttgtggctccacaattacatcagcagaatggtcttaattgtttcgtaaagtgtgagacagattaagttttccctgatttttcatgaacttgagttttttgttgttattgttattgttgttgttgttgtttttttaatttaggtgaagacatattaaatatgagacaccaggacttgaaacttatctcaacccgtagatgtcttacaagtcttatatttttgtcttactttttttttcttttggatgttgataaaggtttaagttactgttttagatggggttaaacattctcactcaggtatgctgtgccggcctacaggttgtgaatgtgtttttattctgaattattttagaaaacaactgaggatttcatattgtgaaacagaacaagtccacggcgtgtgcagctgcatgtagagcatattcaaaaggcctcggaattccaattttccatttgtagagttaaactttgaatgtgccaaactttttcgtaacttttgaatcttaatattttgaaagtcttaaaggagacactgcaaagtcttagacaatctttggcatcttaaaataaaatagcaaaccaacatttttttttccagaaaatggtaaggtactcaggaatctggagacaagatattgtaaggaatgaacaaggttgccacagtgcatggacccaattgtgtttgcctgttgacgtgccatcagtgcgtgatgtggtatgacatacacacaccagagcaaccgccacaccagatatcgacagagtggtcttctctgcctgagaccacctctcactacatccattatccctttgcctttaaccctgacattcagtcttaacacattttatcttaaataatttattcattccagaatgtcaagggtccacttgctatttattttttttcaattgttggtggcattaatttaataattcttgtttttcaccttccttccccgaagaacttttccgtccttttcacctccttctcctgtgtacatagtgattttatgtccccagaacgcctggaagcatttctgaaaccaagatattattaaaaacctattattgtttttaatcatgagtatgtatctggctgcagggctgtgtattgggatataggtatatagtcttacacttaaacaggtatgcccctgaggttcactgtgacctcaagtcttttgccagaattttcccctaattcagttcacaagtggtagggtctgcatcagtggcatttccccctgaattccattcagcagcaaggttcaacagtggtgactgccaggcaggagagtcctgcggccaaacctgaagcccaaggctcgtgggccatgcaggaatctcagtgaagctgtcatgggctggcacctttacactgagttgccttgtcccagctggcacatctagggagttcattgcaaaatccccaggatgcaaaaagccacatgacagcctcagagcaaagatggtggcaaatagtcatgatacatctagagaatgaaagaaaactgtaagggaggagaaggaggggaatacattccctatatgggatgttcctactgttaactctggggaacagatagctccgggggcagcagatgagttcctctggctgactctatctgtagccacatggggacctgcctacgtgtgaacaaaatgaactgcacttatcacacaaggatttctttgaagacatgctactggggtgggaagcagtgaggttttattccccatctcctaactacagggagctctgccatgtcattttggccttcctgaaactaggacaggttgtctatcggggggcttcccccagagaggtttagtgggagaatgtcagtgaatgggatagttcacctcatgggacaacccagaatctgatcaccaggacataggaatggccccatcagatttcttgagccattttgtcacttggaagaaaatagtgtacctttgtatttatttaagagtgctcaaggcctaatagcaataaacaggtctagccaagaaattacaagctattctgttagctgggagtgctctctataagctgattaaggtactgataggaactctttgttattcatgttggttggggattagaaatttgtttttgtacatttatttcaaatgaggaggaggtcattttttctctcaaaaaatgagtatttattattgtcttactgatttctttgattatatacctctcctcctcagttcactcttgttttttttctttctctttggcttttgcttttgctctctctcacttctttcttattttgttgcattggtagagtgttgtatggctagcattgtattgtatgtaattaattttgcacaaaagcaaacatttagcatagtaggttaattttgtttgtttttatgaccatgccaaaataatattctgggctggtggagaacaaaggactgttctttaggactgaaacttgattttgctcatagtaagtaaaaaaaaacaaaaaacacacacactcacagatgttgtttcgtaagtgttataagcactggatataaatggtattttttatcacttctgactaatgtgaaactgttgtacgaaaactacatgaacaaaagtcatctgtttcgactcgtgtgggcttgcctcacagttgccggatttgagtcatttttatgtcttgttatttcatttatttatgcaaaatacatgtgtgtatgaacactttgttttagctccagctctgcctcagtactggggttcatttacttttagccatgttcttaaaaatgaaaggctattcaggaatgatctgattgtaaacgtctttttcattggatcaaacagtaatgctgtatttgaatctaaattttgtgtataagcagtttatttattagccaagtttggctctaaatatccatggaaattaagaatgacaatcatagggatcaattcattttattttcagtggggcttaaacaaagtttatatgactttaccatctcattttagatttttctaattgtgtaaatataacatagaaatagaatttatttttggttcatgaatacttagtgagatataagttatgtatttcctttttgttctctatccatagatgttggtccaaactgaaagttgatgagtcactgtgcctctcggggtagtgagttatcagctacagtgagagagcagtgtttggcctgcagctgggacagcaaaacgtttcaccagggttctcatgcagttcagaacccactgtccacagatccagacatttcccttttttcttacagaaagttgatgattggacatactaaatttccactacagttaggagacagtcagtttgctttgggagtctacataaatcttctaagatagttctgtgaccatttaatagcaagaagcatgaatgccactacaaaggcaaaaatccacctctgagatcggccgttaataaacgtcccgtcatgtcagtttagattcaagaatgttaagcaactttgtttttgcggtgctccctatttcatagtatcttcaaatcaaaaataaaaattatctccattttgttaaagaacttacagggtcagggttctccttgtcacttagaattgggacactgccaggcaatcctctcccaaaaaaaaaaaaaaaaaaaaatagccatatggaatggaaggaaaaggagaaaagaaggaagaaaggaaaaaagtaggaagggagagagaaaaaaaaggtcgctttgcggatacgagccgctaggctgacaacttttctatttcattggcagatatgaagcagtgtcttttccagtaaggtacggaagctttgttgttttcatgtgtacccagctcagccttttagaagcacctcggtttgcttcattaggtatttgatactctccagccttgtcctcaggcctgatttgatttgccagggtcctgacaccaaagcccaggccaagttctaaattcaggtgtgggctcacagtgctattgagcttgtcgaattctggcctcccctgaacattagccccacgggagcctgagggtgtttgaaaagggcgtgatcactctagggctgaaattaaaggctgctttcttttccttctgaagccaggctgcttcttcggagtacaccctcctgagccaggagcacaagcactagcagaaagcagggattgtttcaggaaagcccatttaccctcagtaggaaggcagcctggtcacttgaacagcacagctgaggctgcttctctcaatttactcattttgcaaagaattgacctctaccaactcattagggagaggaaaaagaatcacttagtaattttaaatcatatgagaagtcctgtaccaagtgccaacaactgcaaagaaatgcagctagaggaatgtattgaaattactactgggtcttcctttttaatgagaaaatgacaaaaatggttgctgtagccctgcctgattttgtacacgtttgtctaagaattgagttggcacttaagctcacttctcaaagtataataatattgtatgacctcatttgtcctttcacaaaagcacttgcatcatttccttaagtcatctgctccctgacatgttttcttccctaataaacaacttctgtctgttattcctgccaatgatgttctgtttctgatgccatatcctattgagcgtgcccctgtactaatatcattgaaaatattgatatgcaaacacatttccttttcatccccattctatctttccctttggggacagattgctttccaaaagctcatgaacaaatatttggaatgctggtacctttggggcagaggtaagggtgggcggggtgggggcagaaaggtaatgcttaatgcagataactcttctaatcagtgtccatggcaatatgaacgcttgaagaaaactcagtgacatatcttgctcagtagtttcttattcctgaagaaccacaagcataaagtgaggcctcagtgctggtgctcttggagtatggggaatgtgcaaatatttaactgttttgtatgctgcacattgcaggtctgctcatgtgcattctccctttgtcttcctttgtcatatgtgtttttgcttttttgaaagtgcagtctttattgtaccctcctccagcttgtagcaaattagaatgcttagcatttatgttcattcattattgtatttgccatgtaaaatttttattaccttagacaagcttataagctgttactacataacttatcttactgtaactcttttatttcccccgacgttgtaatttgtttgtgatgtatattgtgaaattgtattctatgttaatttaatcagcacaattcactgacatgctggactgacatgctggctgctgtttcaaagtgtaaagtttgtgtagggctgttgggacaactgcaactctgttgtcaaggtactgtgctttggttcctatagcaacactgggtgtggcccttgaattgctaagggcatttaatacatcctggagcaaattttaactgcagattttctttgtagaaattctatgtataatgcaggtacctacttggcccatggctggtaactatttgggcaattagaaaaaaagaaaaaaacataaaaactagtgtctattgctgctttgaatatgtttgaaagtctgaaaatgtaaatagtttatcaaaaaaaaatcttgtacagtccagtgtaaagtttttaaatgaccttaagggttgccatcacatctttctcacactctcctcttgataataataataataaaaagtttgctaaggattaaagaaatgggaaaaataaaaaaaatctcttcaaatttacaggaatgaatcattgttcttagctttgttgcatacacaaacttcttggattttgttgtgcagtattgacgtgagataaagctcaacattgaataatctttcagtggtacttttcaaagtcttcccctcctctgcctcataattaagggaaaagacaaaattgaaagacacactgtctttatctatcctggtgtatgttggcaccttagctactttttttttttcctttttgcacaaggtgctttcctgatatgttcaacatgccatctttgggtgataatgtatatgccgtgatggggctcaggccccttaggggagtgtctataagaactgcctatttatgctcatttacctcaagactgtcctctctaccctaatctagttgtcatcactccatcttttgtactgctgttgacacttacaaattaaagataaattttgttttatga

SEQ ID NO: 20135 - DNA, 2707 bp, Homo sapiens
  misc_feature 1..2707: note = ENST00000528252
  source 1..2707: mol_type = unassigned DNA
ccttggggttagttttagtcatatttttatctctataaaacatcaggctgggaggtggtgtgtgcctgtagtctcaactgctagggagcctgaggcaggaagactccttgagcacaggagttcaaggccagcctgtgcaacatagtgagaccctatcactctggaaaaaaaaaaaaaatctgcggagaagaatgtcttccaagcaagccacctctccatttgcctgtgcagctgatggagaggatgcaatgacccaggatttaacctcaagggaaaaggaagagggcagtgatcaacatgtggcctcccatctgcctctgcaccccataatgcacaacaaacctcactctgaggagctaccaacacttgtcagtaccattcaacaagatgctgactgggacagcgttctgtcatctcagcaaagaatggaatcagagaataataagttatgttccctatattccttccgaaatacctctacctcaccacataagcctgacgaagggagtcgggaccgtgagataatgaccagtgttacttttggaaccccagagcgccgcaaagggagtcttgccgatgtggtggacacactgaaacagaagaagcttgaggaaatgactcggactgaacaagaggattcctcctgcatggaaaaactactttcaaaagattggaaggaaaaaatggaaagactaaataccagtgaacttcttggagaaattaaaggtacacctgagagcctggcagaaaaagaacggcagctctccaccatgattacccagctgatcagtttacgggagcagctactggcagcgcatgatgaacagaaaaaactggcagcgtcacaaattgagaaacaacggcagcaaatggaccttgctcgccaacagcaagaacagattgcgagacaacagcagcaacttctgcaacagcagcacaaaattaatctcctgcagcaacagatccaggttcagggtcacatgcctccgctcatgatcccaatttttccacatgaccagcggactctggcagcagctgctgctgcccaacagggattcctcttcccccctggaataacatacaaaccaggtgataactaccccgtacagttcattccatcaacaatggcagctgctgctgcttctggactcagccctttacagctccagcagctctatgccgctcagctggccagcatgcaggtgtcacctggagcaaagatgccatcaactccacagccaccaaacacagcagggacggtctcacctactgggataaaaaatgaaaagagagggaccagccctgtaactcaagttaaggatgaagcagcagcacagcctctgaatctctcatcccgacccaagacagcagagcctgtaaagtccccaacgtctcccacccagaacctcttcccagccagcaaaaccagccctgtcaatctgccaaacaaaagcagcatccctagccccattggaggaagcctgggaagaggatcctctttaggtaaatggaaaagtcaacaccaggaagagacttacgaattagatatcctatctagtctcaactcccctgccctttttggggatcaggatacagtgatgaaagccattcaggaggcgcggaagatgcgagagcagatccagcgggagcaacagcagcaacagccacatggtgttgacgggaaactgtcctccataaataatatggggctgaacagctgcaggaatgaaaaggaaagaacgcgctttgagaatttggggccccagttaacgggaaagtcaaatgaagatggaaaactgggcccaggtgtcatcgaccttactcggccagaagatgcagagggaagtaaagcaatgaatggctctgcagctaaactacagcagtattattgttggccaacaggaggtgccactgtggctgaagcacgagtctacagggacgcccgcggccgtgccagcagcgagccacacattaagcgaccaatgaatgcattcatggtttgggcaaaggatgagaggagaaaaatccttcaggccttccccgacatgcataactccaacattagcaaaatcttaggatctcgctggaaatcaatgtccaaccaggagaagcaaccttattatgaagagcaggcccggctaagcaagatccacttagagaagtacccaaactataaatacaaaccccgaccgaaacgcacctgcattgttgatggcaaaaagcttcggattggggagtataagcaactgatgaggtctcggagacaggagatgaggcagttctttactgtggggcaacagcctcagattccaatcaccacaggaacaggtgttgtgtatcctggtgctatcactatggcaactaccacaccatcgcctcagatgacatctgactgctctagcacctcggccagcccggagcccagcctcccggtcatccagagcacttatggtatgaagacagatggcggaagcctagctggaaatgaaatgatcaatggagaggatgaaatggaaatgtatgatgactatgaagatgaccccaaatcagactatagcagtgaaaatgaagccccggaggctgtcagtgccaactgaggagtttttgtttgctgaattaaagtactctgacatttcacccccctccccaacaaagagttattaaagagcccgcatgcatttgtggctccacaattacatcagcagaa

SEQ ID NO: 20136 - DNA, 2699 bp, Homo sapiens
  misc_feature 1..2699: note = ENST00000527619
  source 1..2699: mol_type = unassigned DNA
gggataggaaagatgaaaggtcatggtgagcttcaaggacatgaaaggttgttgtctcatgtaacaatagtagattgttttttttcctaatatttctagccagcccctaagtcaggtgatggaacaaatacctacagtttagtcaggtgaaacaggagtgggtggaggaaggaaagaagaaaaatgggaagaatgtcttccaagcaagccacctctccatttgcctgtgcagctgatggagaggatgcaatgacccaggatttaacctcaagggaaaaggaagagggcagtgatcaacatgtggcctcccatctgcctctgcaccccataatgcacaacaaacctcactctgaggagctaccaacacttgtcagtaccattcaacaagatgctgactgggacagcgttctgtcatctcagcaaagaatggaatcagagaataataagttatgttccctatattccttccgaaatacctctacctcaccacataagcctgacgaagggagtcgggaccgtgagataatgaccagtgttacttttggaaccccagagcgccgcaaagggagtcttgccgatgtggtggacacactgaaacagaagaagcttgaggaaatgactcggactgaacaagaggattcctcctgcatggaaaaactactttcaaaagattggaaggaaaaaatggaaagactaaataccagtgaacttcttggagaaattaaaggtacacctgagagcctggcagaaaaagaacggcagctctccaccatgattacccagctgatcagtttacgggagcagctactggcagcgcatgatgaacagaaaaaactggcagcgtcacaaattgagaaacaacggcagcaaatggaccttgctcgccaacagcaagaacagattgcgagacaacagcagcaacttctgcaacagcagcacaaaattaatctcctgcagcaacagatccaggttcagggtcacatgcctccgctcatgatcccaatttttccacatgaccagcggactctggcagcagctgctgctgcccaacagggattcctcttcccccctggaataacatacaaaccaggtgataactaccccgtacagttcattccatcaacaatggcagctgctgctgcttctggactcagccctttacagctccagcagctctatgccgctcagctggccagcatgcaggtgtcacctggagcaaagatgccatcaactccacagccaccaaacacagcagggacggtctcacctactgggataaaaaatgaaaagagagggaccagccctgtaactcaagttaaggatgaagcagcagcacagcctctgaatctctcatcccgacccaagacagcagagcctgtaaagtccccaacgtctcccacccagaacctcttcccagccagcaaaaccagccctgtcaatctgccaaacaaaagcagcatccctagccccattggaggaagcctgggaagaggatcctctttaggtaaatggaaaagtcaacaccaggaagagacttacgaattagatatcctatctagtctcaactcccctgccctttttggggatcaggatacagtgatgaaagccattcaggaggcgcggaagatgcgagagcagatccagcgggagcaacagcagcaacagccacatggtgttgacgggaaactgtcctccataaataatatggggctgaacagctgcaggaatgaaaaggaaagaacgcgctttgagaatttggggccccagttaacgggaaagtcaaatgaagatggaaaactgggcccaggtgtcatcgaccttactcggccagaagatgcagagggaagtaaagcaatgaatggctctgcagctaaactacagcagtattattgttggccaacaggaggtgccactgtggctgaagcacgagtctacagggacgcccgcggccgtgccagcagcgagccacacattaagcgaccaatgaatgcattcatggtttgggcaaaggatgagaggagaaaaatccttcaggccttccccgacatgcataactccaacattagcaaaatcttaggatctcgctggaaatcaatgtccaaccaggagaagcaaccttattatgaagagcaggcccggctaagcaagatccacttagagaagtacccaaactataaatacaaaccccgaccgaaacgcacctgcattgttgatggcaaaaagcttcggattggggagtataagcaactgatgaggtctcggagacaggagatgaggcagttctttactgtggggcaacagcctcagattccaatcaccacaggaacaggtgttgtgtatcctggtgctatcactatggcaactaccacaccatcgcctcagatgacatctgactgctctagcacctcggccagcccggagcccagcctcccggtcatccagagcacttatggtatgaagacagatggcggaagcctagctggaaatgaaatgatcaatggagaggatgaaatggaaatgtatgatgactatgaagatgaccccaaatcagactatagcagtgaaaatgaagccccggaggctgtcagtgccaactgaggagtttttgtttgctgaattaaagtactctgacatttcacccccctccccaacaaagagttattaaagagcccgcatgcatttgtggctccacaattaca

SEQ ID NO: 20137 - DNA, 2656 bp, Homo sapiens
  misc_feature 1..2656: note = ENST00000528429
  source 1..2656: mol_type = unassigned DNA
gttaggagagaccattggggataggaaagatgaaaggtcatggtgagcttcaaggacatgaaagaagaatgtcttccaagcaagccacctctccatttgcctgtgcagctgatggagaggatgcaatgacccaggatttaacctcaagggaaaaggaagagggcagtgatcaacatgtggcctcccatctgcctctgcaccccataatgcacaacaaacctcactctgaggagctaccaacacttgtcagtaccattcaacaagatgctgactgggacagcgttctgtcatctcagcaaagaatggaatcagagaataataagttatgttccctatattccttccgaaatacctctacctcaccacataagcctgacgaagggagtcgggaccgtgagataatgaccagtgttacttttggaaccccagagcgccgcaaagggagtcttgccgatgtggtggacacactgaaacagaagaagcttgaggaaatgactcggactgaacaagaggattcctcctgcatggaaaaactactttcaaaagattggaaggaaaaaatggaaagactaaataccagtgaacttcttggagaaattaaaggtacacctgagagcctggcagaaaaagaacggcagctctccaccatgattacccagctgatcagtttacgggagcagctactggcagcgcatgatgaacagaaaaaactggcagcgtcacaaattgagaaacaacggcagcaaatggaccttgctcgccaacagcaagaacagattgcgagacaacagcagcaacttctgcaacagcagcacaaaattaatctcctgcagcaacagatccaggttcagggtcacatgcctccgctcatgatcccaatttttccacatgaccagcggactctggcagcagctgctgctgcccaacagggattcctcttcccccctggaataacatacaaaccaggtgataactaccccgtacagttcattccatcaacaatggcagctgctgctgcttctggactcagccctttacagctccagaagggtcatgtctcccacccacaaattaaccaaaggctaaagggcctaagtgaccgttttggcaggaatttggacacctttgaacatggtggtggccactcttacaaccacaaacagattgagcagctctatgccgctcagctggccagcatgcaggtgtcacctggagcaaagatgccatcaactccacagccaccaaacacagcagggacggtctcacctactgggataaaaaatgaaaagagagggaccagccctgtaactcaagttaaggatgaagcagcagcacagcctctgaatctctcatcccgacccaagacagcagagcctgtaaagtccccaacgtctcccacccagaacctcttcccagccagcaaaaccagccctgtcaatctgccaaacaaaagcagcatccctagccccattggaggaagcctgggaagaggatcctctttagatatcctatctagtctcaactcccctgccctttttggggatcaggatacagtgatgaaagccattcaggaggcgcggaagatgcgagagcagatccagcgggagcaacagcagcaacagccacatggtgttgacgggaaactgtcctccataaataatatggggctgaacagctgcaggaatgaaaaggaaagaacgcgctttgagaatttggggccccagttaacgggaaagtcaaatgaagatggaaaactgggcccaggtgtcatcgaccttactcggccagaagatgcagagggaagtaaagcaatgaatggctctgcagctaaactacagcagtattattgttggccaacaggaggtgccactgtggctgaagcacgagtctacagggacgcccgcggccgtgccagcagcgagccacacattaagcgaccaatgaatgcattcatggtttgggcaaaggatgagaggagaaaaatccttcaggccttccccgacatgcataactccaacattagcaaaatcttaggatctcgctggaaatcaatgtccaaccaggagaagcaaccttattatgaagagcaggcccggctaagcaagatccacttagagaagtacccaaactataaatacaaaccccgaccgaaacgcacctgcattgttgatggcaaaaagcttcggattggggagtataagcaactgatgaggtctcggagacaggagatgaggcagttctttactgtggggcaacagcctcagattccaatcaccacaggaacaggtgttgtgtatcctggtgctatcactatggcaactaccacaccatcgcctcagatgacatctgactgctctagcacctcggccagcccggagcccagcctcccggtcatccagagcacttatggtatgaagacagatggcggaagcctagctggaaatgaaatgatcaatggagaggatgaaatggaaatgtatgatgactatgaagatgaccccaaatcagactatagcagtgaaaatgaagccccggaggctgtcagtgccaactgaggagtttttgtttgctgaattaaagtactctgacatttcacccccctccccaacaaagagttattaaagagcccgcatgcatttgtggctccacaattaca

SEQ ID NO: 20138 - DNA, 574 bp, Homo sapiens
  misc_feature 1..574: note = ENST00000527840
  source 1..574: mol_type = unassigned DNA
gagcaaatccgacagagagaagatatgcatagaagctctggcaggttccctgtcacagctttcctttccctacaggaaagaacgcgctttgagaatttggggccccagttaacgggaaagtcaaatgaagatggaaaactgggcccaggtgtcatcgaccttactcggccagaagatgcagagggaagtaaagcaatgaatggctctgcagctaaactacagcagtattattgttggccaacaggaggtgccactgtggctgaagcacgagtctacagggacgcccgcggccgtgccagcagcgagccacacattaagcgaccaatgaatgcattcatggtttgggcaaaggatgagaggagaaaaatccttcaggccttccccgacatgcataactccaacattagcaaaatcttaggatctcgctggaaatcaatgtccaaccaggagaagcaaccttattatgaagagcaggcccggctaagcaagatccacttagagaagtacccaaactataaatacaaaccccgaccgaaacgcacctgcattgttgatggcaaaaagcttcggattg

SEQ ID NO: 20139 - DNA, 534 bp, Homo sapiens
  misc_feature 1..534: note = ENST00000524650
  source 1..534: mol_type = unassigned DNA
actctggcagcagctgctgctgcccaacagggattcctcttcccccctggaataacatacaaaccagtgaagtggttcagtcttcctgtgatctctgtaagtcattctaaactacttcttcattttgactttctttggaacattgaagtgataactaccccgtacagttcattccatcaacaatggcagctgctgctgcttctggactcagccctttacagctccagcagctctatgccgctcagctggccagcatgcaggtgtcacctggagcaaagatgccatcaactccacagccaccaaacacagcagggacggtctcacctactgggataaaaaatgaaaagagagggaccagccctgtaactcaagttaaggatgaagcagcagcacagcctctgaatctctcatcccgacccaagacagcagagcctgtaaagtccccaacgtctcccacccagaacctcttcccagccagcaaaaccagccctgtcaatctgccaaacaaaagcagcatccctagccccattggag

SEQ ID NO: 20140 - DNA, 429 bp, Homo sapiens
  misc_feature 1..429: note = ENST00000531297
  source 1..429: mol_type = unassigned DNA
aaaactccccaaagtgtggccatccccttttgactgggtatccttggagttcttaactctgagagttgtgcaccctgagcatccagcagttcgtagatcacagttccaaagttcctaccgacactggttcctgtggaggtttctgttcctgggtttctcctctgattcctcctgcatggaaaaactactttcaaaagattggaaggaaaaaatggaaagactaaataccagtgaacttcttggagaaattaaaggtacacctgagagcctggcagaaaaagaacggcagctctccaccatgattacccagctgatcagtttacgggagcagctactggcagcgcatgatgaacagaaaaaactggcagcgtcacaaattgagaaacaacggcagcaaatggaccttgctcgccaacagcaagaacaggt

SEQ ID NO: 20141 - DNA, 586 bp, Homo sapiens
  misc_feature 1..586: note = ENST00000533411
  source 1..586: mol_type = unassigned DNA
gattattaatccagctagagaagaaatatgcttttacttagcaagaatgagtatccaaagagctgataatattgttaaggcagcggggtggaatggcagagcttgaagaatgtcttccaagcaagccacctctccatttgcctgtgcagctgatggagaggatgcaatgacccaggatttaacctcaagggaaaaggaagagggcagtgatcaacatgtggcctcccatctgcctctgcaccccataatgcacaacaaacctcactctgaggagctaccaacacttgtcagtaccattcaacaagatgctgactgggacagcgttctgtcatctcagcaaagaatggaatcagagaataataagttatgttccctatattccttccgaaatacctctacctcaccacataagcctgacgaagggagtcgggaccgtgagataatgaccagtgttacttttggaaccccagagcgccgcaaagggagtcttgccgatgtggtggacacactgaaacagaagaagcttgaggaaatgactcggactgaacaagaggattcctcctgcatggaaaaactactttcaaaa

SEQ ID NO: 20142 - DNA, 1818 bp, Homo sapiens
  misc_feature 1..1818: note = ENST00000530378
  source 1..1818: mol_type = unassigned DNA
acagtcgtcaccgttgcggcccctcgccgccccggggcactttgggagttgtagttttctgattcattgcatactggcccgaataaaaaagatgtgtccgtgactaaaactacaattcccaggaagccccgaggctcaattcgcgctgtgtggcgggagtgccctcagaggccccgccttcggctggtggaggaagcgttcccgcggatgtgtatggcgaattgttggcacctggatggtaaatcttcaagttactgtgaaacaagatcacaaacgaaaaagtaacataggaaatactaaagactgggacattttatcagattttactcagtttcatatacagaaggctataggactgttttgccggattctaaatgacaacttttaaatcagagccttgaaatctacagaagtccaatatatactgaggaacaaagggaatgtggaaatgaaagagagagggagagagaggctggcagatgtaatgagacgcggtgaaggtgtacgcagactggcactcccactcctcccttctgctctcactgcagccctgggtaactcgcaggctaacacaaacagcttttctcccgcagcctgccctctgtcactgtcactttcatgaattcaaaggcaatttaccagtgatttctgggtgctggggctgatattttttgtgcatatttaagaatgtcttccaagcaagccacctctccatttgcctgtgcagctgatggagaggatgcaatgacccaggatttaacctcaagggaaaaggaagagggcagtgatcaacatgtggcctcccatctgcctctgcaccccataatgcacaacaaacctcactctgaggagctaccaacacttgtcagtaccattcaacaagatgctgactgggacagcgttctgtcatctcagcaaagaatggaatcagagaataataagttatgttccctatattccttccgaaatacctctacctcaccacataagcctgacgaagggagtcgggaccgtgagataatgaccagtgttacttttggaaccccagagcgccgcaaagggagtcttgccgatgtggtggacacactgaaacagaagaagcttgaggaaatgactcggactgaacaagaggcaagtctttctttcaagatttctggagtaccttagttattttaaaccataactgctgaaaggagaataacatgaatctagagaactttttaaaaagtaactgaaattatcgaacattagcagcattgaatagagtttcctctctgacataacaagaaaatatggacaaaatactctagttctaaagtgtacaacttacatatgaagaaatgctacaggaatttcccttaagatcaggaacaaggccaagctgcccactgtcaccactatattcaacatttttctgaaggagggtaaattcagcctccgtcttggctagaagtgggtaatccaagtaatgcaaattaaaactatattgagatgacaattctagctcattgaattgttgaaaattaaagatgtgaaacacattcttctgtcaaggttgtgaagaaacaggtattctattttggagggcatggaagttattataagtctttcagaaacaaatttcacagcatctgtcaaaacaacatatacactttcttttgatccagtagtcctcttcttggaatttaccctgaagatacaccttcagtgatatgaaaaaagatatgcaaaaagctgtttgttgacttattatttgtaattgcaaacaacctacatatgcatataggagagtgattaaataaattatgctgcagtccc

SEQ ID NO: 20143 - DNA, 7224 bp, Homo sapiens
  misc_feature 1..7224: note = ENST00000533870
  source 1..7224: mol_type = unassigned DNA
ctgttttttttctgcagaagaatgtcttccaagcaagccacctctccatttgcctgtgcagctgatggagaggatgcaatgacccaggatttaacctcaagggaaaaggaagagggcagtgatcaacatgtggcctcccatctgcctctgcaccccataatgcacaacaaacctcactctgaggagctaccaacacttgtcagtaccattcaacaagatgctgactgggacagcgttctgtcatctcagcaaagaatggaatcagagaataataagttatgttccctatattccttccgaaatacctctacctcaccacataagcctgacgaagggagtcgggaccgtgagataatgaccagtgttacttttggaaccccagagcgccgcaaagggagtcttgccgatgtggtggacacactgaaacagaagaagcttgaggaaatgactcggactgaacaagaggaatggagagttagagggcttcaaacattgttaaaactgaaagtatatgagtgacttctttgatacatgacatctcttgcaacatcccacatctaccttctctactctgtacaagagttcactcaggttcgtgtacatcctagaaaacaaatgaaagaagactctccaataatatttttaaacaaagtaaatcaagtctaagtgatggttatactatgttgcacttttggtttttatgtacagattttaggccttaaaatgtagagtaattaatagttctggatttattactagcattgcaagttaaattgagacttttgttttttactatagacaaattgggatttgatattagggaatttttcatgtaacttaattttattcctttgagggctcaaaaacttaaaagattccaattaattttcgtagaagtctttctaaaatatattgcatgcttccctgttttactaatcaggtaatatgacacaaaatgtatatattttttgatgacctagggtcataatacagtagactaggaacttcagtacccttcaaacaattatgtcaccctgggtaaattcttcaatctactcgagccacaaaatttaaaatttggttactgagtttgcaacttaaacattttgaggattaataataataatgaatatgtcttgaattaactgtaaactatatgaatattaactataaacttatacatttggcttattgtattatattatatataacatatataactgatatattataaatgtcaattattttactgtgctataataatgcccctagtgatcattgagattattagcactttgattttatggttatttttcaattatgaaacttaagagtttttgtgtctgcttgatatatatatctttttgtatatatgtatttttttggtgtgtgtgttggtttctccttcaatatcaggttgcaggctattatttcttgcttagttgcaaataatttctaattttctcctatttacctatagattataaaattagataatcaggaaattctggactgtatttgaaatatgaacaagtatgttctggaggtgttgctgagagattctgggaaatacatatgatctttagtgcatgaactacatgctgacacttttggcttctgaggctttgttgtccacatttttggctatgttctgaataatggggattgccagataattatctactgaataagtaagatcactagattacttttaattgtgatccaccaaaagatggtttcagttctataagtaagtggttttcaaaatactttggaggagtctttaatgtaaaaataaaggcattgattgatgatgatttttttcctgaactactagggaattttaaatcattttttccttgcaagtaatggttaattttctcttcgtcctctttgttaccatgtgttacagttgattttgtataagagagacacttacagaatgagacagtagtcctttaagagtcatttattactgtatttctactagtaatgaatgttttcatactctacagatttttttttgcaatatgtatgttttagacatcagaaattcaggcatctttagtatatattaatgtatataatataaatatattaaatgcagatattaaatgaccaaaaacatgctcatcaaatttacctatctcacaaatctggaacagtgaatataacggattaaagaaacaaaacttaaaatgttttgacaaactgaaactatgaacttaaaaataacctaccaagataaaatttaatagatcttattatcaagttcagaagttgtgacccaaatcccagctgcacaagtaattactgaagaaaattcaaataacagccagatgaatgattaaaaaaaaaaacctatgagttttaagtgacagaaaatgcaatggggtcagcatagtgaatattgccaaaaaaattgccagtgctatttcagtcagcatcactagaagtacagtatgatgcattcaagagttggtagtcccactaaactcactgctcaatagaatgtttgtgaagtattgtgttgagttcagaattaccacactttaagaggaactcaaaggcattgggatattctcagagaacaattggtataatcgcagagatgaaattatataagaagaagaatggttgaaggaattagtaatactaaccccagagaaaagcaaatcaaggatgacatgatggtgtctttaaagattcaagtcacatggaggagggattgggtttatactgtctagcttcctggggatagaatacagatcagtgacaagaagttatgaggaacctgattatggctgataagaccaactagctaacagctgtagctgtctatatggaatattctcccttggaagatagtaactgatctatccttagagatatgcagcaatctctattgtcattttaatagaggtgttgtagaggacagaagtttgatcttttttccaatgccaagactatgaatttttatgaacattcttataaaatattctacagtttatggtatatctttttttttacagcacttttcaaggactacatagtattgtgattatttttctacatattcttcttctgtgaaatgcattttattaaaactcaaggattcttaatttttctttctgtgaatccctttgatagtctagtgaagcctacagatctttttttaaaaattattttaaatgcataaggtaaaatacacagattacagagaaaatgaatcatattaaaacagtaaataggccaggcacggtggctcactttgggaggctgaggcgggcagctcacgaggtcaggagatcaagaccatcctggccaacatggtgaaacctcatctctactaaaaatacaaaaattagccaggcatggtggcaagtacctatagtcccagctacttgggaggctgaggcagaagaattgcttgaacccgggaggcagaggctgcagtgagctgagatcatgccactgcacttcagcctgggtgacagagcgagactctgtctcaaaacaaacaaacaaacaaacaaccagtaaataatttaaaacatttgtgatatggtagaatatgctattccactaatgcattaagaaaacaagatcttatagagggcctaacagtataataattttgaaatagtgataagcgtaaaagatattttgagatatctccaagtataatgtaatataaaatatcaattgtgatactattggtgacaatgtcataggaaccacaaatacagtatggtttgttacttgcatccataatttaaggaaatgtaaattttcaatacagtctagtgaaaaataatttttccacaaaagtttacagaccccttgaattctatctatgtctgctggagtctgtggaccaccagttaagaatccctatgctagatgatatggtacacccataatgaataaaacaatggtctctaacttttaataattcatattccagtaagagatataaggcatataaaaatgaactctaattcagtttctagtatataataaattccatagagctatatagataaaatattatgggaatttactagatagaaaaattacttctgccttggaagccattggaaggttctgtagggaaatgggtcttagttggtcttggagaatgaaaggatttatatagacagaaattgagaggagaaacatttcaggcagaaagaataggcagaggactttaaaacggccaatagttcaggttctaaattaaaaaaagaagatgcatatgggatataagactgaaaaagtaggttgtgttcagatcatggaggccctttgactcttgcctaaggagtttgaactttatattgaaggcaatggaggaaccactgactgttttttagcacaataagttggtggattagagctttctttcaggaaagttaatctggctgcactgtttaggatgaatgggagcagggagagacattaaggaaattgtttcaagctagagataatgagggtctgctgaacgaaggcagcagaaatgaggaaggaagggggatgcatatggaaaagatattaagagatagaattgttaagagttaatgtttaagtgtagagaccaagacagaagaatggttcaaagagtgctcagaatttttaaactctgggcaaataggaacgtggtaatacaattaaaaaaaaaaaaaaaggaggaacatgttttggacatgggagcaatgagaatttttttattctgagtttggtatcttgagtttgaatcctaattttgattatctacttggagcatagtatagaatagcataatgggagaacagaaataattatagaaagggtcattaaaaagtttaggatagatttctgcttctcaaataattatattctaggtctaaggaggtataacagctccaccaatatttgcctgacattgatcctttaaagttccaggtccatctcctcatttgggatgtattatctcattggacacctaaaagtcttcaaatgcattacccacctctccctcacatctacttcatggtttgagggccatatttcatgattagctgagagacaagcctgtgtgattgacatgataaatgattacctttcttgcattattcttgttctggagaatatttttactctttatcagactaaatacctctccctcatttgccctcatctacaagaactgatctgtaaaaagttcattatggtccttttaaaaactatatttgcatgatgaaacaaaaactctccaggcagatgctttgatcaaccaaattgtccagtgtttaatctgctattccttcaagaaatgccctctcctgagcagtgatttgaccagattgtaaaacattgttgaacaagggtgctacatctgaagtgccccctctgaaactgagacttatgggaagataggcaaagtttctgtcttttgtaaatttaactttgatttagtattatagattggtaaattggtatgtaggtaggtagacagatccatagatggattgaatgattgaatgtcagaaaccaccttttaaaacattggtagatagagtgtacaggaaagctttgattaatagattcaggttaagatgcttccaaggctaaaattcttcagctataataaaatgatgaattttagttatccttgtatcacccgtcttgttgccaatatagctgggctctaacataagcgacagaaaatgaatactttaaaaaggacttctatatctaaatacatatatttaatcagagagtcctttggcttctgaaaataagttgtctaatgagaatttcacttgagcagctgtgactgaggaggtcaacaggcactgcctaggagaatatggcccagctggttaaatctggttgttgtcgtgatttaaatggtcaagtgctgcttgtaatccaggaccgtctgtttgtaaagggaagagtgagtgcttcagcataatgtacagctgttttaatctctctttaataatagtgcttcagccactatcatgtcttgtgtatcatactactaagtatatgatcctaggccgagggccctggtttgagtcaggttctggagtcatgtgagattgcaggaaaagggatacaatgataaaactctcaactgtctgacaaaataaaactaaattcctgactctatggctctttttaaaaacttattctttaggtaataattattgtgattaggagagagtgacaaagcttgtagttaggtagaaatattagaataaatgaactctctttgttagagccataaatgtaatggaaagtatgcaggctttgatacaattccataggacatacattggtcagaaattagagtatttgcccagtggaattgtgtgctttctgctatcatggtaataaaagtatgtggattcattttactgtgcatgtaagaagggacagcagcatttgagctttgaattcctggtgggacaggctttccaatggattatgcagctgtttcccagcacaagaatgagcatgtgtttatgtgtatatttgatggattattatcattgttcacatctctaaacaatcatttgtatttctacatatattttcactgaaatatatttactttgcttataagttgtgttttgctcctctgatagactttgctctactaaaagagatatatggtatagtttaaacaatgaggaaattcatttttaaaagtcatgtctttgagctagatctgagtttgaatctaagttttaatatttagagagacagtatagcctactgagtgtagactctggagctaggttgcctgtgtttgaatttcacttcagcatttcctagatggatgacatagagcatgttacttgatctctctgcttcagtttctcaaccaaaaaatgagtatctttacagtgttataaggatcaaggttttcatgaagatgaataattagttaaggcaactaaagcatttagaacattgccagctcaaagtaggtgctcaataaatgtagccagcattatttcctggttgtgtgactttggacaaattaatctctttgtgcttcagttccctcatctgtaaatctgtatgaatgatacctgccttgcagggttattgtgaggatttgacatattaatatatacaatatttagcttctgtaattataactattactagtattgctattataactactattgctgttattatttgaagaaacttttaaaaaagaaa

SEQ ID NO: 20144 - DNA, 1202 bp, Homo sapiens
  misc_feature 1..1202: note = ENST00000533658
  source 1..1202: mol_type = unassigned DNA
atacgtagacaatatccaacctggacaaaacgggcttcccttgcgagccgacctaaaccgcatcccccaaagaatagagactaaatgcaaagtgagaagaaacagttgaaggactaggaagaggatcctctagggatgagctggtcactttcatgaattcaaaggcaatttaccagtgatttctgggtgctggggctgatattttttgtgcatatttctcacacagtttgatataaacttaagtgaatgaattcattaataaaagcagattttctatttttatttcacctctgggctattttatacctttggagcacacaagcacaacaaaagaagaatgtcttccaagcaagccacctctccatttgcctgtgcagctgatggagaggatgcaatgacccaggatttaacctcaagggaaaaggaagagggcagtgatcaacatgtggcctcccatctgcctctgcaccccataatgcacaacaaacctcactctgaggagctaccaacacttgtcagtaccattcaacaagatgctgactgggacagcgttctgtcatctcagcaaagaatggaatcagagaataataagttatgttccctatattccttccgaaatacctctacctcaccacataagcctgacgaagggagtcgggaccgtgagataatgaccagtgttacttttggaaccccagagcgccgcaaagggagtcttgccgatgtggtggacacactgaaacagaagaagcttgaggaaatgactcggactgaacaagagggtatgtgtggacttcactgttgggctctgttttttttcttctaaagattccaggccttaaaaaaaaaaaaaaagtgggatttcaagggtcagagaagtgcataattgtcactagctaggaaaaagttattcagaggttactatggtgatggcagattttgatccattaggagtgttaaacagatagctccgtttttctaaaactttgtgcattttatttggttcttaagataacaaattaggattttaaactgaccataatcctactctggaaaaaggtaacaagagaattttcctaactgcaactttatttttcattttttctcccctatttccttttggtggatagtatttctttataaaaatgtcaactgtttaaaaagcaaaattaaaaatatttctcttcatttttataaatata

SEQ ID NO: 20145 - DNA, 534 bp, Homo sapiens
  misc_feature 1..534: note = ENST00000526673
  source 1..534: mol_type = unassigned DNA
gtggaggtagaggatgatttcaattagaaataatgacagcaatagacgcttccaatgaagatatcgtggccaccaaaggacaaaggcaagaagttaattcctgaagtcgagaagaatgtcttccaagcaagccacctctccatttgcctgtgcagctgatggagaggatgcaatgacccaggatttaacctcaagggaaaaggaagagggcagtgatcaacatgtggcctcccatctgcctctgcaccccataatgcacaacaaacctcactctgaggagctaccaacacttgtcagtaccattcaacaagatgctgactgggacagcgttctgtcatctcagcaaagaatggaatcagagaataataagttatgttccctatattccttccgaaatacctctacctcaccacataagcctgacgaagggagtcgggaccgtgagataatgaccagtgttacttttggaaccccagagcgccgcaaagggagtcttgccgatgtggtggacacactgaaacagaagaagcttga

SEQ ID NO: 20146 - DNA, 549 bp, Homo sapiens
  misc_feature 1..549: note = ENST00000529469
  source 1..549: mol_type = unassigned DNA
aaagaaagagcaagccccataatggcagcatctttatcttgcacactagtctgtctcttgtgcctgtaacaatgccaggaactttagtaactatttttttttgaattttgacaatcttggtcgacaagggtaaaaaaggacattccagaagcagaaaaacatgagcaaaagtatggagacatcaaaggtcatggcatatgttcgtttatcatggctggaatgaggggtatgaggaagatgactgagagtgtgtactttggagtcagtcagagcagagttgacttcattttatgctacctttatgattaagaatgtcttccaagcaagccacctctccatttgcctgtgcagctgatggagaggatgcaatgacccaggatttaacctcaagggaaaaggaagagggcagtgatcaacatgtggcctcccatctgcctctgcaccccataatgcacaacaaacctcactctgaggagctaccaacacttgtcagtaccattcaacaagatgctgactgggacagcgttctgtcatctcagcaaagaatgg

SEQ ID NO: 20147 - DNA, 660 bp, Homo sapiens
  misc_feature 1..660: note = ENST00000525835
  source 1..660: mol_type = unassigned DNA
gaatacttacgacatggccgctcacactgattgccaagattgacagcactaaccatcgccttcacttgttccagggtgaagcccctagtcaccccgctccgcgcgcacctcctggaaccccggcggcaaacttctgccgctctgcgctgcccccacccggggcgggacacccccgcagacttgagttaacgggctacgccggccgcggcgctggggggttctgttcccttgctccccggactgtgacaattgacctagcaccgactccccttccttttaattttttttatttgtatctttccctttttctttaatgccatttactcctgcggcgcagcgcacaaggagccctcccgcgcggtaccatcctggagcccgcccaggtaaccgggacggagcgagcgatctcgagagcgagggaggcagagccagggcgcgcggcccgctgtgagctacctgttggggcgccggagggggcagggggcaggagcccagggccgggccgccgtcccccggcgtcttccgctcctgcccttccgggcactccagggtcactttcatgaattcaaaggcaatttaccagtgatttctgggtgctggggctgatattttttgtgcatatttctcacacagtttgatataaacttaagtgaatgaatt

SEQ ID NO: 20148 - DNA, 709 bp, Homo sapiens
  misc_feature 1..709: note = ENST00000524520
  source 1..709: mol_type = unassigned DNA
acagtcgtcaccgttgcggcccctcgccgccccggggcactttgggagttgtagttttctgattcattgcatactggcccgaataaaaaagatgtgtccgtgactaaaactacaattcccaggaagccccgaggctcaattcgcgctgtgtggcgggagtgccctcagaggccccgccttcggctggtggaggaagcgttcccgcggatgtgtatggcgaattgttggcacctggatggtaaatcttcaagttactgtgaaacaagatcacaaacgaaaaagtaacataggaaatactaaagactgggacattttatcagattttactcagtttcatatacagaaggctataggactgttttgccggattctaaatgacaacttttaaatcagagccttgaaatctacagaagtccaatatatactgaggaacaaagggaatgtggaaatgaaagagagagggagagagaggctggcagatgtaatgagacgcggtgaaggtgtacgcagactggcactcccactcctcccttctgctctcactgcagccctgggtaactcgcaggctaacacaaacagcttttctcccgcagcctgccctctgtcactgtcactttcatgaattcaaaggcaatttaccagtgatttctgggtgctggggctgatattttttgtgcatatttctcacacagtttgatataaacttaag

SEQ ID NO: 20149 - DNA, 574 bp, Homo sapiens
  misc_feature 1..574: note = ENST00000525259
  source 1..574: mol_type = unassigned DNA
atttctctccgaattcccaacacccggcagtgcagtaaatatttaacgggttactttaagggataaaccgtttgctattaaaacctatgaggtgagggctgaggaagggaacggcatttgatggggagacgagaattgttggcacctggatggtaaatcttcaagttactgtgaaacaagatcacaaacgaaaaagtaacataggaaatactaaagactgggacattttatcagattttactcagtttcatatacagaaggctataggactgttttgccggattctaaatgacaacttttaaatcagagccttgaaatctacagaagtccaatatatactgaggaacaaagggaatgtggaaatgaaagagagagggagagagaggctggcagatgtaatgagacgcggtgaaggtgtacgcagactggcactcccactcctcccttctgctctcactgcagccctgggtaactcgcaggctaacacaaacagcttttctcccgcagcctgccctctgtcactgtcactttcatgaattcaaaggcaatttaccagtgatttctgggtgctggg

SEQ ID NO: 20150 - DNA, 8865 bp, Homo sapiens
  misc_feature 1..8865: note = ENST00000396356
  source 1..8865: mol_type = unassigned DNA
gtcactttcatgaattcaaaggcaatttaccagtgatttctgggtgctggggctgatattttttgtgcatatttaagaatgtcttccaagcaagccacctctccatttgcctgtgcagctgatggagaggatgcaatgacccaggatttaacctcaagggaaaaggaagagggcagtgatcaacatgtggcctcccatctgcctctgcaccccataatgcacaacaaacctcactctgaggagctaccaacacttgtcagtaccattcaacaagatgctgactgggacagcgttctgtcatctcagcaaagaatggaatcagagaataataagttatgttccctatattccttccgaaatacctctacctcaccacataagcctgacgaagggagtcgggaccgtgagataatgaccagtgttacttttggaaccccagagcgccgcaaagggagtcttgccgatgtggtggacacactgaaacagaagaagcttgaggaaatgactcggactgaacaagaggattcctcctgcatggaaaaactactttcaaaagattggaaggaaaaaatggaaagactaaataccagtgaacttcttggagaaattaaaggtacacctgagagcctggcagaaaaagaacggcagctctccaccatgattacccagctgatcagtttacgggagcagctactggcagcgcatgatgaacagaaaaaactggcagcgtcacaaattgagaaacaacggcagcaaatggaccttgctcgccaacagcaagaacagattgcgagacaacagcagcaacttctgcaacagcagcacaaaattaatctcctgcagcaacagatccaggttcagggtcacatgcctccgctcatgatcccaatttttccacatgaccagcggactctggcagcagctgctgctgcccaacagggattcctcttcccccctggaataacatacaaaccaggtgataactaccccgtacagttcattccatcaacaatggcagctgctgctgcttctggactcagccctttacagctccagaagggtcatgtctcccacccacaaattaaccaaaggctaaagggcctaagtgaccgttttggcaggaatttggacacctttgaacatggtggtggccactcttacaaccacaaacagattgagcagctctatgccgctcagctggccagcatgcaggtgtcacctggagcaaagatgccatcaactccacagccaccaaacacagcagggacggtctcacctactgggataaaaaatgaaaagagagggaccagccctgtaactcaagttaaggatgaagcagcagcacagcctctgaatctctcatcccgacccaagacagcagagcctgtaaagtccccaacgtctcccacccagaacctcttcccagccagcaaaaccagccctgtcaatctgccaaacaaaagcagcatccctagccccattggaggaagcctgggaagaggatcctctttagatatcctatctagtctcaactcccctgccctttttggggatcaggatacagtgatgaaagccattcaggaggcgcggaagatgcgagagcagatccagcgggagcaacagcagcaacagccacatggtgttgacgggaaactgtcctccataaataatatggggctgaacagctgcaggaatgaaaaggaaagaacgcgctttgagaatttggggccccagttaacgggaaagtcaaatgaagatggaaaactgggcccaggtgtcatcgaccttactcggccagaagatgcagagggaggtgccactgtggctgaagcacgagtctacagggacgcccgcggccgtgccagcagcgagccacacattaagcgaccaatgaatgcattcatggtttgggcaaaggatgagaggagaaaaatccttcaggccttccccgacatgcataactccaacattagcaaaatcttaggatctcgctggaaatcaatgtccaaccaggagaagcaaccttattatgaagagcaggcccggctaagcaagatccacttagagaagtacccaaactataaatacaaaccccgaccgaaacgcacctgcattgttgatggcaaaaagcttcggattggggagtataagcaactgatgaggtctcggagacaggagatgaggcagttctttactgtggggcaacagcctcagattccaatcaccacaggaacaggtgttgtgtatcctggtgctatcactatggcaactaccacaccatcgcctcagatgacatctgactgctctagcacctcggccagcccggagcccagcctcccggtcatccagagcacttatggtatgaagacagatggcggaagcctagctggaaatgaaatgatcaatggagaggatgaaatggaaatgtatgatgactatgaagatgaccccaaatcagactatagcagtgaaaatgaagccccggaggctgtcagtgccaactgaggagtttttgtttgctgaattaaagtactctgacatttcacccccctccccaacaaagagttattaaagagcccgcatgcatttgtggctccacaattacatcagcagaatggtcttaattgtttcgtaaagtgtgagacagattaagttttccctgatttttcatgaacttgagttttttgttgttattgttattgttgttgttgttgtttttttaatttaggtgaagacatattaaatatgagacaccaggacttgaaacttatctcaacccgtagatgtcttacaagtcttatatttttgtcttactttttttttcttttggatgttgataaaggtttaagttactgttttagatggggttaaacattctcactcaggtatgctgtgccggcctacaggttgtgaatgtgtttttattctgaattattttagaaaacaactgaggatttcatattgtgaaacagaacaagtccacggcgtgtgcagctgcatgtagagcatattcaaaaggcctcggaattccaattttccatttgtagagttaaactttgaatgtgccaaactttttcgtaacttttgaatcttaatattttgaaagtcttaaaggagacactgcaaagtcttagacaatctttggcatcttaaaataaaatagcaaaccaacatttttttttccagaaaatggtaaggtactcaggaatctggagacaagatattgtaaggaatgaacaaggttgccacagtgcatggacccaattgtgtttgcctgttgacgtgccatcagtgcgtgatgtggtatgacatacacacaccagagcaaccgccacaccagatatcgacagagtggtcttctctgcctgagaccacctctcactacatccattatccctttgcctttaaccctgacattcagtcttaacacattttatcttaaataatttattcattccagaatgtcaagggtccacttgctatttattttttttcaattgttggtggcattaatttaataattcttgtttttcaccttccttccccgaagaacttttccgtccttttcacctccttctcctgtgtacatagtgattttatgtccccagaacgcctggaagcatttctgaaaccaagatattattaaaaacctattattgtttttaatcatgagtatgtatctggctgcagggctgtgtattgggatataggtatatagtcttacacttaaacaggtatgcccctgaggttcactgtgacctcaagtcttttgccagaattttcccctaattcagttcacaagtggtagggtctgcatcagtggcatttccccctgaattccattcagcagcaaggttcaacagtggtgactgccaggcaggagagtcctgcggccaaacctgaagcccaaggctcgtgggccatgcaggaatctcagtgaagctgtcatgggctggcacctttacactgagttgccttgtcccagctggcacatctagggagttcattgcaaaatccccaggatgcaaaaagccacatgacagcctcagagcaaagatggtggcaaatagtcatgatacatctagagaatgaaagaaaactgtaagggaggagaaggaggggaatacattccctatatgggatgttcctactgttaactctggggaacagatagctccgggggcagcagatgagttcctctggctgactctatctgtagccacatggggacctgcctacgtgtgaacaaaatgaactgcacttatcacacaaggatttctttgaagacatgctactggggtgggaagcagtgaggttttattccccatctcctaactacagggagctctgccatgtcattttggccttcctgaaactaggacaggttgtctatcggggggcttcccccagagaggtttagtgggagaatgtcagtgaatgggatagttcacctcatgggacaacccagaatctgatcaccaggacataggaatggccccatcagatttcttgagccattttgtcacttggaagaaaatagtgtacctttgtatttatttaagagtgctcaaggcctaatagcaataaacaggtctagccaagaaattacaagctattctgttagctgggagtgctctctataagctgattaaggtactgataggaactctttgttattcatgttggttggggattagaaatttgtttttgtacatttatttcaaatgaggaggaggtcattttttctctcaaaaaatgagtatttattattgtcttactgatttctttgattatatacctctcctcctcagttcactcttgttttttttctttctctttggcttttgcttttgctctctctcacttctttcttattttgttgcattggtagagtgttgtatggctagcattgtattgtatgtaattaattttgcacaaaagcaaacatttagcatagtaggttaattttgtttgtttttatgaccatgccaaaataatattctgggctggtggagaacaaaggactgttctttaggactgaaacttgattttgctcatagtaagtaaaaaaaaacaaaaaacacacacactcacagatgttgtttcgtaagtgttataagcactggatataaatggtattttttatcacttctgactaatgtgaaactgttgtacgaaaactacatgaacaaaagtcatctgtttcgactcgtgtgggcttgcctcacagttgccggatttgagtcatttttatgtcttgttatttcatttatttatgcaaaatacatgtgtgtatgaacactttgttttagctccagctctgcctcagtactggggttcatttacttttagccatgttcttaaaaatgaaaggctattcaggaatgatctgattgtaaacgtctttttcattggatcaaacagtaatgctgtatttgaatctaaattttgtgtataagcagtttatttattagccaagtttggctctaaatatccatggaaattaagaatgacaatcatagggatcaattcattttattttcagtggggcttaaacaaagtttatatgactttaccatctcattttagatttttctaattgtgtaaatataacatagaaatagaatttatttttggttcatgaatacttagtgagatataagttatgtatttcctttttgttctctatccatagatgttggtccaaactgaaagttgatgagtcactgtgcctctcggggtagtgagttatcagctacagtgagagagcagtgtttggcctgcagctgggacagcaaaacgtttcaccagggttctcatgcagttcagaacccactgtccacagatccagacatttcccttttttcttacagaaagttgatgattggacatactaaatttccactacagttaggagacagtcagtttgctttgggagtctacataaatcttctaagatagttctgtgaccatttaatagcaagaagcatgaatgccactacaaaggcaaaaatccacctctgagatcggccgttaataaacgtcccgtcatgtcagtttagattcaagaatgttaagcaactttgtttttgcggtgctccctatttcatagtatcttcaaatcaaaaataaaaattatctccattttgttaaagaacttacagggtcagggttctccttgtcacttagaattgggacactgccaggcaatcctctcccaaaaaaaaaaaaaaaaaaaaatagccatatggaatggaaggaaaaggagaaaagaaggaagaaaggaaaaaagtaggaagggagagagaaaaaaaaggtcgctttgcggatacgagccgctaggctgacaacttttctatttcattggcagatatgaagcagtgtcttttccagtaaggtacggaagctttgttgttttcatgtgtacccagctcagccttttagaagcacctcggtttgcttcattaggtatttgatactctccagccttgtcctcaggcctgatttgatttgccagggtcctgacaccaaagcccaggccaagttctaaattcaggtgtgggctcacagtgctattgagcttgtcgaattctggcctcccctgaacattagccccacgggagcctgagggtgtttgaaaagggcgtgatcactctagggctgaaattaaaggctgctttcttttccttctgaagccaggctgcttcttcggagtacaccctcctgagccaggagcacaagcactagcagaaagcagggattgtttcaggaaagcccatttaccctcagtaggaaggcagcctggtcacttgaacagcacagctgaggctgcttctctcaatttactcattttgcaaagaattgacctctaccaactcattagggagaggaaaaagaatcacttagtaattttaaatcatatgagaagtcctgtaccaagtgccaacaactgcaaagaaatgcagctagaggaatgtattgaaattactactgggtcttcctttttaatgagaaaatgacaaaaatggttgctgtagccctgcctgattttgtacacgtttgtctaagaattgagttggcacttaagctcacttctcaaagtataataatattgtatgacctcatttgtcctttcacaaaagcacttgcatcatttccttaagtcatctgctccctgacatgttttcttccctaataaacaacttctgtctgttattcctgccaatgatgttctgtttctgatgccatatcctattgagcgtgcccctgtactaatatcattgaaaatattgatatgcaaacacatttccttttcatccccattctatctttccctttggggacagattgctttccaaaagctcatgaacaaatatttggaatgctggtacctttggggcagaggtaagggtgggcggggtgggggcagaaaggtaatgcttaatgcagataactcttctaatcagtgtccatggcaatatgaacgcttgaagaaaactcagtgacatatcttgctcagtagtttcttattcctgaagaaccacaagcataaagtgaggcctcagtgctggtgctcttggagtatggggaatgtgcaaatatttaactgttttgtatgctgcacattgcaggtctgctcatgtgcattctccctttgtcttcctttgtcatatgtgtttttgcttttttgaaagtgcagtctttattgtaccctcctccagcttgtagcaaattagaatgcttagcatttatgttcattcattattgtatttgccatgtaaaatttttattaccttagacaagcttataagctgttactacataacttatcttactgtaactcttttatttcccccgacgttgtaatttgtttgtgatgtatattgtgaaattgtattctatgttaatttaatcagcacaattcactgacatgctggactgacatgctggctgctgtttcaaagtgtaaagtttgtgtagggctgttgggacaactgcaactctgttgtcaaggtactgtgctttggttcctatagcaacactgggtgtggcccttgaattgctaagggcatttaatacatcctggagcaaattttaactgcagattttctttgtagaaattctatgtataatgcaggtacctacttggcccatggctggtaactatttgggcaattagaaaaaaagaaaaaaacataaaaactagtgtctattgctgctttgaatatgtttgaaagtctgaaaatgtaaatagtttatcaaaaaaaaatcttgtacagtccagtgtaaagtttttaaatgaccttaagggttgccatcacatctttctcacactctcctcttgataataataataataaaaagtttgctaaggattaaagaaatgggaaaaataaaaaaaatctcttcaaatttacaggaatgaatcattgttcttagctttgttgcatacacaaacttcttggattttgttgtgcagtattgacgtgagataaagctcaacattgaataatctttcagtggtacttttcaaagtcttcccctcctctgcctcataattaagggaaaagacaaaattgaaagacacactgtctttatctatcctggtgtatgttggcaccttagctactttttttttttcctttttgcacaaggtgctttcctgatatgttcaacatgccatctttgggtgataatgtatatgccgtgatggggctcaggccccttaggggagtgtctataagaactgcctatttatgctcatttacctcaagactgtcctctctaccctaatctagttgtcatcactccatcttttgtactgctgttgacacttacaaattaaagataaattttgttttatga

SEQ ID NO: 20151 - DNA, 3049 bp, Homo sapiens
  misc_feature 1..3049: note = ENST00000293894
  source 1..3049: mol_type = unassigned DNA
ggcgagggtcggggccaccgcgcggcgacctcgggtcccggagcgaccgcagggcagccccgggcgccggccccggtgcgcgtctcctgtgcgcgcccctccgcgcgcggccccgatgctggacatgagcgaggcccgctcccagccgccctgcagcccgtccggcaccgccagctccatgtcgcacgtggaggactcggactcggacgcgccgccgtctcccgccggctccgagggcctgggccgcgcgggggtcgcggtggggggcgcccggggcgacccggcggaggcggcggacgagcgcttcccggcctgcatccgcgacgccgtgtcgcaggtgctcaagggctacgactggagtctggtgcccatgccggtgcgcggcggcggcggcggcgcgctcaaagccaagccgcatgtgaagcggcccatgaacgcattcatggtgtgggcgcaggcggcgcgccgcaagctggccgaccagtacccgcacctgcacaacgccgagctcagcaagacgctgggcaagctgtggcgcttgctgagcgagagcgagaagcggcccttcgtggaggaggcagagcgccttcgcgtgcagcacaagaaggaccaccccgactacaagtaccagccacggcgcaggaagagcgccaaagccggccacagcgactccgactcgggcgcggagctgggaccccaccctggcggcggtgccgtgtacaaggctgaagcagggcttggagatgggcaccaccatggcgaccacacagggcagacccacgggccgcccaccccgcccaccacccccaagacggagctgcagcaggcgggcgccaagccggagctgaagctggagggacgccggccggtggacagcgggcgccagaacatcgacttcagcaacgtggacatctcggagctcagcagcgaggtcatgggcaccatggacgccttcgacgtccacgagttcgaccagtacctgcccctgggcggccccgccccacccgagccgggccaggcctatgggggcgcctacttccacgccggggcgtcccccgtgtgggcccacaagagtgccccgtcggcctccgcgtcgcccaccgagacgggtcccccacggccgcacatcaagacggagcagccgagccccggccactacggcgaccagccccgaggctcgcccgactacggttcctgcagcggccagtccagcgccaccccggccgcccccgccggccccttcgccggctcacagggcgactatggcgacctgcaggcctccagctactatggtgcctaccctggctacgcacccggcctctaccagtacccctgcttccactcgccgcgccggccctacgcctcacccctgctcaacggcctggccctgccgcccgcccacagccccaccagtcactgggaccagccggtgtacaccaccctgaccaggccctgagggcccagccgcggggagggactcgcaggcgtcagggggcagccttgtcccggcccagtgtgtgtgaccagggcgggaggggccccagtggctgagctccaagtgcctgctgaagtctgcagggaaacacgcttgctgcccgtggccctcggcctccagatggccacacctctgccgacgacggaccagctccctctcccttctatctttctttttgaggtggtgggattattccacaaagaagggctgccgtttggtccctcttccgtgaggactggcggcaccagcaccttcgctttgcatctcggtagaggagaaacggcagcacagcccaaggaccaaaggagggggtggcaggggccttgcagggcgctgtgaggtccaggccggtcttggcgccgagagcccctgcactcaaggccacattccctcgacaacggctgcacgggctgtccgggatccggggtgtctgtccgcagactgggatgagtctactcgagcatctccgggacctgcctgtcagatctgaggtgtctccttgctggcagagtgcgctcacgcgagggctggctgtgatgaacacatctctcttttatttttatgtttttgataatttttatttttgaagcttaaatgtgtttcttctgaaagctgttaaagatgtatttatgttctgtgttattttatctttaattaatgaggtaattcgggcaaagagtagaatttaagacaaaacggaagctgggaagcttcccttgagggcaggcaggaggtggagttgcagctgttggccggcatcacgttgctcgttgctcggcttatgggaggccgccctggagggcccggaggtcccaaggtccctgggaggactgggcccctcatgcctcgagcttggcaaccgaaaacccgagggaggagaagggacctgccttgtgacatctctgatcaggttggggtgccccagcacccagtaccagtttggggtttgggaagcaggactccgtccctgtccccgactgtgccacgtggtaggacacataggacacaggaattcctgggtccttgcccatgactgtgccatgtggtaggacacaggacacaggaattcctggaaagtggtggcttcagaagtgatcttggctcgcaggcaccagtgccacctaccaagctgtgaaactaaaccttctccactaaacgtcgttagggcctcagttctagacgagtcatacctgattcacctgcactgcttcccctgtgtgctgagcatagagcatacaatagcgcctacttcacggaaacttgtgcctttaaactttgtaaacttaaacacagccgagaagttgcttctttgtactttttctacttttcctacttttttgtagaaaaaaaagataatgcctctgcttctatttctctgggggtgggggtgggggccgggagccgtcgcagacccgtttcatgcagcgtctcccttggcaccgcgttcggaggacgcaccctcactcccctgctgccttcactcctttctgaccaagcaacgctaacttttgtacagatcgatttgataaaattaaacaaagtgctttttatgga

SEQ ID NO: 20152 - DNA, 4153 bp, Homo sapiens
  misc_feature 1..4153: note = ENST00000566034
  source 1..4153: mol_type = unassigned DNA
acccggcggaggcggcggacgagcgcttcccggcctgcatccgcgacgccgtgtcgcaggtgctcaagggctacgactggagtctggtgcccatgccggtgcgcggcggcggcggcggcgcgctcaaagccaagccgcatgtgaagcggcccatgaacgcattcatggtgtgggcgcaggcggcgcgccgcaagctggccgaccagtacccgcacctgcacaacgccgagctcagcaagacgctgggcaagctgtggcggtgagtgccggcgccccgggggcggggttcgggaccttggccgcccctggtctcggactgcgagcgggggcctggagggcgcagagctcgcggaggtggtggccacacgcaggctccgggctctgcaccccgggcgggtgtcagggcgggtcccagtggaaaaacatcctctggccagccggggtccggcgccagctatgggagtcgggatccgcggagggcagcgcctggggtgtgcaccctcgtggcgggtgcgctctggagccagttctcctggcggggaacaccctgcggagggccatggctggcaccccgacgtgccctccagccgttgcgagtggccccagccccgggaggcacgcccggcacgacagcaagttgcatgcggctctctggaggtgctccctccttagaaagggctcagctcctctagctcctggaccacccatggggagggagtgcggcaggcggatgggtgggcagcaggtttgcctgcgagtaccctccccgcagtttctccctctcctggacaccctcggtccgaagcagggagggcaggagtggagatgacggggtgcgccgtgtgcacgccttggcgtggtggggccggtcagttttccagaaattaggactgcagagtgaagaacttgttgctcaggacaggccgcccccaccgagtgtcctctggttgggtttcaaatggttctcttggtttggggctctggttcccgtatcctgctcctcacctggaagaagggagcttggagcttgcgtatttgcacctcctgccttctgtctggatctagggcgcagccacggggcgctgtggacggcaggcccctgctcccccaagtcctgccgcacaggcggttggaggtgagcctcgggaagagtcccaaggagtgtgtcctgtggctcagtgaggacgggcgcctgggccctgccagggcttctgggtgtctgggaatggagggacagcagcccagctgcccgccgaaggccggcaccgttcccgggaagcctcgcttttgtccaccgccggctgggtcctgcccgcctcccccgcctcccttagaaagccccagagggagggaacagcaggcccggaatagggggaaatagaaggaggaagatgggaggcgtggggcttgttcttctttggctgtcgtaagcataccaaccttcccaaacaggcgccggccggttctcccagaggagtgtactgcctggtgccacgggaggctccggagcgcacggcaggcgggtttccctggtcagagcctcctggccccggcctctgctgccggttccccctgtggtgtgtgcctgcgccgagggcacagtgggcgccctggccatccctgcctctgccctgtgctgcagcttgctgagcgagagcgagaagcggcccttcgtggaggaggcagagcgccttcgcgtgcagcacaagaaggaccaccccgactacaagtaccagccacggcgcaggaagagcgccaaagccggccacagcgactccgactcgggcgcggagctgggaccccaccctggcggcggtgccgtgtacaaggctgaagcagggcttggagatgggcaccaccatggcgaccacacagggcagacccacgggccgcccaccccgcccaccacccccaagacggagctgcagcaggcgggcgccaagccggagctgaagctggagggacgccggccggtggacagcgggcgccagaacatcgacttcagcaacgtggacatctcggagctcagcagcgaggtcatgggcaccatggacgccttcgacgtccacgagttcgaccagtacctgcccctgggcggccccgccccacccgagccgggccaggcctatgggggcgcctacttccacgccggggcgtcccccgtgtgggcccacaagagtgccccgtcggcctccgcgtcgcccaccgagacgggtcccccacggccgcacatcaagacggagcagccgagccccggccactacggcgaccagccccgaggctcgcccgactacggttcctgcagcggccagtccagcgccaccccggccgcccccgccggccccttcgccggctcacagggcgactatggcgacctgcaggcctccagctactatggtgcctaccctggctacgcacccggcctctaccagtacccctgcttccactcgccgcgccggccctacgcctcacccctgctcaacggcctggccctgccgcccgcccacagccccaccagtcactgggaccagccggtgtacaccaccctgaccaggccctgagggcccagccgcggggagggactcgcaggcgtcagggggcagccttgtcccggcccagtgtgtgtgaccagggcgggaggggccccagtggctgagctccaagtgcctgctgaagtctgcagggaaacacgcttgctgcccgtggccctcggcctccagatggccacacctctgccgacgacggaccagctccctctcccttctatctttctttttgaggtggtgggattattccacaaagaagggctgccgtttggtccctcttccgtgaggactggcggcaccagcaccttcgctttgcatctcggtagaggagaaacggcagcacagcccaaggaccaaaggagggggtggcaggggccttgcagggcgctgtgaggtccaggccggtcttggcgccgagagcccctgcactcaaggccacattccctcgacaacggctgcacgggctgtccgggatccggggtgtctgtccgcagactgggatgagtctactcgagcatctccgggacctgcctgtcagatctgaggtgtctccttgctggcagagtgcgctcacgcgagggctggctgtgatgaacacatctctcttttatttttatgtttttgataatttttatttttgaagcttaaatgtgtttcttctgaaagctgttaaagatgtatttatgttctgtgttattttatctttaattaatgaggtaattcgggcaaagagtagaatttaagacaaaacggaagctgggaagcttcccttgagggcaggcaggaggtggagttgcagctgttggccggcatcacgttgctcgttgctcggcttatgggaggccgccctggagggcccggaggtcccaaggtccctgggaggactgggcccctcatgcctcgagcttggcaaccgaaaacccgagggaggagaagggacctgccttgtgacatctctgatcaggttggggtgccccagcacccagtaccagtttggggtttgggaagcaggactccgtccctgtccccgactgtgccacgtggtaggacacataggacacaggaattcctgggtccttgcccatgactgtgccatgtggtaggacacaggacacaggaattcctggaaagtggtggcttcagaagtgatcttggctcgcaggcaccagtgccacctaccaagctgtgaaactaaaccttctccactaaacgtcgttagggcctcagttctagacgagtcatacctgattcacctgcactgcttcccctgtgtgctgagcatagagcatacaatagcgcctacttcacggaaacttgtgcctttaaactttgtaaacttaaacacagccgagaagttgcttctttgtactttttctacttttcctacttttttgtagaaaaaaaagataatgcctctgcttctatttctctgggggtgggggtgggggccgggagccgtcgcagacccgtttcatgcagcgtctcccttggcaccgcgttcggaggacgcaccctcactcccctgctgccttcactcctttctgaccaagcaacgctaacttttgtacagatcgatttgataaaattaaacaaagtgctttttatgg

SEQ ID NO: 20153 - DNA, 3935 bp, Homo sapiens
  misc_feature 1..3935: note = ENST00000245479
  source 1..3935: mol_type = unassigned DNA
ggagagccgaaagcggagctcgaaactgactggaaacttcagtggcgcggagactcgccagtttcaaccccggaaacttttctttgcaggaggagaagagaaggggtgcaagcgcccccacttttgctctttttcctcccctcctcctcctctccaattcgcctccccccacttggagcgggcagctgtgaactggccaccccgcgccttcctaagtgctcgccgcggtagccggccgacgcgccagcttccccgggagccgcttgctccgcatccgggcagccgaggggagaggagcccgcgcctcgagtccccgagccgccgcggcttctcgcctttcccggccaccagccccctgccccgggcccgcgtatgaatctcctggaccccttcatgaagatgaccgacgagcaggagaagggcctgtccggcgcccccagccccaccatgtccgaggactccgcgggctcgccctgcccgtcgggctccggctcggacaccgagaacacgcggccccaggagaacacgttccccaagggcgagcccgatctgaagaaggagagcgaggaggacaagttccccgtgtgcatccgcgaggcggtcagccaggtgctcaaaggctacgactggacgctggtgcccatgccggtgcgcgtcaacggctccagcaagaacaagccgcacgtcaagcggcccatgaacgccttcatggtgtgggcgcaggcggcgcgcaggaagctcgcggaccagtacccgcacttgcacaacgccgagctcagcaagacgctgggcaagctctggagacttctgaacgagagcgagaagcggcccttcgtggaggaggcggagcggctgcgcgtgcagcacaagaaggaccacccggattacaagtaccagccgcggcggaggaagtcggtgaagaacgggcaggcggaggcagaggaggccacggagcagacgcacatctcccccaacgccatcttcaaggcgctgcaggccgactcgccacactcctcctccggcatgagcgaggtgcactcccccggcgagcactcggggcaatcccagggcccaccgaccccacccaccacccccaaaaccgacgtgcagccgggcaaggctgacctgaagcgagaggggcgccccttgccagaggggggcagacagccccctatcgacttccgcgacgtggacatcggcgagctgagcagcgacgtcatctccaacatcgagaccttcgatgtcaacgagtttgaccagtacctgccgcccaacggccacccgggggtgccggccacgcacggccaggtcacctacacgggcagctacggcatcagcagcaccgcggccaccccggcgagcgcgggccacgtgtggatgtccaagcagcaggcgccgccgccacccccgcagcagcccccacaggccccgccggccccgcaggcgcccccgcagccgcaggcggcgcccccacagcagccggcggcacccccgcagcagccacaggcgcacacgctgaccacgctgagcagcgagccgggccagtcccagcgaacgcacatcaagacggagcagctgagccccagccactacagcgagcagcagcagcactcgccccaacagatcgcctacagccccttcaacctcccacactacagcccctcctacccgcccatcacccgctcacagtacgactacaccgaccaccagaactccagctcctactacagccacgcggcaggccagggcaccggcctctactccaccttcacctacatgaaccccgctcagcgccccatgtacacccccatcgccgacacctctggggtcccttccatcccgcagacccacagcccccagcactgggaacaacccgtctacacacagctcactcgaccttgaggaggcctcccacgaagggcgaagatggccgagatgatcctaaaaataaccgaagaaagagaggaccaaccagaattccctttggacatttgtgtttttttgtttttttattttgttttgttttttcttcttcttcttcttccttaaagacatttaagctaaaggcaactcgtacccaaatttccaagacacaaacatgacctatccaagcgcattacccacttgtggccaatcagtggccaggccaaccttggctaaatggagcagcgaaatcaacgagaaactggactttttaaaccctcttcagagcaagcgtggaggatgatggagaatcgtgtgatcagtgtgctaaatctctctgcctgtttggactttgtaattatttttttagcagtaattaaagaaaaaagtcctctgtgaggaatattctctattttaaatatttttagtatgtactgtgtatgattcattaccattttgaggggatttatacatatttttagataaaattaaatgctcttatttttccaacagctaaactactcttagttgaacagtgtgccctagcttttcttgcaaccagagtatttttgtacagatttgctttctcttacaaaaagaaaaaaaaaatcctgttgtattaacatttaaaaacagaattgtgttatgtgatcagttttgggggttaactttgcttaattcctcaggctttgcgatttaaggaggagctgccttaaaaaaaaataaaggccttattttgcaattatgggagtaaacaatagtctagagaagcatttggtaagctttatcatatatatattttttaaagaagagaaaaacaccttgagccttaaaacggtgctgctgggaaacatttgcactcttttagtgcatttcctcctgcctttgcttgttcactgcagtcttaagaaagaggtaaaaggcaagcaaaggagatgaaatctgttctgggaatgtttcagcagccaataagtgcccgagcacactgcccccggttgcctgcctgggccccatgtggaaggcagatgcctgctcgctctgtcacctgtgcctctcagaacaccagcagttaaccttcaagacattccacttgctaaaattatttattttgtaaggagaggttttaattaaaacaaaaaaaaattcttttttttttttttttccaattttaccttctttaaaataggttgttggagctttcctcaaagggtatggtcatctgttgttaaattatgttcttaactgtaaccagtttttttttatttatctctttaatctttttttattattaaaagcaagtttctttgtattcctcaccctagatttgtataaatgcctttttgtccatcccttttttctttgttgtttttgttgaaaacaaactggaaacttgtttctttttttgtataaatgagagattgcaaatgtagtgtatcactgagtcatttgcagtgttttctgccacagacctttgggctgccttatattgtgtgtgtgtgtgggtgtgtgtgtgttttgacacaaaaacaatgcaagcatgtgtcatccatatttctctgcatcttctcttggagtgagggaggctacctggaggggatcagcccactgacagaccttaatcttaattactgctgtggctagagagtttgaggattgctttttaaaaaagacagcaaacttttttttttatttaaaaaaagatatattaacagttttagaagtcagtagaataaaatcttaaagcactcataatatggcatccttcaatttctgtataaaagcagatctttttaaaaagatacttctgtaacttaagaaacctggcatttaaatcatattttgtctttaggtaaaagctttggtttgtgttcgtgttttgtttgtttcacttgtttccctcccagccccaaaccttttgttctctccgtgaaacttacctttccctttttctttctcttttttttttttgtatattattgtttacaataaatatacattgcattaaaaagaaa

SEQ ID NO: 20154 - DNA, 2033 bp, Homo sapiens
  misc_feature 1..2033: note = ENST00000375281
  source 1..2033: mol_type = unassigned DNA
gcgagcgagcggggcgcggcgaggggcaagggcggggagggccccggcgctcagagcaggcgccagggaggcaggctgggcggcccttcgtcctcgccttcgggtgtccatgcctcggcggcggcgtcccgctccgcagccaggggcctgcaagccgtagccatggccgcggtggccgtcctccggaacgactcgctgcaggcctttctccaggaccgcacccccagcgcctccccggacctgggcaagcactcgcccctggcattgctggccgccacctgtagccgcatcggccagccgggcgcggcggcgcccccggacttcctgcaggtgccctacgaccccgcgctgggctcaccctccaggctcttccacccgtggaccgccgacatgccggcgcactcgccaggcgcactgccgcccccgcatcccagcttggggctgacgccgcagaagacgcacctgcagccgtccttcggggctgcgcacgagcttccccttacaccccccgccgacccctcgtacccctacgagttctcgccggtcaagatgctgccctcgagcatggcggctctgcccgccagctgcgcgcccgcctacgtgccctacgcggcgcaggccgcgctgccgccaggctactccaacctgctgcctccgccgccgccaccgcccccgccgcccacctgccgccagttgtcacccaacccggcccccgacgacctcccgtggtggagcatcccgcaggcgggcgccgggccgggggcctccggggttccgggaagcggcctctccggcgcctgtgccggggccccccacgcgccccgcttccccgcctctgcggccgctgctgctgcggccgccgccgccctacaaagaggcctggtgttgggcccgtcggactttgcgcagtaccagagccagatcgccgcgctgctgcagaccaaggcccccctggcggccacggccaggaggtgccgccgctgccgctgtcccaactgccaggcggcgggcggcgcccccgaggcggagccggggaagaagaagcagcacgtgtgccacgtgccgggctgcggcaaggtgtacgggaagacgtcgcacctgaaggcgcacctgcgctggcacacgggcgagcgacccttcgtgtgcaactggctcttctgcgggaagagcttcacgcgctcggacgagctgcagcggcacctgcggactcacacgggcgagaagcgctttgcctgtcccgagtgcggcaagcgcttcatgcgcagcgaccacctcgcgaagcacgtcaagactcaccagaataagaagctcaaagtcgctgaggccggggttaagcgggaggacgcgcgggacctgtgagccctcccggaggtggacccccttcccagcacctctgcgagagatccggggacctgtgggcagctggcggaggggagactcagcagacggaccctctccgttgcctgcctcccaaaatggagccaggcttccaacttccgctgccttcggacatagggacccagttcccaggagcggggaggtagggttggggctggggcatttggattgtaattgggagctctgccgtacgccagggcggttccaaactctaaaccgttcccaccgtcagggagacctacagtttcgggggaccaccctggtctggccttgtatataggaaatgctgctgaactgaatagaaaggaacttgggagatttgaaacagtgctcgggttttcgctaggaccggtttgggctttgtacaggttatttaatagctttgttaaagataattataataattataacattaataaaaatgttgcttttgtcttcagctccatgcagagctacagcatgatatgtctctgtaaagtgatcagcagttgcagcgtgaaaataaatactttaactcaggggtcactacaggaagaccccgttgagccggtctcatttgatcttttcttcttctgggtggctgtactaagcggtcgggtttccccgggaatttgatggttcctatagtctgcctg

SEQ ID NO: 20155 - DNA, 257 bp, Homo sapiens
  misc_feature 1..257: note = ENST00000487037
  source 1..257: mol_type = unassigned DNA
agaagcgctcgcgggccccacgttcaggaccgcacccccagcgcctccccggacctgggcaagcactcgcccctggcattgctggccgccacctgtagccgcatcggccagccgggcgcggcggcgcccccggacttcctgcaggtgccctacgaccccgcgctgggctcaccctccaggctcttccacccgtggaccgccgacatgccggcgcactcgccaggcgcactgccgcccccgcatcccagcttggggct

SEQ ID NO: 20156 - DNA, 547 bp, Homo sapiens
  misc_feature 1..547: note = ENST00000580377
  source 1..547: mol_type = unassigned DNA
caactgccagcctatggccaccaattggatccaggagaaagtgtggctctctcaggaggtggacaaactgagagtgatgttcctggagatgaaaaatgagaaggaaaaactcatgatcaagttccagagccatgtaagaatgtccatgccattccagggccatttcctaccatcgttaacaaatgccccgccatgtttcccctgtcctaccaagtttgctcttttatgcataggacttataaaatctgtttgctttctagagaaatatcctagaggagaaccttcggcgctctgacaaggagttagaaaaactagatgacattgttcagcatatttataagaccctgctctctattccagaggtggtgaggggatgcaaagaactacagggattgctggaatttctgagctaagaaactgaaagccagaatctgcttcacctctttttacctgcaatacccccttaccccaataccaagaccaactggcatagagccaactgagataaatgctatttaaataaagtgtatttaatgaatttctccaa

SEQ ID NO: 20157 - DNA, 657 bp, Homo sapiens
  misc_feature 1..657: note = ENST00000582175
  source 1..657: mol_type = unassigned DNA
ggaagtgatacagcagcagaatgagaagatcctagaacagatagacaagagtggcgagctcataagccttagagaggaggtgacccaccttacccgctcacttcggcgtgcggagacagagaccaaagtgctccaggaggccctggcaggccagctggactccaactgccagcctatggccaccaattggatccaggagaaagtgtggctctctcaggaggtgactcagagttaacagaggagctggacagcaggtggggaccccaggctgtacccctgttgatctggacatatttctaggtggacaaactgagagtgatgttcctggagatgaaaaatgagaaggaaaaactcatgatcaagttccagagccatagaaatatcctagaggagaaccttcggcgctctgacaaggagttagaaaaactagatgacattgttcagcatatttataagaccctgctctctattccagaggtggtgaggggatgcaaagaactacagggattgctggaatttctgagctaagaaactgaaagccagaatctgcttcacctctttttacctgcaatacccccttaccccaataccaagaccaactggcatagagccaactgagataaatgctatttaaataaagtgtatttaatgaatttc

SEQ ID NO: 20158 - DNA, 4040 bp, Homo sapiens
  misc_feature 1..4040: note = ENST00000321765
  source 1..4040: mol_type = unassigned DNA
caggagggatggactcctggactctccagctacctgcgtggtcctccccggtgtgaggacagaagaccggtcctgggccgggcccgcatccagccctaccgccggtgtctgaggtgagggctccgtcagcggaaaacgctcgacaacggaggggcaggcagggccgggggcgtggtcaacgcgggccccgccccccgggctctacccccgagcgtacgcgcgcgcctgaagcagccaaccaggaagcgcagagcaggttcaaacacagacggcgggtgaacatggcgtcctcgacttggtctgagacgtgataggcctgccttctggttgaagatgtggcgagtgaaaaaactgagcctcagcctgtcgccttcgccccagacgggaaaaccatctatgagaactcctctccgtgaacttaccctgcagcccggtgccctcaccaactctggaaaaagatcccccgcttgctcctcgctgaccccatcactgtgcaagctggggctgcaggaaggcagcaacaactcatctccagtggattttgtaaataacaagaggacagacttatcttcagaacatttcagtcattcctcaaagtggctagaaacttgtcagcatgaatcagatgagcagcctctagatccaattccccaaattagctctactcctaaaacgtctgaggaagcagtagacccactgggcaattatatggttaaaaccatcgtccttgtaccatctccactggggcagcaacaagacatgatatttgaggcccgtttagataccatggcagagacaaacagcatatctttaaatggacctttgagaacagacgatctggtgagagaggaggtggcaccctgcatgggagacaggttttcagaagttgctgctgtatctgagaaacctatctttcaggaatctccgtcccatctcttagaggagtctccaccaaatccctgttctgaacaactacattgctccaaggaaagcctgagcagtagaactgaggctgtgcgtgaggacttagtaccttctgaaagtaacgccttcttgccttcctctgttctctggctttccccttcaactgccttggcagcagatttccgtgtcaatcatgtggacccagaggaggaaattgtagagcatggagctatggaggaaagagaaatgaggtttcccacacatcctaaggagtctgaaacagaagatcaagcacttgtctcaagtgtggaagatattctgtccacatgcctgacaccaaatctagtagaaatggaatcccaagaagctccaggcccagcagtagaagatgttggtaggattcttggctctgatacagagtcttggatgtccccactggcctggctggaaaaaggtgtaaatacctccgtcatgctggaaaatctccgccaaagcttatcccttccctcgatgcttcgggatgctgcaattggcactacccctttctctacttgctcggtggggacttggtttactccttcagcaccacaggaaaagagtacaaacacatcccagacaggcctggttggcaccaagcacagtacttctgagacagagcagctcctgtgtggccggcctccagatctgactgccttgtctcgacatgacttggaagataacctgctgagctctcttgtcattctggaggttctctcccgccagcttcgggactggaagagccagctggctgtccctcacccagaaacccaggacagtagcacacagactgacacatctcacagtgggataactaataaacttcagcatcttaaggagagccatgagatgggacaggccctacagcaggccagaaatgtcatgcaatcatgggtgcttatctctaaagagctgatatccttgcttcacctatccctgttgcatttagaagaagataagactactgtgagtcaggagtctcggcgtgcagaaacattggtctgttgctgttttgatttgctgaagaaattgagggcaaagctccagagcctcaaagcagaaagggaggaggcaaggcacagagaggaaatggctctcagaggcaaggatgcggcagagatagtgttggaggctttctgtgcacacgccagccagcgcatcagccagctggaacaggacctagcatccatgcgggaattcagaggccttctgaaggatgcccagacccaactggtagggcttcatgccaagcaagaagagctggttcagcagacagtgagtcttacttctaccttgcaacaagactggaggtccatgcaactggattatacaacatggacagctttgctgagtcggtcccgacaactcacagagaaactcacagtcaagagccagcaagccctgcaggaacgtgatgtggcaattgaggaaaagcaggaggtttctagggtgctggaacaagtctctgcccagttagaggagtgcaaaggccaaacagaacaactggagttggaaaacagtcgtctagcaacagatctccgggctcagttgcagattctggccaacatggacagccagctaaaagagctacagagtcagcatacccattgtgcccaggacctggctatgaaggatgagttactctgccagcttacccagagcaatgaggagcaggctgctcaatggcaaaaggaagagatggcactaaaacacatgcaggcagaactgcagcagcaacaagctgtcctggccaaagaggtgcgggacctgaaagagaccttggagtttgcagaccaggagaatcaggttgctcacctggagctgggtcaggttgagtgtcaattgaaaaccacactggaagtgctccgggagcgcagcttgcagtgtgagaacctcaaggacactgtagagaacctaacggctaaactggccagcaccatagcagataaccaggagcaagatctggagaaaacacggcagtactctcaaaagctagggctgctgactgagcaactacagagcctgactctctttctacagacaaaactaaaggagaagactgaacaagagacccttctgctgagtacagcctgtcctcccacccaggaacaccctctgcctaatgacaggaccttcctgggaagcatcttgacagcagtggcagatgaagagccagaatcaactcctgtgcccttgcttggaagtgacaagagtgctttcacccgagtagcatcaatggtttcccttcagcccgcagagaccccaggcatggaggagagcctggcagaaatgagtattatgactactgagcttcagagtctttgttccctgctacaagagtctaaagaagaagccatcaggactctgcagcgaaaaatttgtgagctgcaagctaggctgcaggcccaggaagaacagcatcaggaagtccagaaggcaaaagaagcagacatagagaagctgaaccaggccttgtgcttgcgctacaagaatgaaaaggagctccaggaagtgatacagcagcagaatgagaagatcctagaacagatagacaagagtggcgagctcataagccttagagaggaggtgacccaccttacccgctcacttcggcgtgcggagacagagaccaaagtgctccaggaggccctggcaggccagctggactccaactgccagcctatggccaccaattggatccaggagaaagtgtggctctctcaggaggtggacaaactgagagtgatgttcctggagatgaaaaatgagaaggaaaaactcatgatcaagttccagagccatagaaatatcctagaggagaaccttcggcgctctgacaaggagttagaaaaactagatgacattgttcagcatatttataagaccctgctctctattccagaggtggtgaggggatgcaaagaactacagggattgctggaatttctgagctaagaaactgaaagccagaatctgcttcacctctttttacctgcaatacccccttaccccaataccaagaccaactggcatagagccaactgagataaatgctatttaaataaagtgtatttaatgaa

SEQ ID NO: 20159 - DNA, 719 bp, Homo sapiens
  misc_feature 1..719: note = ENST00000582076
  source 1..719: mol_type = unassigned DNA
agagtctaaagaagaagccatcaggactctgcagcgaaaaatttgtgagctgcaagctaggctgcaggcccaggaagaacagcatcaggaagtccagaaggcaaaagaagcagacatagagaagctgaaccaggccttgtgcttgcgctacaagaatgaaaaggagctccaggaagtgatacagcagcagaatgagaagatcctagaacagatagacaagagtggcgagctcataagccttagagaggaggtgacccaccttacccgctcacttcggcgtgcggagacagagaccaaagtgctccaggaggccctggcaggccagctggactccaactgccagcctatggccaccaattggatccaggagaaagtgtggctctctcaggaggtggacaaactgagagtgatgttcctggagatgaaaaatgagaaggaaaaactcatgatcaagttccagagccatagaaatatcctagaggagaaccttcggcgctctgacaaggagttagaaaaactagatgacattgttcagcatatttataagaggtggtgaggggatgcaaagaactacagggattgctggaatttctgagctaagaaactgaaagccagaatctgcttcacctctttttacctgcaatacccccttaccccaataccaagaccaactggcatagagccaactgagataaatgctatttaaataaagtgtattt

SEQ ID NO: 20160 - DNA, 1023 bp, Homo sapiens
  misc_feature 1..1023: note = ENST00000580676
  source 1..1023: mol_type = unassigned DNA
ttgtgagctgcaagctaggctgcaggcccaggaagaacagcatcaggaagtccagaaggcaaaagaagcagacatagagaagctgaaccaggccttgtgcttgcgctacaagaatgaaaaggagctccaggaagtgatacagcagcagaatgagaagatcctagaacagatagacaagagtggcgagctcatagtatgttcaccatcatgcccaggcctttgccttctgtgttactggtcagccaggatcccaagtatgagaaatggtttgcttttgttcaccacatgttgtctatccttatgtcctattggacacctctccattctcattcccagagccttagagaggaggtgacccaccttacccgctcacttcggcgtgcggagacagagaccaaagtgctccaggaggccctggcaggccagctggactccaactgccagcctatggccaccaattggatccaggagaaagtgtggctctctcaggaggtgactcagagttaacagaggagctggacagcaggtggggaccccaggctgtacccctgttgatctggacatatttctaggtggacaaactgagagtgatgttcctggagatgaaaaatgagaaggaaaaactcatgatcaagttccagagccatgtaagaatgtccatgccattccagggccatttcctaccatcgttaacaaatgccccgccatgtttcccctgtcctaccaagtttgctcttttatgcataggacttataaaatctgtttgctttctagagaaatatcctagaggagaaccttcggcgctctgacaaggagttagaaaaactagatgacattgttcagcatatttataagaccctgctctctattccagaggtggtgaggggatgcaaagaactacagggattgctggaatttctgagctaagaaactgaaagccagaatctgcttcacctctttttacctgcaatacccccttaccccaataccaagaccaactggcatagagccaactgagataaa

SEQ ID NO: 20161 - DNA, 743 bp, Homo sapiens
  misc_feature 1..743: note = ENST00000581133
  source 1..743: mol_type = unassigned DNA
gtcctcccacccaggaacaccctctgcctaatgacaggaccttcctgggaagcatcttgacagcagtggcagatgaagagccagaatcaactcctgtgcccttgcttggaagtgacaagagtgctttcacccgagtagcatcaatggtttcccttcagcccgcagagaccccaggcatggaggagagcctggcagaaatgagtattatgactactgagcttcagagtctttgttccctgctacaagagtctaaagaagaagccatcaggactctgcagcgaaaaatgtgagtgggatgcagttttggtgacagagggacagtgagacatcctcttatgccaagggtccaactgatccctgagaggacaggaatgttgctaaattcttccttccttcagttgtgagctgcaagctaggctgcaggcccaggaagaacagcatcaggaagtccagaaggcaaaagaagcagacatagagaagctgaaccaggccttgtgcttgcgctacaagaatgaaaaggagctccaggaagtgatacagcagcagaatgagaagatcctagaacagatagacaagagtggcgagctcataagccttagagaggaggtgacccaccttacccgctcacttcggcgtgcggagacagagaccaaagtgctccaggaggccctggcaggccagctggactccaactgccagcctatggccaccaattggatccaggagaaagtgtggctctctca

SEQ ID NO: 20162 - DNA, 635 bp, Homo sapiens
  misc_feature 1..635: note = ENST00000580682
  source 1..635: mol_type = unassigned DNA
caggagttcactagacctgaacagcagctattttttcttctttgcccttagactgaacaagagacccttctgctgagtacagcctgtcctcccacccaggaacaccctctgcctaatgacaggaccttcctgggaagcatcttgacagcagtggcagatgaaggttaaaggccctgggatttgggggtgggaaagttgtgacgctgctcctgatatcttctgctgttgaagatgtccaccagcgggcttgtctatcttaccctggcttccattatggtagacccctgcctggatcatcagaggggccctctcccattattggtttttctcttagagccagaatcaactcctgtgcccttgcttggaagtgacaagagtgctttcacccgagtagcatcaatggtttcccttcagcccgcagagaccccaggcatggaggagagcctggcagaaatgagtattatgactactgagcttcagagtctttgttccctgctacaagagtctaaagaagaagccatcaggactctgcagcgaaaaatttgtgagctgcaagctaggctgcaggcccaggaagaacagcatcaggaagtccagaaggcaaaagaagcagacatagagaagctgaaccaggc

SEQ ID NO: 20163 - DNA, 651 bp, Homo sapiens
  misc_feature 1..651: note = ENST00000577259
  source 1..651: mol_type = unassigned DNA
cagataaccaggagcaagatctggagaaaacacggcagtactctcaaaagctagggctgctgactgagcaactacagagcctgactctctttctacagacaaaactaaaggagaagactgaacaagagacccttctgctgagtacagcctgtcctcccacccaggaacaccctctgcctaatgacaggaccttcctgggaagcatcttgacagcagtggcagatgaaggttaaaggccctgggatttgggggtgggaaagttgtgacgctgctcctgatatcttctgctgttgaagatgtccaccagcgggcttgtctatcttaccctggcttccattatggtagacccctgcctggatcatcagaggggccctctcccattattggtttttctcttagagccagaatcaactcctgtgcccttgcttggaagtgacaagagtgctttcacccgagtagcatcaatggtttcccttcagcccgcagagaccccaggcatggaggagagcctggcagaaatgagtattatgactactgagcttcagagtctttgttccctgctacaagagtctaaagaagaagccatcaggactctgcagcgaaaaatttgtgagctgcaagctaggctgcaggcccaggaagaacagcatc

SEQ ID NO: 20164 - DNA, 937 bp, Homo sapiens
  misc_feature 1..937: note = ENST00000580406
  source 1..937: mol_type = unassigned DNA
ttagagtaaatttagggccaaggacttaacccagaggatccagcagttaaggaaggacctgtgaatagagaagaaataaccagaaaggtgtggggcctgcctttaaaggagagagactcatgtcctggaagctaagaaaaggaagtttctaaaagaacaatgtggtcatcaatatcaaataggtcaggtaaaacaagagctgaaatatatgcattgcatttgaaagtaaggctgccattggtgaaccaaatgacaagaatttaggtggaatgacaggggagaagcctgagtgtagtgggctggggagtcaatagatggtgagagttataaacaagaagtataggctctttttttctttcttttttctttctttcctttctttctagaaaaggcagtagctaaaaggggatttaaggtaagaagaagggttttgttttgttttgtttaggtttgtttttaaaatactgctgtttttgttggagaggcttaagaatataaacatgttcagagaaaggcactaatggagaagttgaagatagagaattgagataataggtggaacagcattttggaggagatggctgggagttacctggaagcccaggagttcactagacctgaacagcagctattttttcttctttgcccttagactgaacaagagacccttctgctgagtacagcctgtcctcccacccaggaacaccctctgcctaatgacaggaccttcctgggaagcatcttgacagcagtggcagatgaagagccagaatcaactcctgtgcccttgcttggaagtgacaagagtgctttcacccgagtagcatcaatggtttcccttcagcccgcagagaccccaggcatggaggagagcctggcagaaatgagtattatgactactgagcttcagagtctttgttccctgctacaagagtct

SEQ ID NO: 20165 - DNA, 755 bp, Homo sapiens
  misc_feature 1..755: note = ENST00000378976
  source 1..755: mol_type = unassigned DNA
tctagcaacagatctccgggctcagttgcagattctggccaacatggacagccagctaaaagagctacagagtcagcatacccattgtgcccaggacctggctatgaaggatgagttactctgccagcttacccagagcaatgaggagcaggctgctcaatggcaaaaggaagagatggcactaaaacacatgcaggcagaactgcagcagcaacaagctgtcctggccaaagaggtgcgggacctgaaagagaccttggagtttgcagaccaggagaatcaggttgctcacctggagctgggtcaggttgagtgtcaattgaaaaccacactggaagtgctccgggagcgcagcttgcagtgtgagaacctcaaggacactgtagagaacctaacggctaaactggccagcaccatagcagataaccaggagcaagatctggagaaaacacggcagtactctcaaaagctagggctgctgactgagcaactacagagcctgactctctttctacagacaaaactaaaggagaagctattttttcttctttgcccttagactgaacaagagacccttctgctgagtacagcctgtcctcccacccaggaacaccctctgcctaatgacaggaccttcctgggaagcatcttgacagcagtggcagatgaagagccagaatcaactcctgtgcccttgcttggaagtgacaagagtgctttcacccgagtagcatcaatggtttcccttcagcccg

SEQ ID NO: 20166 - DNA, 335 bp, Homo sapiens
  misc_feature 1..335: note = ENST00000578230
  source 1..335: mol_type = unassigned DNA
caggagcaagatctggagaaaacacggcagtactctcaaaagctagggctgctgactgagcaactacagagcctgactctctttctacagacaaaactaaaggagaagactatgtttcaagaaagcagaaatatagccttctttggcctccctgcagtgtgcactaaacaataaatggttgacatcattcagaatacaaagactgaacaagagacccttctgctgagtacagcctgtcctcccacccaggaacaccctctgcctaatgacaggaccttcctgggaagcatcttgacagcagtggcagatgaagagccagaatcaactcctgtgcc

SEQ ID NO: 20167 - DNA, 978 bp, Homo sapiens
  misc_feature 1..978: note = ENST00000580083
  source 1..978: mol_type = unassigned DNA
tctcggcgtgcagaaacattggtctgttgctgttttgatttgctgaagaaattgagggcaaagctccagagcctcaaagcagaaagggaggaggcaaggcacagagaggaaatggctctcagaggcaaggatgcggtagggcttcatgccaagcaagaagagctggttcagcagacagtgagtcttacttctaccttgcaacaagactggaggtccatgcaactggattatacaacatggacagctttgctgagtcggtcccgacaactcacagagaaactcacagtcaagagccagcaagccctgcaggaacgtgatgtggcaattgaggaaaagcaggagatctccgggctcagttgcagattctggccaacatggacagccagctaaaagagctacagagtcagcatacccattgtgcccaggacctggctatgaaggatgagttactctgccagcttacccagagcaatgaggagcaggctgctcaatggcaaaaggaagagatggcactaaaacacatgcaggcagaactgcagcagcaacaagctgtcctggccaaagaggtgcgggacctgaaagagaccttggagtttgcagaccaggagaatcaggttgctcacctggagctgggtcaggttgagtgtcaattgaaaaccacactggaagtgctccgggagcgcagcttgcagtgtgagaacctcaaggacactgtagagaacctaacggctaaactggccagcaccatagcagataaccaggagcaagatctggagaaaacacggcagtactctcaaaagctagggctgctgactgagcaactacagagcctgactctctttctacagacaaaactaaaggagaagactgaacaagagacccttctgctgagtacagcctgtcctcccacccaggaacaccctctgcctaatgacaggaccttcctgggaagcatcttgacagcagtggcagatgaag

SEQ ID NO: 20168 - DNA, 715 bp, Homo sapiens
  misc_feature 1..715: note = ENST00000584206
  source 1..715: mol_type = unassigned DNA
tccctcacccagaaacccaggacagtagcacacagactgacacatctcacagtgggataactaataaacttcagcatcttaaggagagccatgagatgggacaggccctacagcaggccagaaatgtcatgcaatcatgggtgcttatctctaaagagctgatatccttgcttcacctatccctgttgcatttagaagaagataagactactgtgagtcaggagtctcggcgtgcagaaacattggtctgttgctgttttgatttgctgaagaaattgagggcaaagctccagagcctcaaagcagaaagggaggaggcaaggcacagagaggaaatggctctcagaggcaaggatgcggtagggcttcatgccaagcaagaagagctggttcagcagacagtgagtcttacttctaccttgcaacaagactggaggtccatgcaactggattatacaacatggacagctttgctgagtcggtcccgacaactcacagagaaactcacagtcaagagccagcaagccctgcaggaacgtgatgtggcaattgaggaaaagcaggaggtttctagggtgctggaacaagtctctgcccagttagaggagtgcaaaggccaaacagaacaactggagttggaaaacagtcgtctagcaacagatctccgggctcagttgcagattctggccaacatggacagccagctaaaagagct

SEQ ID NO: 20169 - DNA, 899 bp, Homo sapiens
  misc_feature 1..899: note = ENST00000580567
  source 1..899: mol_type = unassigned DNA
tggcgtcctcgacttggtctgagacgtgataggcctgccttctggttgaagatgtggcgagtgaaaaaactgagcctcagcctgtcgccttcgccccagacgggaaaaccatctatgagaactcctctccgtgaacttaccctgcagcccggtgccctcaccaactctggaaaaagatcccccgcttgctcctcgctgaccccatcactgtgcaagctggggctgcagcagatttccgtgtcaatcatgtggacccagaggaggaaattgtagagcatggagctatggaggaaagagaaatgaggtttcccacacatcctaaggagtctgaaacagaagatcaagcacttgtctcaagtgtggaagatattctgtccacatgcctgacaccaaatctagtagaaatggaatcccaagaagctccaggcccagcagtagaagatgttggtaggattcttggctctgatacagagtcttggatgtccccactggcctggctggaaaaaggtgtaaatacctccgtcatgctggaaaatctccgccaaagcttatcccttccctcgatgcttcgggatgctgcaattggcactacccctttctctacttgctcggtggggacttggtttactccttcagcaccacaggaaaagagtacaaacacatcccagacaggcctggttggcaccaagcacagtacttctgagacagagcagctcctgtgtggccggcctccagatctgactgccttgtctcgacatgacttggaagataacctgctgagctctcttgtcattctggaggttctctcccgccagcttcgggactggaagagccagctggctgtccctcacccagaaacccaggacagtagcacacagactgacacatctcacagtggg

SEQ ID NO: 20170 - DNA, 904 bp, Homo sapiens
  misc_feature 1..904: note = ENST00000578479
  source 1..904: mol_type = unassigned DNA
ggtgaacatggcgtcctcgacttggtctgagacgtgataggcctgccttctggttgaagatgtggcgagtgaaaaaactgagcctcagcctgtcgccttcgccccagacgggaaaaccatctatgagaactcctctccgtgaacttaccctgcagcccggtgccctcaccaactctggaaaaagatcccccgcttgctcctcgctgaccccatcactgtgcaagctggggctgcagatttccgtgtcaatcatgtggacccagaggaggaaattgtagagcatggagctatggaggaaagagaaatgaggtttcccacacatcctaaggagtctgaaacagaagatcaagcacttgtctcaagtgtggaagatattctgtccacatgcctgacaccaaatctagtagaaatggaatcccaagaagctccaggcccagcagtagaagatgttggtaggattcttggctctgatacagagtcttggatgtccccactggcctggctggaaaaaggtgtaaatacctccgtcatgctggaaaatctccgccaaagcttatcccttccctcgatgcttcgggatgctgcaattggcactacccctttctctacttgctcggtggggacttggtttactccttcagcaccacaggaaaagagtacaaacacatcccagacaggcctggttggcaccaagcacagtacttctgagacagagcagctcctgtgtggccggcctccagatctgactgccttgtctcgacatgacttggaagataacctgctgagctctcttgtcattctggaggttctctcccgccagcttcgggactggaagagccagctggctgtccctcacccagaaacccaggacagtagcacacagactgacacatctcacagtggg

SEQ ID NO: 20171 - DNA, 870 bp, Homo sapiens
  misc_feature 1..870: note = ENST00000536674
  source 1..870: mol_type = unassigned DNA
catggcgtcctcgacttggtctgagacgtgataggcctgccttctggttgaagatgtggcgagtgaaaaaactgagcctcagcctgtcgccttcgccccagacgggaaaaccatctatgagaactcctctccgtgaacttaccctgcagcccggtgccctcaccaactctggaaaaagatcccccgcttgctcctcgctgaccccatcactgtgcaagctggggctgcaggtgagattcgcctggacagcttctcgactgggctgtttgcccagggaaggcagcaacaactcatctccagtggattttgtaaataacaagaggacagacttatcttcagaacatttcagtcattcctcaaagtggctagaaacttgtcagcatgaatcagatgagcagcctctagatccaattccccaaattagctctactcctaaaacgtctgaggaagcagtagacccactgggcaattatatggttaaaaccatcgtccttgtaccatctccactggggcagcaacaagacatgatatttgaggcccgtttagataccatggcagagacaaacagcatatctttaaatggacctttgagaacagacgatctggtgagagaggaggtggcaccctgcatgggagacaggttttcagaagttgctgctgtatctgagaaacctatctttcaggaatctccgtcccatctcttagaggagtctccaccaaatccctgttctgaacaactacattgctccaaggaaagcctgagcagtagaactgaggctgtgcgtgaggacttagtaccttctgaaagtaacgccttcttgccttcctctgttctctggctttccccttcaactgccttggcagcagatt

SEQ ID NO: 20172 - DNA, 8273 bp, Homo sapiens
  misc_feature 1..8273: note = ENST00000262013
  source 1..8273: mol_type = unassigned DNA
agttggtgcagcggcggttggggtgagagcgcctacgccacccctcccctcctccggccccggcccccaccccgccgggcccagccccagccccggcccgggctccagccctagtacccgtcccagcccgagtcgggtccgtcccgtgcgggcaggtgccgcccctctgccggcgacgccccgggccgcccgcccgtccgcttgccaccatggagctggaggacggtgtggtgtatcaggaggagcccggcggctccggggccgtgatgtcggagcgggtgtccggcctggccggctccatctaccgcgagttcgagcggcttatcgggcgctatgacgaggaggtggtcaaagagctgatgccgctggtggtggctgtgctggagaacctggactcggtgttcgcgcaggaccaggagcaccaggtggagctggagctgctgcgggacgacaacgagcagctcatcacccagtacgagcgggagaaggcgctgcgcaagcacgctgaggagaaattcattgaatttgaagactctcaagaacaggaaaaaaaggacttacagacccgagtggaatctttagaatctcaaacaagacaacttgagctgaaagcgaaaaactatgctgaccagattagcagacttgaagaaagagaagcagaactgaagaaggaatataatgcattacatcaaagacacactgagatgatccataattatatggaacatttagaaagaacaaaacttcatcagctctcagggagtgatcaactagaatccacagctcatagtagaattagaaaagaacgccctatatcattaggaattttcccattacctgctggagatggattgcttacacctgatgctcagaaaggaggagagacccctggatctgagcaatggaaatttcaggaattaagtcaaccacgttctcataccagcctgaaggtcagcaatagtcctgaacctcagaaggctgtagaacaggaggatgagctttctgatgttagccaaggcggatctaaagctaccactccagcatcaacagctaattcagatgtggcaacaattcctactgatactcccttaaaggaagaaaacgaaggatttgtgaaggttacagatgcgccaaataaatcagagataagcaaacacattgaagtacaggtagcccaggaaactagaaatgtatctactggctctgctgaaaatgaagaaaagtcagaagttcaagcaatcatcgaatctactcctgagctggatatggacaaagatctcagtggatataaaggttcaagcactcccaccaaaggcatagagaacaaagcttttgatcgcaatacagaatctctctttgaagaactgtcttcagctggctcaggcctaataggagatgtggatgaaggagcagatttactaggaatgggtcgggaagttgagaatcttatattagaaaatacacaactgttggaaaccaaaaatgctttgaacatagtgaagaatgatttgatagcaaaagtggatgaactgacctgtgagaaagatgtgctgcaaggggaattggaggctgtgaagcaagccaaactgaaactagaggaaaagaacagagaattggaggaagagcttaggaaagctcgggcagaagctgaagatgcaaggcaaaaagcaaaagatgacgatgatagtgatattcccacagcccagaggaaacggtttactagagtagaaatggcccgtgttctcatggagcgaaaccagtataaagagagattgatggagcttcaggaagctgttcgatggacagagatgattcgggcatcacgagaaaatccagccatgcaggaaaaaaaaaggtcaagcatttggcagtttttcagccgacttttcagctcctcaagtaacacgactaagaagcctgaaccacctgttaatctgaagtacaatgcacccacgtctcatgttactccgtccgtcaagaaaagaagcagcaccttatctcagctccctggggataagtccaaagcctttgatttccttagtgaagaaactgaagctagtttagcctcacgcagagaacaaaagagagagcagtatcgtcaggtaaaagcacatgttcagaaggaagacggtagagtgcaggcttttggctggagtctgcctcagaagtacaaacaggtaaccaatggtcaaggtgaaaataagatgaaaaatttacctgtgcctgtctatctcagacctctggatgaaaaagatacatcaatgaagctgtggtgtgctgttggagtcaatttatctggtgggaagaccagagatggtggttctgttgttggagcaagtgtattttacaaggatgttgctggtttggatacagaaggcagtaaacagcgaagtgcctctcagagtagtttagataagttagatcaggaacttaaggaacagcagaaggagttaaaaaatcaagaagaattatccagtctagtttggatctgtaccagcactcattcggctacaaaagttcttattattgatgctgttcaacctggcaacatcctagacagtttcactgtttgcaactctcatgttctgtgcattgcaagtgtgccaggtgcacgagaaacagactaccctgcaggagaagatctttcagaatctggtcaggtagacaaagcatctttatgtggaagtatgacaagcaacagctcagcagagacagacagcctgttaggaggcatcacagtggttggttgttctgcagaaggtgtgacgggagctgccacttcccctagtacaaatggtgcttctccagtgatggataaaccaccagaaatggaagcagaaaatagtgaggttgatgaaaatgttccaacagcagaagaagcaactgaagctacagaagggaatgcggggtcagctgaagacacagtggacatctcccaaactggcgtctacacagagcatgtctttacagatcctttgggagttcagatcccagaagacctctccccagtgtatcagtcgagcaatgactcagatgcatataaagatcaaatatcagtactgccaaatgaacaagacttggtgagagaagaagcccagaaaatgagtagtcttttaccaactatgtggcttggagctcaaaatggctgtttgtatgtccattcatctgtagcccagtggaggaaatgtctccattccattaaacttaaagattcgattctcagtattgtacacgtgaagggaatcgtgttagtagccctggctgacggcacccttgcaatctttcacagaggagtggatgggcagtgggatttgtcaaactatcacctcttagaccttggacggcctcatcattccatccgttgcatgactgtggtacatgacaaagtctggtgtggctataggaacaaaatctatgtggtgcagccaaaggccatgaaaatagagaaatcttttgatgcacatcccaggaaggagagccaagtgcgacagcttgcgtgggtgggggatggcgtgtgggtctccattcgcttggattctacgctccgtctctatcatgcacacacttatcaacatctacaggatgtggacattgagccttatgtaagcaaaatgttaggtactggaaaactgggcttctcttttgtgagaattacagctcttatggtgtcttgtaatcgtttgtgggtggggacaggaaatggtgtcattatctccatcccattgacagaaacaaataaaacctcaggtgtaccaggaaatcgtcctggaagtgtaatccgtgtatatggtgatgaaaacagtgataaagtgactccagggacatttataccctattgttcaatggcacatgcacagctttgcttccatgggcaccgggatgctgtgaaattctttgtggcagtcccaggtcaagtcatcagcccacaaagtagcagtagtggcacggatctgacgggtgacaaagcagggccatctgcacaggagcctggtagtcagacgcccttgaagtctatgcttgtcatcagtggaggagagggctacatcgacttccgaatgggtgatgaaggtggagaatcagaacttcttggagaggatcttccacttgaaccttctgtcaccaaagcagaaaggagtcacttgatagtgtggcaagtgatgtatggcaatgagtgagcccatgggaaacaggtggagatggggaagccgtctcttctgcatggtttattttccctctatccttttatttaatgctcttttgtgagataagtttcaccacataatgtgtgagcattttttcctgttaactttatattacaaaatccgttctaccataacaatacagaggaactagctgtgttactgcaccagtgttataggtaacttcagtatattatgaacaaatcaaagaatgtttacttcctgcaaactggtgaattatagaaagcaatccagatgtggtttactctgccacagtctaatgtcattcacttcatttgatggggtcacttgttagctgtcactaataatggaattaatgggaaacacttgataaatgaaactgtaccgttaaatacaatagctgagttttccccagtgtattgtaaaattgacacacactaatacaagatggattatcaggatgtatctaaatgtcccgagagggttaaaagctaactgtaaattactttaactttcactttcaaatctgacaaatcttgtttatatggtatataaaactttgttttcatcagatttgggggggttttatattaaagaaattaagactacactatttaaataaacgtttcctgtttctgacttattagagctctaaagtttatgaggcctacttctctgaatattctgatgggttttttttgagaccagtctcattttcatactgacatgtctgaaagatttattatttataaagcttaggacatactctgggaagcttagaagatacttcagcactgggaggattttttaaaggaaatgtgttttgtatttcttgtaccagagaatggtgatgttgattgagttttttccatgtaaaaaatgtacttgtttgccaaatgttcctagattgctcttaacctgttaatacaagtaaaactgtagtggggatggagtctggcctaagtacagaatgagggatttaattagaaaagttattttcttttgttctgtatcaaactgcagaacagctatatacttggtattttgtacgtgaataacgttttagcttttgtgcccttttgagcttgaagggttatcctcaaaggggaaaactatgaaggggaagaagacaaacctaagataccataaagtaaaggttgacattacatattttcattcacaatgcccattaaaaaaaaaaaataggttgggcatggtggctcacgcctgtaatcccaacactttaggaggctgaggcagatggattgcttgagcccaggagttcaagaccagcctgggcaacatggcgaaaccctgtctctaccaaaaaaaaaaaacaaaataaattaaccgggtgtggtggcacatgcctgtagtcccagctacttgggaggctgaggtgggaggatgacctgggcccaggaggtggaggttgcagtgagccttgatagcaccactgcactccagcctgggtgacggagcaagaccctgtctcaaaacagacaaacaagcaaaaaatagattaaagtctggatttcactgattttcttgcttaataagttttttaaaaccacgatgctgcaattttttccctctcaagcttcttgaaaatgtgtgatttacccttttttatctattactctaggcaaagctaaatatgatttttttttttttttttgagacggagtctggctctgttgcccaggctggaatgcagtggtgcgatctcagctcactgcaacctccacctctcaggttcaagtagttctcctgcctcagcctcccaagtagctgggattacaggtgtgtgccaccctgcccagctaatttttgtatttttagtagagacagggtttcaccacattggccaggctggtctcaaactcctgacctcagatgatctacccgccttggcctcccgaagtgcttgaattacaggcgtgagcccccgcgccggtccgaagcaaagctaaatgtaattttatgtactgttttaacagtataaacctatgggataaaggcccccaatcatcagaaggactactgaaaagaaaagaaagcaaacgtagatgtcaaattgtctaaacattcttaagtaccactgattttttttttctggactattatacaaagatgtctgtaaaaagtataccagtggcttttatgcatatacacgattaggctagattgtgaagtacatgggatttcatgagccagaggaggcatttggatccattgggccacatgtgactataagcacattgtgtacacaataaaattgtagccactcatgtattaaaactgttttggtaaaagctgtattaaaagaataattttttgcttgagctacttagtcacttttttgcagggcaccaaaatgtaggctacttttccatagcttgtttgctatgtttttatttcatcttaaatctgagccatttttggcaatatcttttaaaaaatcattattaaacatttattggaaatgttgtatagattcacaagaaagagacaccaaagtgtttgggaattttaatcccaagaagtaaacatcccagagtcagatcccatttgctgttgttcagccatgtttgtatgactgaatgtaatttaggaaatcaggagttagagatgaaaaatacaaacatgtcaaatggttgtaattgctttttttgaacttactggctttaacttaagtaatataggtgtgtagttgttttatctaaagatgtcagattatctgtggccctgttaattaactgcagggaccagagagaggacaaaaatgcctgtataatttgctttaaaggcttgtccttatgtttgtaatttcagttaaatattttctacagattgcttcacttcccctttcccccaataacaagttcatattcttgtaatgtttactttggtcaacgtggtaatttttggaagaaaatgccaaaatgtaagcttctcacaagcagcaaaggaatgtaactgcctgtagctaccacatcaagggagagaagaggcttgcgtactttgggttgatctcactgtacaaaaaaagtgtacccctattggaagaaataaggaatacttgaaggtttctcctttttttacacttgagtcatgtgcaaggttgaaccatatgaaattgccagtgttcaaccattgctgatctgcaaaagcgacaatatcatatgcctcaacctaacacttactcttaaatgcaggttaaaatctctgtgaggcaaagggataatattctctaggaactcacttttgagagtatttttctctaacccatgtggatctaaattttaaaaataggaatgaatctcttaattgcagcttgtggagagtataaaacattttgagcacaatatgcagcacataacttttcagattgtgtttgcatagaaaaggttaaaatcaattctttcagttactgtattgttcatttcttgtaaaggtcttcctacatttgagacgagaccctttaacataggctgccttagtaacaaaataaaacagatgtgtcataatattaactgtcctaaagaacatgtgtcttgcaaatgccatggaactgaatatttatttccttgtgagtattatgaccgttaccaaaggactcaaccagatttagggctcttcttaattgatcatgttcagaaagggactcatttggtcccactttgtaacatgggaagagtagaagagaaaattaaatgtggaaatcataaatgcttttctaacagggttatgctattctgtaacactaaatgtctgtcttttctcttaaaagattaagttttattaattttgtcatacatttctctatttgaatatatcttaaccattttatgttccaaattcgttttttgtccaagacattctatcagaattttacttgcctctataatctgaaaaatgggttctagaatgtcccacttgctgtctcttagaggctgagcttcatttctatgagcaaagagctcatttagcaatgtagttatttcagtatttatttctattatggaatccctggggttcagaatgtaactttgtacatgagatatatataaatatgtatatgaacatgta

SEQ ID NO: 20173 - DNA, 681 bp, Homo sapiens
  misc_feature 1..681: note = ENST00000509724
  source 1..681: mol_type = unassigned DNA
gaagcttagaagatacttcagcactgggaggattttttaaaggaaatgtgttttgtatttcttgtaccagagaatggtgatgttgattgagttttttccatgtaaaaaatgtacttgtttgccaaatgttcctagattgctcttaacctgttaatacaagtaaaactgtagtggggatggagtctggcctaagtacagaatgagggatttaattagaaaagttattttcttttgttctgtatcaaactgcagaacagctatatacttggtattttgtacgtgaataacgttttagcttttgtgcccttttgagcttgaagggttatcctcaaaggggaaaactatgaaggggaagaagacaaacctaagataccataaagtaaaggttgacattacatattttcattcacaatgcccattaaaaaaaaaaaataggctggtctcaaactcctgacctcagatgatctacccgccttggcctcccgaagtgcttgaattacaggcgtgagcccccgcgccggtccgaagcaaagctaaatgtaattttatgtactgttttaacagtataaacctatgggataaaggcccccaatcatcagaaggactactgaaaagaaaagaaagcaaacgtagatgtcaaattgtctaaacattcttaagtaccactgattttttttttct

SEQ ID NO: 20174 - DNA, 4949 bp, Homo sapiens
  misc_feature 1..4949: note = ENST00000510283
  source 1..4949: mol_type = unassigned DNA
gcataaatgctaggagcagcagctctatggttatgaggtggggagaacggaatgacgtcatcgcttgggagctgctgcaggatggagtggaaagctgctgctgatggcattgtttttgtggcagcaagctgaatgacagatcctcactacaaagatacccctttggcccccgtgtaggcctccttggttcgggtgtttcaccatgccagcacagcgccatgagtcctggatgcatgctgctgtttgtgtttggctttgttggcggggcggtggtcattaattctgctatcttagtatctctctctgttttgctgcttgtgcacttttctatttctaccggtgtgccagctctgacgcagaacctaccaaggatactcagaaaagaacgccctatatcattaggaattttcccattacctgctggagatggattgcttacacctgatgctcagaaaggaggagagacccctggatctgagcaatggaaatttcaggaattaagtcaaccacgttctcataccagcctgaaggatgagctttctgatgttagccaaggcggatctaaagctaccactccagcatcaacagctaattcagatgtggcaacaattcctactgatactcccttaaaggaagaaaacgaaggatttgtgaaggttacagatgcgccaaataaatcagagataagcaaacacattgaagtacaggtagcccaggaaactagaaatgtatctactggctctgctgaaaatgaagaaaagtcagaagttcaagcaatcatcgaatctactcctgagctggatatggacaaagatctcagtggatataaaggttcaagcactcccaccaaaggcatagagaacaaagcttttgatcgcaatacagaatctctctttgaagaactgtcttcagctggctcaggcctaataggagatgtggatgaaggagcagatttactaggaatgggtcgggaagttgagaatcttatattagaaaatacacaactgttggaaaccaaaaatgctttgaacatagtgaagaatgatttgatagcaaaagtggatgaactgacctgtgagaaagatgtgctgcaaggggaattggaggctgtgaagcaagccaaactgaaactagaggaaaagaacagagaattggaggaagagcttaggaaagctcgggcagaagctgaagatgcaaggcaaaaagcaaaagatgacgatgatagtgatattcccacagcccagaggaaacggtttactagagtagaaatggcccgtgttctcatggagcgaaaccagtataaagagagattgatggagcttcaggaagctgttcgatggacagagatgattcgggcatcacgagaaaatccagccatgcaggaaaaaaaaaggtcaagcatttggcagtttttcagccgacttttcagctcctcaagtaacacgactaagaagcctgaaccacctgttaatctgaagtacaatgcacccacgtctcatgttactccgtccgtcaagaaaagaagcagcaccttatctcagctccctggggataagtccaaagcctttgatttccttagtgaagaaactgaagctagtttagcctcacgcagagaacaaaagagagagcagtatcgtcaggtaaaagcacatgttcagaaggaagacggtagagtgcaggcttttggctggagtctgcctcagaagtacaaacaggtaaccaatggtcaaggtgaaaataagatgaaaaatttacctgtgcctgtctatctcagacctctggatgaaaaagatacatcaatgaagctgtggtgtgctgttggagtcaatttatctggtgggaagaccagagatggtggttctgttgttggagcaagtgtattttacaaggatgttgctggtttggatacagaaggcagtaaacagcgaagtgcctctcagagtagtttagataagttagatcaggaacttaaggaacagcagaaggagttaaaaaatcaagaagaattatccagtctagtttggatctgtaccagcactcattcggctacaaaagttcttattattgatgctgttcaacctggcaacatcctagacagtttcactgtttgcaactctcatgttctgtgcattgcaagtgtgccaggtgcacgagaaacagactaccctgcaggagaagatctttcagaatctggtcaggtagacaaagcatctttatgtggaagtatgacaagcaacagctcagcagagacagacagcctgttaggaggcatcacagtggttggttgttctgcagaaggtgtgacgggagctgccacttcccctagtacaaatggtgcttctccagtgatggataaaccaccagaaatggaagcagaaaatagtgaggttgatgaaaatgttccaacagcagaagaagcaactgaagctacagaagggaatgcggggtcagctgaagacacagtggacatctcccaaactggcgtctacacagagcatgtctttacagatcctttgggagttcagatcccagaagacctctccccagtgtatcagtcgagcaatgactcagatgcatataaagatcaaatatcagtactgccaaatgaacaagacttggtgagagaagaagcccagaaaatgagtagtcttttaccaactatgtggcttggagctcaaaatggctgtttgtatgtccattcatctgtagcccagtggaggaaatgtctccattccattaaacttaaagattcgattctcagtattgtacacgtgaagggaatcgtgttagtagccctggctgacggcacccttgcaatctttcacagaggagtggatgggcagtgggatttgtcaaactatcacctcttagaccttggacggcctcatcattccatccgttgcatgactgtggtacatgacaaagtctggtgtggctataggaacaaaatctatgtggtgcagccaaaggccatgaaaatagagaaatcttttgatgcacatcccaggaaggagagccaagtgcgacagcttgcgtgggtgggggatggcgtgtgggtctccattcgcttggattctacgctccgtctctatcatgcacacacttatcaacatctacaggatgtggacattgagccttatgtaagcaaaatgttaggtactggaaaactgggcttctcttttgtgagaattacagctcttatggtgtcttgtaatcgtttgtgggtggggacaggaaatggtgtcattatctccatcccattgacagaaaccgtaatcctccaccagggacgtttactggggctgagggcaaataaaacctcaggtgtaccaggaaatcgtcctggaagtgtaatccgtgtatatggtgatgaaaacagtgataaagtgactccagggacatttataccctattgttcaatggcacatgcacagctttgcttccatgggcaccgggatgctgtgaaattctttgtggcagtcccaggtcaagtcatcagcccacaaagtagcagtagtggcacggatctgacgggtgacaaagcagggccatctgcacaggagcctggtagtcagacgcccttgaagtctatgcttgtcatcagtggaggagagggctacatcgacttccgaatgggtgatgaaggtggagaatcagaacttcttggagaggatcttccacttgaaccttctgtcaccaaagcagaaaggagtcacttgatagtgtggcaagtgatgtatggcaatgagtgagcccatgggaaacaggtggagatggggaagccgtctcttctgcatggtttattttccctctatccttttatttaatgctcttttgtgagataagtttcaccacataatgtgtgagcattttttcctgttaactttatattacaaaatccgttctaccataacaatacagaggaactagctgtgttactgcaccagtgttataggtaacttcagtatattatgaacaaatcaaagaatgtttacttcctgcaaactggtgaattatagaaagcaatccagatgtggtttactctgccacagtctaatgtcattcacttcatttgatggggtcacttgttagctgtcactaataatggaattaatgggaaacacttgataaatgaaactgtaccgttaaatacaatagctgagttttccccagtgtattgtaaaattgacacacactaatacaagatggattatcaggatgtatctaaatgtcccgagagggttaaaagctaactgtaaattactttaactttcactttcaaatctgacaaatcttgtttatatggtatataaaactttgttttcatcagatttgggggggttttatattaaagaaattaagactacactatttaaataaacgtttcctgtttctgacttattagagctctaaagtttatgaggcctacttctctgaatattctgatgggttttttttgagaccagtctcattttcatactgacatgtctgaaagatttattatttataaagcttaggacatactctgggaagcttagaagatacttcagcactgggaggattttttaaaggaaatgtgttttgtatttcttgtaccagagaatggtgatgttgattgagttttttccatgtaaaaaatgtacttgtttgccaaatgttcctagattgctcttaacctgttaatacaagtaaaactgtagtggggatggagtctggcctaagtacagaatgagggatttaattagaaaagttattttcttttgttctgtatcaaactgcagaacagctatatacttggtattttgtacgtgaataacgttttagcttttgtgcccttttgagcttgaagggttatcctcaaaggggaaaactatgaaggggaagaagacaaacctaagataccataaagtaaaggttgacattacatattttcattcacaatgcccatt

SEQ ID NO: 20175 - DNA, 4659 bp, Homo sapiens
  misc_feature 1..4659: note = ENST00000505279
  source 1..4659: mol_type = unassigned DNA
gtcgggtccgtcccgtgcgggcaggtgccgcccctctgccggcgacgccccgggccgcccgcccgtccgcttgccaccatggagctggaggacggtgtggtgtatcaggaggagcccggcggctccggggccgtgatgtcggagcgggtgtccggcctggccggctccatctaccgcgagttcgagcggcttatcgggcgctatgacgaggaggtggtcaaagagctgatgccgctggtggtggctgtgctggagaacctggactcggtgttcgcgcaggaccaggagcaccaggtggagctggagctgctgcgggacgacaacgagcagctcatcacccagtacgagcgggagaaggcgctgcgcaagcacgctgaggagaaattcattgaatttgaagactctcaagaacaggaaaaaaaggacttacagacccgagtggaatctttagaatctcaaacaagacaacttgagctgaaagcgaaaaactatgctgaccagattagcagacttgaagaaagagaagcagaactgaagaaggaatataatgcattacatcaaagacacactgagatgatccataattatatggaacatttagaaagaacaaaacttcatcagctctcagggagtgatcaactagaatccacagctcatagtagaattagaaaagaacgccctatatcattaggaattttcccattacctgctggagatggattgcttacacctgatgctcagaaaggaggagagacccctggatctgagcaatggaaatttcaggaattaagtcaaccacgttctcataccagcctgaaggatgagctttctgatgttagccaaggcggatctaaagctaccactccagcatcaacagctaattcagatgtggcaacaattcctactgatactcccttaaaggaagaaaacgaaggatttgtgaaggttacagatgcgccaaataaatcagagataagcaaacacattgaagtacaggtagcccaggaaactagaaatgtatctactggctctgctgaaaatgaagaaaagtcagaagttcaagcaatcatcgaatctactcctgagctggatatggacaaagatctcagtggatataaaggttcaagcactcccaccaaaggcatagagaacaaagcttttgatcgcaatacagaatctctctttgaagaactgtcttcagctggctcaggcctaataggagatgtggatgaaggagcagatttactaggaatgggtcgggaagttgagaatcttatattagaaaatacacaactgttggaaaccaaaaatgctttgaacatagtgaagaatgatttgatagcaaaagtggatgaactgacctgtgagaaagatgtgctgcaaggggaattggaggctgtgaagcaagccaaactgaaactagaggaaaagaacagagaattggaggaagagcttaggaaagctcgggcagaagctgaagatgcaaggcaaaaagcaaaagatgacgatgatagtgatattcccacagcccagaggaaacggtttactagagtagaaatggcccgtgttctcatggagcgaaaccagtataaagagagattgatggagcttcaggaagctgttcgatggacagagatgattcgggcatcacgagaaaatccagccatgcaggaaaaaaaaaggtcaagcatttggcagtttgtgccaactcgtttcagccgacttttcagctcctcaagtaacacgactaagaagcctgaaccacctgttaatctgaagtacaatgcacccacgtctcatgttactccgtccgtcaagaaaagaagcagcaccttatctcagctccctggggataagtccaaagcctttgatttccttagtgaagaaactgaagctagtttagcctcacgcagagaacaaaagagagagcagtatcgtcaggtaaaagcacatgttcagaaggaagacggtagagtgcaggcttttggctggagtctgcctcagaagtacaaacaggtaaccaatggtcaaggtgaaaataagatgaaaaatttacctgtgcctgtctatctcagacctctggatgaaaaagatacatcaatgaagctgtggtgtgctgttggagtcaatttatctggtgggaagaccagagatggtggttctgttgttggagcaagtgtattttacaaggatgttgctggtttggatacagaaggcagtaaacagcgaagtgcctctcagagtagtttagataagttagatcaggaacttaaggaacagcagaaggagttaaaaaatcaagaagaattatccagtctagtttggatctgtaccagcactcattcggctacaaaagttcttattattgatgctgttcaacctggcaacatcctagacagtttcactgtttgcaactctcatgttctgtgcattgcaagtgtgccaggtgcacgagaaacagactaccctgcaggagaagatctttcagaatctggtcaggtagacaaagcatctttatgtggaagtatgacaagcaacagctcagcagagacagacagcctgttaggaggcatcacagtggttggttgttctgcagaaggtgtgacgggagctgccacttcccctagtacaaatggtgcttctccagtgatggataaaccaccagaaatggaagcagaaaatagtgaggttgatgaaaatgttccaacagcagaagaagcaactgaagctacagaagggaatgcggggtcagctgaagacacagtggacatctcccaaactggcgtctacacagagcatgtctttacagatcctttgggagttcagatcccagaagacctctccccagtgtatcagtcgagcaatgactcagatgcatataaagatcaaatatcagtactgccaaatgaacaagacttggtgagagaagaagcccagaaaatgagtagtcttttaccaactatgtggcttggagctcaaaatggctgtttgtatgtccattcatctgtagcccagtggaggaaatgtctccattccattaaacttaaagattcgattctcagtattgtacacgtgaagggaatcgtgttagtagccctggctgacggcacccttgcaatctttcacagaggagtggatgggcagtgggatttgtcaaactatcacctcttagaccttggacggcctcatcattccatccgttgcatgactgtggtacatgacaaagtctggtgtggctataggaacaaaatctatgtggtgcagccaaaggccatgaaaatagagaaatcttttgatgcacatcccaggaaggagagccaagtgcgacagcttgcgtgggtgggggatggcgtgtgggtctccattcgcttggattctacgctccgtctctatcatgcacacacttatcaacatctacaggatgtggacattgagccttatgtaagcaaaatgttaggtactggaaaactgggcttctcttttgtgagaattacagctcttatggtgtcttgtaatcgtttgtgggtggggacaggaaatggtgtcattatctccatcccattgacagaaacaaataaaacctcaggtgtaccaggaaatcgtcctggaagtgtaatccgtgtatatggtgatgaaaacagtgataaagtgactccagggacatttataccctattgttcaatggcacatgcacagctttgcttccatgggcaccgggatgctgtgaaattctttgtggcagtcccaggtcaagtcatcagcccacaaagtagcagtagtggcacggatctgacgggtgacaaagcagggccatctgcacaggagcctggtagtcagacgcccttgaagtctatgcttgtcatcagtggaggagagggctacatcgacttccgaatgggtgatgaaggtggagaatcagaacttcttggagaggatcttccacttgaaccttctgtcaccaaagcagaaaggagtcacttgatagtgtggcaagtgatgtatggcaatgagtgagcccatgggaaacaggtggagatggggaagccgtctcttctgcatggtttattttccctctatccttttatttaatgctcttttgtgagataagtttcaccacataatgtgtgagcattttttcctgttaactttatattacaaaatccgttctaccataacaatacagaggaactagctgtgttactgcaccagtgttataggtaacttcagtatattatgaacaaatcaaagaatgtttacttcctgcaaactggtgaattatagaaagcaatccagatgtggtttactctgccacagtctaatgtcattcacttcatttgatggggtcacttgttagctgtcactaataatggaattaatgggaaacacttgataaatgaaactgtaccgttaaatacaatagctgagttttccccagtgtattgtaaaattgacacacactaatacaagatggattatcaggatgtatctaaatgtcccgagagggttaaaagctaactgtaaattactttaactttcactttcaaatctgacaaatcttgtttatatggtatataaaactttgttttcatcagatttgggggggttttatattaaagaaattaagactacactatttaaataaacgtttcctgtttctga

SEQ ID NO: 20176 - DNA, 4761 bp, Homo sapiens
  misc_feature 1..4761: note = ENST00000357122
  source 1..4761: mol_type = unassigned DNA
agttggtgcagcggcggttggggtgagagcgcctacgccacccctcccctcctccggccccggcccccaccccgccgggcccagccccagccccggcccgggctccagccctagtacccgtcccagcccgagtcgggtccgtcccgtgcgggcaggtgccgcccctctgccggcgacgccccgggccgcccgcccgtccgcttgccaccatggagctggaggacggtgtggtgtatcaggaggagcccggcggctccggggccgtgatgtcggagcgggtgtccggcctggccggctccatctaccgcgagttcgagcggcttatcgggcgctatgacgaggaggtggtcaaagagctgatgccgctggtggtggctgtgctggagaacctggactcggtgttcgcgcaggaccaggagcaccaggtggagctggagctgctgcgggacgacaacgagcagctcatcacccagtacgagcgggagaaggcgctgcgcaagcacgctgaggagaaattcattgaatttgaagactctcaagaacaggaaaaaaaggacttacagacccgagtggaatctttagaatctcaaacaagacaacttgagctgaaagcgaaaaactatgctgaccagattagcagacttgaagaaagagaagcagaactgaagaaggaatataatgcattacatcaaagacacactgagatgatccataattatatggaacatttagaaagaacaaaacttcatcagctctcagggagtgatcaactagaatccacagctcatagtagaattagaaaagaacgccctatatcattaggaattttcccattacctgctggagatggattgcttacacctgatgctcagaaaggaggagagacccctggatctgagcaatggaaatttcaggaattaagtcaaccacgttctcataccagcctgaaggatgagctttctgatgttagccaaggcggatctaaagctaccactccagcatcaacagctaattcagatgtggcaacaattcctactgatactcccttaaaggaagaaaacgaaggatttgtgaaggttacagatgcgccaaataaatcagagataagcaaacacattgaagtacaggtagcccaggaaactagaaatgtatctactggctctgctgaaaatgaagaaaagtcagaagttcaagcaatcatcgaatctactcctgagctggatatggacaaagatctcagtggatataaaggttcaagcactcccaccaaaggcatagagaacaaagcttttgatcgcaatacagaatctctctttgaagaactgtcttcagctggctcaggcctaataggagatgtggatgaaggagcagatttactaggaatgggtcgggaagttgagaatcttatattagaaaatacacaactgttggaaaccaaaaatgctttgaacatagtgaagaatgatttgatagcaaaagtggatgaactgacctgtgagaaagatgtgctgcaaggggaattggaggctgtgaagcaagccaaactgaaactagaggaaaagaacagagaattggaggaagagcttaggaaagctcgggcagaagctgaagatgcaaggcaaaaagcaaaagatgacgatgatagtgatattcccacagcccagaggaaacggtttactagagtagaaatggcccgtgttctcatggagcgaaaccagtataaagagagattgatggagcttcaggaagctgttcgatggacagagatgattcgggcatcacgagaaaatccagccatgcaggaaaaaaaaaggtcaagcatttggcagtttttcagccgacttttcagctcctcaagtaacacgactaagaagcctgaaccacctgttaatctgaagtacaatgcacccacgtctcatgttactccgtccgtcaagaaaagaagcagcaccttatctcagctccctggggataagtccaaagcctttgatttccttagtgaagaaactgaagctagtttagcctcacgcagagaacaaaagagagagcagtatcgtcaggtaaaagcacatgttcagaaggaagacggtagagtgcaggcttttggctggagtctgcctcagaagtacaaacaggtaaccaatggtcaaggtgaaaataagatgaaaaatttacctgtgcctgtctatctcagacctctggatgaaaaagatacatcaatgaagctgtggtgtgctgttggagtcaatttatctggtgggaagaccagagatggtggttctgttgttggagcaagtgtattttacaaggatgttgctggtttggatacagaaggcagtaaacagcgaagtgcctctcagagtagtttagataagttagatcaggaacttaaggaacagcagaaggagttaaaaaatcaagaagaattatccagtctagtttggatctgtaccagcactcattcggctacaaaagttcttattattgatgctgttcaacctggcaacatcctagacagtttcactgtttgcaactctcatgttctgtgcattgcaagtgtgccaggtgcacgagaaacagactaccctgcaggagaagatctttcagaatctggtcaggtagacaaagcatctttatgtggaagtatgacaagcaacagctcagcagagacagacagcctgttaggaggcatcacagtggttggttgttctgcagaaggtgtgacgggagctgccacttcccctagtacaaatggtgcttctccagtgatggataaaccaccagaaatggaagcagaaaatagtgaggttgatgaaaatgttccaacagcagaagaagcaactgaagctacagaagggaatgcggggtcagctgaagacacagtggacatctcccaaactggcgtctacacagagcatgtctttacagatcctttgggagttcagatcccagaagacctctccccagtgtatcagtcgagcaatgactcagatgcatataaagatcaaatatcagtactgccaaatgaacaagacttggtgagagaagaagcccagaaaatgagtagtcttttaccaactatgtggcttggagctcaaaatggctgtttgtatgtccattcatctgtagcccagtggaggaaatgtctccattccattaaacttaaagattcgattctcagtattgtacacgtgaagggaatcgtgttagtagccctggctgacggcacccttgcaatctttcacagaggagtggatgggcagtgggatttgtcaaactatcacctcttagaccttggacggcctcatcattccatccgttgcatgactgtggtacatgacaaagtctggtgtggctataggaacaaaatctatgtggtgcagccaaaggccatgaaaatagagaaatcttttgatgcacatcccaggaaggagagccaagtgcgacagcttgcgtgggtgggggatggcgtgtgggtctccattcgcttggattctacgctccgtctctatcatgcacacacttatcaacatctacaggatgtggacattgagccttatgtaagcaaaatgttaggtactggaaaactgggcttctcttttgtgagaattacagctcttatggtgtcttgtaatcgtttgtgggtggggacaggaaatggtgtcattatctccatcccattgacagaaacaaataaaacctcaggtgtaccaggaaatcgtcctggaagtgtaatccgtgtatatggtgatgaaaacagtgataaagtgactccagggacatttataccctattgttcaatggcacatgcacagctttgcttccatgggcaccgggatgctgtgaaattctttgtggcagtcccaggtcaagtcatcagcccacaaagtagcagtagtggcacggatctgacgggtgacaaagcagggccatctgcacaggagcctggtagtcagacgcccttgaagtctatgcttgtcatcagtggaggagagggctacatcgacttccgaatgggtgatgaaggtggagaatcagaacttcttggagaggatcttccacttgaaccttctgtcaccaaagcagaaaggagtcacttgatagtgtggcaagtgatgtatggcaatgagtgagcccatgggaaacaggtggagatggggaagccgtctcttctgcatggtttattttccctctatccttttatttaatgctcttttgtgagataagtttcaccacataatgtgtgagcattttttcctgttaactttatattacaaaatccgttctaccataacaatacagaggaactagctgtgttactgcaccagtgttataggtaacttcagtatattatgaacaaatcaaagaatgtttacttcctgcaaactggtgaattatagaaagcaatccagatgtggtttactctgccacagtctaatgtcattcacttcatttgatggggtcacttgttagctgtcactaataatggaattaatgggaaacacttgataaatgaaactgtaccgttaaatacaatagctgagttttccccagtgtattgtaaaattgacacacactaatacaagatggattatcaggatgtatctaaatgtcccgagagggttaaaagctaactgtaaattactttaactttcactttcaaatctgacaaatcttgtttatatggtatataaaactttgttttcatcagatttgggggggttttatattaaagaaattaagactacactatttaaataa

SEQ ID NO: 20177 - DNA, 828 bp, Homo sapiens
  misc_feature 1..828: note = ENST00000506500
  source 1..828: mol_type = unassigned DNA
gaagataaactataaagaaagactttatttgcaaatatacccatttactttaaactgtataatggttagttttctaacatgtgcattaaaaacaaaacaagaaacaactaagattcaaatttgttttttttttaactaaaattattttttaaatgaatagatgtgtttaaaaaataagcttacttattgctagactggcaaaatcccctactccatttactgaggtacttaaaaataactagcatgctgtatctctttttttcccagctttgtcttgaattggcattgccatccttgttttatctcaactggctgtagcttttagataatatcataaggattaaccagtaacctcttacattcattactgttttctaggggaaaatatttggtatttggtttttctgttgcagcaaataaaacctcaggtgtaccaggaaatcgtcctggaagtgtaatccgtgtatatggtgatgaaaacagtgataaagtgactccagggacatttataccctattgttcaatggcacatgcacagctttgcttccatgggcaccgggatgctgtgaaattctttgtggcagtcccaggtcaagtcatcagcccacaaagtagcagtagtggcacggatctgacgggtgacaaagcagggccatctgcacaggagcctggtagtcagacgcccttgaagtctatgcttgtcatcagtggaggagagggctacatcgacttccgaatgggtgatgaaggtggagaatcagaacttcttggagaggatcttccacttgaaccttctgtcaccaaagcagaaaggagtcacttgatagt

SEQ ID NO: 20178 - DNA, 822 bp, Homo sapiens
  misc_feature 1..822: note = ENST00000513746
  source 1..822: mol_type = unassigned DNA
acaagcaacagctcagcagagacagacagcctgttaggaggcatcacagtggttggttgttctgcagaaggtgtgacgggagctgccacttcccctagtacaaatggtgcttctccagtgatggataaaccaccagaaatggaagcagaaaatagtgaggttgatgaaaatgttccaacagcagaagaagcaactgaagctacagaagggaatgcggggtcagctgaagacacagtggacatctcccaaactggcgtctacacagagcatgtctttacagatcctttgggagttcagatcccagaagacctctccccagtgtatcagtcgagcaatgactcagatgcatataaagatcaaatatcagtactgccaaatgaacaagacttggtgagagaagaagcccagaaaatgagtagtcttttaccaactatgtggcttggagctcaaaatggctgaaatcttttgatgcacatcccaggaaggagagccaagtgcgacagcttgcgtgggtgggggatggcgtgtgggtctccattcgcttggattctacgctccgtctctatcatgcacacacttatcaacatctacaggatgtggacattgagccttatgtaagcaaaatgttaggtactggaaaactgggcttctcttttgtgagaattacagctcttatggtgtcttgtaatcgtttgtgggtggggacaggaaatggtgtcattatctccatcccattgacagaaacaaataaaacctcaggtgtaccaggaaatcgtcctggaagtgtaatccgtgtatatggtgatgaaaacagtgataaag

SEQ ID NO: 20179 - DNA, 943 bp, Homo sapiens
  misc_feature 1..943: note = ENST00000511312
  source 1..943: mol_type = unassigned DNA
atgggcagtgggatttgtcaaactatcacctcttagaccttggacggcctcatcattccatccgttgcatgactgtggtacatgacaaagtctggtgtggctataggaacaaaatctatgtggtgcagccaaaggccatgaaaatagagaaatcttttgatgcacatcccaggaaggagagccaagtgcgacagcttgcgtgggtgggggatggcgtgtgggtctccattcgcttggattctacgctccgtctctatcatgcacacacttatcaacatctacaggatgtggacattgagccttatgtaagcaaaatgttaggtactggaaaactgggcttctcttttgtgagaattacagctcttatggtgtcttgtaatcgtttgtgggtggggacaggaaatggtgtcattatctccatcccattgacagaaagtaagtatatttttagataactgccatggaacaaataggagaattataggaaatagttatgtctgaaattcaaatctgtgttagctcagaaaatcagtgatggcaaagatctagctatagttacttcactcaatgaaacttataaattctaggaaaataagttttcatgtatcaagaccaatactcataattaaaagtttttcgttgtcaaaacattttcacagttcaggaatcacagtcctatttcatcttttgaaataaaagttaaagtccatttttcttaagccttattataccattatccaaaaacactacctagcattcatcttagtttttcatatctccttagcagatagtttagtatattccatttgtcttatttgaggtttaaaaaaagttgtggaagaagtttctcaggagttcagcaagcctttccatctatcttctattttaaaagaatgtgatttattgtttttatgaataaaatatacctcgtgtgtttctcata

SEQ ID NO: 20180 - DNA, 750 bp, Homo sapiens
  misc_feature 1..750: note = ENST00000513906
  source 1..750: mol_type = unassigned DNA
aggaacagcagaaggagttaaaaaatcaagaagaattatccagtctagtttggatctgtaccagcactcattcggctacaaaagttcttattattgatgctgttcaacctggcaacatcctagacagtttcactgtttgcaactctcatgttctgtgcattgcaagtgtgccaggtgcacgagaaacagactaccctgcaggagaagatctttcagaatctggtcaggtagacaaagcatctttatgtggaagtatgacaagcaacagctcagcagagacagacagcctgttaggaggcatcacagtggttggttgttctgcagaaggtgtgacgggagctgccacttcccctagtacaaatggtgcttctccagtgatggataaaccaccagcagaagaagcaactgaagctacagaagggaatgcggggtcagctgaagacacagtggacatctcccaaactggcgtctacacagagcatgtctttacagatcctttgggagttcagatcccagaagacctctccccagtgtatcagtcgagcaatgactcagatgcatataaagatcaaatatcagtactgccaaatgaacaagacttggtgagagaagaagcccagaaaatgagtagtcttttaccaactatgtggcttggagctcaaaatggctgtttgtatgtccattcatctgtagcccagtggaggaaatgtctccattccattaaacttaaagattcgattctcagtattg

SEQ ID NO: 20181 - DNA, 2523 bp, Homo sapiens
  misc_feature 1..2523: note = ENST00000514613
  source 1..2523: mol_type = unassigned DNA
gacaacttgagctgaaagcgaaaaactatgctgaccagattagcagacttgaagaaagagaagcagaactgaagaaggaatataatgcattacatcaaagacacactgagatgatccataattatatggaacatttagaaagaacaaaacttcatcagctctcagggagtgatcaactagaatccacagctcatagtagaattagaaaagaacgccctatatcattaggaattttcccattacctgctggagatggattgcttacacctgatgctcagaaaggaggagagacccctggatctgagcaatggaaatttcaggaattaagtcaaccacgttctcataccagcctgaaggatgagctttctgatgttagccaaggcggatctaaagctaccactccagcatcaacagctaattcagatgtggcaacaattcctactgatactcccttaaaggaagaaaacgaaggatttgtgaaggttacagatgcgccaaataaatcagagataagcaaacacattgaagtacaggtagcccaggaaactagaaatgtatctactggctctgctgaaaatgaagaaaagtcagaagttcaagcaatcatcgaatctactcctgagctggatatggacaaagatctcagtggatataaaggttcaagcactcccaccaaaggcatagagaacaaagcttttgatcgcaatacagaatctctctttgaagaactgtcttcagctggctcaggcctaataggagatgtggatgaaggagcagatttactaggaatgggtcgggaagttgagaatcttatattagaaaatacacaactgttggaaaccaaaaatgctttgaacatagtgaagaatgatttgatagcaaaagtggatgaactgacctgtgagaaagatgtgctgcaaggggaattggaggctgtgaagcaagccaaactgaaactagaggaaaagaacagagaattggaggaagagcttaggaaagctcgggcagaagctgaagatgcaaggcaaaaagcaaaagatgacgatgatagtgatattcccacagcccagaggaaacggtttactagagtagaaatggcccgtgttctcatggagcgaaaccagtataaagagagattgatggagcttcaggaagctgttcgatggacagagatgattcgggcatcacgagaaaatccagccatgcaggaaaaaaaaaggtcaagcatttggcagtttttcagccgacttttcagctcctcaagtaacacgactaagaagcctgaaccacctgttaatctgaagtacaatgcacccacgtctcatgttactccgtccgtcaagaaaagaagcagcaccttatctcagctccctggggataagtccaaagcctttgatttccttagtgaagaaactgaagctagtttagcctcacgcagagaacaaaagagagagcagtatcgtcaggtaaaagcacatgttcagaaggaagacggtagagtgcaggcttttggctggagtctgcctcagaagtacaaacaggtaaccaatggtcaaggtgaaaataagatgaaaaatttacctgtgcctgtctatctcagacctctggatgaaaaagatacatcaatgaagctgtggtgtgctgttggagtcaatttatctggtgggaagaccagagatggtggttctgttgttggagcaagtgtattttacaaggatgttgctggtttggatacagaaggcagtaaacagcgaagtgcctctcagagtagtttagataagttagatcaggaacttaaggaacagcagaaggagttaaaaaatcaagaagaattatccagtctagtttggatctgtaccagcactcattcggctacaaaagttcttattattgatgctgttcaacctggcaacatcctagacagtttcactgtttgcaactctcatgttctgtgcattgcaagtgtgccaggtgcacgagaaacagactaccctgcaggagaagatctttcagaatctggtcaggtagacaaagcatctttatgtggaagtatgacaagcaacagctcagcagagacagacagcctgttaggaggcatcacagtggttggttgttctgcagaaggtgtgacgggagctgccacttcccctagtacaaatggtgcttctccagtgatggataaaccaccagaaatggaagcagaaaatagtgaggttgatgaaaatgttccaacagcagaagaagcaactgaagctacagaagggaatgcggggtcagctgaagacacagtggacatctcccaaactggcgtctacacagagcatgtctttacagatcctttgggagttcagatcccagaagacctctccccagtgtatcagtcgaggtataataatgggtcatcaacttaggcaactgggtgaagtgcacaaataaaaggaaccaaaataatctcaaacagtcaaaagatttccactaattagtgtcactgtggtggattaaaagatacctattcttgtgata

SEQ ID NO: 20182 - DNA, 2369 bp, Homo sapiens
  misc_feature 1..2369: note = ENST00000505173
  source 1..2369: mol_type = unassigned DNA
aagacacactgagatgatccataattatatggaacatttagaaagaacaaaacttcatcagctctcagggagtgatcaactagaatccacagctcatagtagaattagaaaagaacgccctatatcattaggaattttcccattacctgctggagatggattgcttacacctgatgctcagaaaggaggagagacccctggatctgagcaatggaaatttcaggaattaagtcaaccacgttctcataccagcctgaaggtcagcaatagtcctgaacctcagaaggctgtagaacaggaggatgagctttctgatgttagccaaggcggatctaaagctaccactccagcatcaacagctaattcagatgtggcaacaattcctactgatactcccttaaaggaagaaaacgaaggatttgtgaaggttacagatgcgccaaataaatcagagataagcaaacacattgaagtacaggtagcccaggaaactagaaatgtatctactggctctgctgaaaatgaagaaaagtcagaagttcaagcaatcatcgaatctactcctgagctggatatggacaaagatctcagtggatataaaggttcaagcactcccaccaaaggcatagagaacaaagcttttgatcgcaatacagaatctctctttgaagaactgtcttcagctggctcaggcctaataggagatgtggatgaaggagcagatttactaggaatgggtcgggaagttgagaatcttatattagaaaatacacaactgttggaaaccaaaaatgctttgaacatagtgaagaatgatttgatagcaaaagtggatgaactgacctgtgagaaagatgtgctgcaaggggaattggaggctgtgaagcaagccaaactgaaactagaggaaaagaacagagaattggaggaagagcttaggaaagctcgggcagaagctgaagatgcaaggcaaaaagcaaaagatgacgatgatagtgatattcccacagcccagaggaaacggtttactagagtagaaatggcccgtgttctcatggagcgaaaccagtataaagagagattgatggagcttcaggaagctgttcgatggacagagatgattcgggcatcacgagaaaatccagccatgcaggaaaaaaaaaggtcaagcatttggcagtttttcagccgacttttcagctcctcaagtaacacgactaagaagcctgaaccacctgttaatctgaagtacaatgcacccacgtctcatgttactccgtccgtcaagaaaagaagcagcaccttatctcagctccctggggataagtccaaagcctttgatttccttagtgaagaaactgaagctagtttagcctcacgcagagaacaaaagagagagcagtatcgtcaggtaaaagcacatgttcagaaggaagacggtagagtgcaggcttttggctggagtctgcctcagaagtacaaacaggtaaccaatggtcaaggtgaaaataagatgaaaaatttacctgtgcctgtctatctcagacctctggatgaaaaagatacatcaatgaagctgtggtgtgctgttggagtcaatttatctggtgggaagaccagagatggtggttctgttgttggagcaagtgtattttacaaggatgttgctggtttggatacagaaggcagtaaacagcgaagtgcctctcagagtagtttagataagttagatcaggaacttaaggaacagcagaaggagttaaaaaatcaagaagaattatccagtctagtttggatctgtaccagcactcattcggctacaaaagttcttattattgatgctgttcaacctggcaacatcctagacagtttcactgtttgcaactctcatgttctgtgcattgcaagtgtgccaggtgcacgagaaacagactaccctgcaggagaagatctttcagaatctggtcaggtagacaaagcatctttatgtggaagtatgacaagcaacagctcagcagagacagacagcctgttaggaggcatcacagtggttggttgttctgcagaaggtgtgacgggagctgccacttcccctagtacaaatggtgcttctccagtgatggataaaccaccagaaatggaagcagaaaatagtgaggttgatgaaaatgttccaacagcagaagaagcaactgaagctacagaagggaatgcggggtcagctgaagacacagtggacatctcccaaactggcgtctacacagagcatgtctttacagatcctttgggagttcagatcccagaagacctctccccagtgtatcagtcgaggtataataatgggtcatcaacttaggcaactgggtgaa

SEQ ID NO: 20183 - DNA, 558 bp, Homo sapiens
  misc_feature 1..558: note = ENST00000514205
  source 1..558: mol_type = unassigned DNA
ctgtaattgttttagtaaaaaaaatgttatttatagaagtttactttgctgttacaagaagatttatttttcaggtgcacgagaaacagactaccctgcaggagaagatctttcagaatctggtcaggtagacaaagcatctttatgtggaagtatgacaagcaacagctcagcagagacagacagcctgttaggaggcatcacagtggttggttgttctgcagaaggtgtgacgggagctgccacttcccctagtacaaatggtgcttctccagtgatggataaaccaccaggtatatccattctctttacctgccatctgtatagagtctaaggctacactcagatgcctcattatggacttaatttagatcttaagtaacaaggttgaaagaacttgaaagaagatactgtagtcccagctactcgggaggctgaggcaggagaatggcgtgaacctgggaggtggagcttgcagtgagccaagatcacgccgccgcactccagcctgggcaacagagcaagactctgtctcaaaaaaaaaaaaaatgctgtaat

SEQ ID NO: 20184 - DNA, 848 bp, Homo sapiens
  misc_feature 1..848: note = ENST00000506483
  source 1..848: mol_type = unassigned DNA
cctgttattgactcatgcctataatcctaacactttgggaggccaaggtggaggatggcttgagctcagggagtttgagaccagcctaggcaacatagcatgacctcatctctacaaaaaatttaaaaaattagctgggtgtggtggcctgtgcctgtagtcccagctaccttggaggctgaggtgggaggggaccgcttaagcctgacagattgaggctgcagtgagccatgatcaagccactgcactctagcctgggcagtagagcgaccctgtctcaaaaaaacaaaaaaacaaaaaacctgaacttgatttcaaggagtaaataacagcagtgcttgctcatgtctcagtggatctgtaataagttcacttttgatgaggcttactaatgtgcctttttcactcctccttccaccattattaggtaaccaatggtcaaggtgaaaataagatgaaaaatttacctgtgcctgtctatctcagacctctggatgaaaaagatacatcaatgaagctgtggtgtgctgttggagtcaatttatctggtgggaagaccagagatggtggttctgttgttggagcaagtgtattttacaaggatgttgctggtttggatacagaaggcagtaaacagcgaagtgcctctcagagtagtttagataagttagatcaggaacttaaggaacagcagaaggagttaaaaaatcaagaagaattatccagtctagtttggatctgtaccagcactcattcggctacaaaagttcttattattgatgctgttcaacctggcaacatcctagacagtttcactgtttgcaactctcatgttctgtgcattgcaa

SEQ ID NO: 20185 - DNA, 728 bp, Homo sapiens
  misc_feature 1..728: note = ENST00000513827
  source 1..728: mol_type = unassigned DNA
aggaagctgttcgatggacagagatgattcgggcatcacgagaaaatccagccatgcaggaaaaaaaaaggtcaagcatttggcagtttttcagccgacttttcagctcctcaagtaacacgactaagaagcctgaaccacctgttaatctgaagtacaatgcacccacgtctcatgttactccgtccgtcaagaaaagaagcagcaccttatctcagctccctggggataagtccaaagcctttgatttccttagtgaagaaactgaagctagtttagcctcacgcagagaacaaaagagagagcagtatcgtcaggtaaaagcacatgttcagaaggaagacggtagagtgcaggcttttggctggagtctgcctcagaagtacaaacaggtaatatgcacatgtggtaagagcatccagcaggaaagaagagggcaagttgagtgtgcgtgggcatgaaggattcactgtacgcatcccagccctgctcatctcagccgcatggactgggcacacatttaagcatggagggtggtggttttcaggctgttttctagagctgtagaactcaaatgaaatgctctgagtctgtgagggggggaggagtcaataaagggtggctaagtgcatggagtttgaggtacccgctctgctgtaaccagagcaattctggtttaatatttgaagatttcattttttaaaaaaccagcatcattgttgaaaaaa

SEQ ID NO: 20186 - DNA, 292 bp, Homo sapiens
  misc_feature 1..292: note = ENST00000515685
  source 1..292: mol_type = unassigned DNA
ggaagctgttcgatggacagagatgattcgggcatcacgagaaaatccagccatgcaggaaaaaaaaaggtcaagcatttggcagtttttcagccgacttttcagctcctcaagtaacacgactaagaagcctgaaccacctgttaatctgaagtacaatgcacccacgtctcatgttactccgtccgtcaagaaaagaagcagcaccttatctcagctccctggggataagtccaaagcctttgatttccttagtgaagagtaagtcttttccaaattaatcattatattc

SEQ ID NO: 20187 - DNA, 627 bp, Homo sapiens
  misc_feature 1..627: note = ENST00000513547
  source 1..627: mol_type = unassigned DNA
actaggtttcctggcaaagggtgcatgacaagtaatctatgggaagcactgagaccagcacctggtatagagcagaggagctgccattattgcttgtgtttgctgggatcacacaacaaaaacattctataatttcttcaccagctatttccatggagcttagtgagaatttcttaggaagcctttgagaaatctttttaagttatattttctagtaaacgtaaattatagcactcccaccaaaggcatagagaacaaagcttttgatcgcaatacagaatctctctttgaagaactgtcttcagctggctcaggcctaataggagatgtggatgaaggagcagatttactaggaatgggtcgggaagttgagaatcttatattagaaaatacacaactgttggaaaccaaaaatgctttgaacatagtgaagaatgatttgatagcaaaagtggatgaactgacctgtgagaaagatgtgctgcaaggggaattggaggctgtgaagcaagccaaactgaaactagaggaaaagaacagagaattggaggaagagcttaggaaagctcgggcagaagctgaagatgcaaggcaaaaagcaaaagatgacgatgatagtgatattcc

SEQ ID NO: 20188 - DNA, 522 bp, Homo sapiens
  misc_feature 1..522: note = ENST00000511795
  source 1..522: mol_type = unassigned DNA
ggctctgctgaaaatgaagaaaagtcagaagttcaagcaatcatcgaatctactcctgagctggatatggacaaagatctcagtggatataaaggttcaagcactcccaccaaaggcatagagaacaaagcttttgatcgcaatacagaatctctctttgaagaactgtcttcagctggctcaggcctaataggagatgtggatgaaggagcagatttactaggggaatattctgaccataatttctttggaatgggtcgggaagttgagaatcttatattagaaaatacacaactgttggaaaccaaaaatgctttgaacatagtgaagaatgatttgatagcaaaagtggatgaactgacctgtgagaaagatgtgctgcaaggggaattggaggctgtgaagcaagccaaactgaaactagaggaaaagaacagagaattggaggaagagcttaggaaagctcgggcagaagctgaagatgcaaggcaaaaagcaaaagatgacgatgatagtgatatt

SEQ ID NO: 20189 - DNA, 554 bp, Homo sapiens
  misc_feature 1..554: note = ENST00000576492
  source 1..554: mol_type = unassigned DNA
gacctttgaaatgtgctcaaaacagtcagcaatagtcctgaacctcagaaggctgtagaacaggaggatgagctttctgatgttagccaaggcggatctaaagctaccactccagcatcaacagctaattcagatgtggcaacaattcctactgatactcccttaaaggaagaaaacgaaggatttgtgaaggttacagatgcgccaaataaatcagagataagcaaacacattgaagtacaggtagcccaggaaactagaaatgtatctactggctctgctgaaaatgaagaaaagtcagaagttcaagcaatcatcgaatctactcctgagctggatatggacaaagatctcagtggatataaaggttcaagcactcccaccaaaggcatagagaacaaagcttttgatcgcaatacagaatctctctttgaagaactgtcttcagctggctcaggcctaataggagatgtggatgaaggagcagatttactaggaatgggtcgggaagttgagaatcttatattagaaaatacacaactgttggaaaccaa

SEQ ID NO: 20190 - DNA, 686 bp, Homo sapiens
  misc_feature 1..686: note = ENST00000510855
  source 1..686: mol_type = unassigned DNA
gcataaatgctaggagcagcagctctatggttatgaggtggggagaacggaatgacgtcatcgcttgggagctgctgcaggatggagtggaaagctgctgctgatggcattgtttttgtggcagcaagctgaatgacagatcctcactacaaagatacccctttggcccccgtgtaggcctccttggttcgggtgtttcaccatgccagcacagcgccatgagtcctggatgcatgctgctgtttgtgtttggctttgttggcggggcggtggtcattaattctgctatcttagtatctctctctgttttgctgcttgtgcacttttctatttctaccggtgtgccagctctgacgcagaacctaccaaggatactcagaaaagaacgccctatatcattaggaattttcccattacctgctggagatggattgcttacacctgatgctcagaaaggaggagagacccctggatctgagcaatggaaatttcaggaattaagtcaaccacgttctcataccagcctgaaggtcagcaatagtcctgaacctcagaaggctgtagaacaggaggatgagctttctgatgttagccaaggcggatctaaagctaccactccagcatcaacagctaattcagatgtggcaacaattcctactgatactcccttaaaggaagaaaacgaa

SEQ ID NO: 20191 - DNA, 1298 bp, Homo sapiens
  misc_feature 1..1298: note = ENST00000511987
  source 1..1298: mol_type = unassigned DNA
ggagaacggaatgacgtcatcgcttgggagctgctgcaggatggagtggaaagctgctgctgatggcattgtttttgtggcagcaagctgaatgacagatcctcactacaaagatacccctttggcccccgtgtaggcctccttggttcgggtgtttcaccatgccagcacagcgccatgagtcctggatgcatgctgctgtttgtgtttggctttgttggcggggcggtggtcattaattctgctatcttagtatctctctctgttttgctgcttgtgcacttttctatttctaccggtgtgccagctctgacgcagaacctaccaaggatactcagaaaagaacgccctatatcattaggaattttcccattacctgctggagatggattgcttacacctgatgctcagaaaggaggagagacccctggatctgagcaatggaaatttcaggaattaagtcaaccacgttctcataccagcctgaaggtcagcaatagtcctgaacctcagaaggctgtagaacaggaggtgagaatggtgcttcttaacattttgcaaaaagtatactaaagtgattaactattgattacttcctcaactgctattctcaagacatcagatgctcagcttggaagactattgttgtaattcactgaaatataaaagaaaattatttccactgtagtggttgtcagggctttactgcaatctgtaatttattccttccccaaagtaagcatttttaaataaaggaaagaaaatataagtaaattctgtgaaattcagcctgtttgcatttatccagctctatgtaatggtatactttccagaaataccttcttcagggcataatgtatgtaacttgtatttgtcctgaatgtggcctagtgtgtcatcttacagtggactgcttccttagtttaatagagttcttcatctccagtcagggcaccatccagctttattcatcaaacatctgttaagagcctactacaggccaggtgtggtggctcatgcctgaaatcccagcactctgcccaggcaggcggatcacttggtcaggagtaggagttcaagaccagcatggccagtatggtgaaatcttgtctctactaaaaatacaaaaatcagccaggcatggtggcagacacctgtaatcccaggtacttaggagtctgaggcaggagaattgcttgaacccgggaggtggaggttgcagtgagctaagatggtgccactgccttccagcctgggcaacacagcgagactccatctcaaaaaaaaaaaaaaaaaaa

SEQ ID NO: 20192 - DNA, 528 bp, Homo sapiens
  misc_feature 1..528: note = ENST00000502329
  source 1..528: mol_type = unassigned DNA
agatgatccataattatatggaacatttagaaagaacaaaacttcatcagctctcagggagtgatcaactagaatccacagctcatagtagaattagaaaagaacgccctatatcattaggaattttcccattacctgctggagatggattgcttacacctgatgctcagaaaggaggagagacccctggatctgagcaatggaaatttcaggaattaagtcaaccacgttctcataccagcctgaaggtcagcaatagtcctgaacctcagaaggctgtagaacaggaggtgagaatggtgcttcttaacattttgcaaaaagtatactaaagtgattaactattgattacttcctcaactgctattctcaagacatcagatgctcagcttggaagactattgttgtaattcactgaaatataaaagaaaattatttccactgtagtggttgtcagggctttactgcaatctgtaatttattccttccccaaagtaagcatttttaaataaaggaaagaaaatataa

SEQ ID NO: 20193 - DNA, 8246 bp, Homo sapiens
  misc_feature 1..8246: note = ENST00000618113
  source 1..8246: mol_type = unassigned DNA
agttggtgcagcggcggttggggtgagagcgcctacgccacccctcccctcctccggccccggcccccaccccgccgggcccagccccagccccggcccgggctccagccctagtacccgtcccagcccgagtcgggtccgtcccgtgcgggcaggtgccgcccctctgccggcgacgccccgggccgcccgcccgtccgcttgccaccatggagctggaggacggtgtggtgtatcaggaggagcccggcggctccggggccgtgatgtcggagcgggtgtccggcctggccggctccatctaccgcgagttcgagcggcttatcgggcgctatgacgaggaggtggtcaaagagctgatgccgctggtggtggctgtgctggagaacctggactcggtgttcgcgcaggaccaggagcaccaggtggagctggagctgctgcgggacgacaacgagcagctcatcacccagtacgagcgggagaaggcgctgcgcaagcacgctgaggagaaattcattgaatttgaagactctcaagaacaggaaaaaaaggacttacagacccgagtggaatctttagaatctcaaacaagacaacttgagctgaaagcgaaaaactatgctgaccagattagcagacttgaagaaagagaagcagaactgaagaaggaatataatgcattacatcaaagacacactgagatgatccataattatatggaacatttagaaagaacaaaacttcatcagctctcagggagtgatcaactagaatccacagctcatagtagaattagaaaagaacgccctatatcattaggaattttcccattacctgctggagatggattgcttacacctgatgctcagaaaggaggagagacccctggatctgagcaatggaaatttcaggaattaagtcaaccacgttctcataccagcctgaaggatgagctttctgatgttagccaaggcggatctaaagctaccactccagcatcaacagctaattcagatgtggcaacaattcctactgatactcccttaaaggaagaaaacgaaggatttgtgaaggttacagatgcgccaaataaatcagagataagcaaacacattgaagtacaggtagcccaggaaactagaaatgtatctactggctctgctgaaaatgaagaaaagtcagaagttcaagcaatcatcgaatctactcctgagctggatatggacaaagatctcagtggatataaaggttcaagcactcccaccaaaggcatagagaacaaagcttttgatcgcaatacagaatctctctttgaagaactgtcttcagctggctcaggcctaataggagatgtggatgaaggagcagatttactaggaatgggtcgggaagttgagaatcttatattagaaaatacacaactgttggaaaccaaaaatgctttgaacatagtgaagaatgatttgatagcaaaagtggatgaactgacctgtgagaaagatgtgctgcaaggggaattggaggctgtgaagcaagccaaactgaaactagaggaaaagaacagagaattggaggaagagcttaggaaagctcgggcagaagctgaagatgcaaggcaaaaagcaaaagatgacgatgatagtgatattcccacagcccagaggaaacggtttactagagtagaaatggcccgtgttctcatggagcgaaaccagtataaagagagattgatggagcttcaggaagctgttcgatggacagagatgattcgggcatcacgagaaaatccagccatgcaggaaaaaaaaaggtcaagcatttggcagttactgtcttcttttagtttcagccgacttttcagctcctcaagtaacacgactaagaagcctgaaccacctgttaatctgaagtacaatgcacccacgtctcatgttactccgtccgtcaagaaaagaagcagcaccttatctcagctccctggggataagtccaaagcctttgatttccttagtgaagaaactgaagctagtttagcctcacgcagagaacaaaagagagagcagtatcgtcaggtaaaagcacatgttcagaaggaagacggtagagtgcaggcttttggctggagtctgcctcagaagtacaaacaggtaaccaatggtcaaggtgaaaataagatgaaaaatttacctgtgcctgtctatctcagacctctggatgaaaaagatacatcaatgaagctgtggtgtgctgttggagtcaatttatctggtgggaagaccagagatggtggttctgttgttggagcaagtgtattttacaaggatgttgctggtttggatacagaaggcagtaaacagcgaagtgcctctcagagtagtttagataagttagatcaggaacttaaggaacagcagaaggagttaaaaaatcaagaagaattatccagtctagtttggatctgtaccagcactcattcggctacaaaagttcttattattgatgctgttcaacctggcaacatcctagacagtttcactgtttgcaactctcatgttctgtgcattgcaagtgtgccaggtgcacgagaaacagactaccctgcaggagaagatctttcagaatctggtcaggtagacaaagcatctttatgtggaagtatgacaagcaacagctcagcagagacagacagcctgttaggaggcatcacagtggttggttgttctgcagaaggtgtgacgggagctgccacttcccctagtacaaatggtgcttctccagtgatggataaaccaccagaaatggaagcagaaaatagtgaggttgatgaaaatgttccaacagcagaagaagcaactgaagctacagaagggaatgcggggtcagctgaagacacagtggacatctcccaaactggcgtctacacagagcatgtctttacagatcctttgggagttcagatcccagaagacctctccccagtgtatcagtcgagcaatgactcagatgcatataaagatcaaatatcagtactgccaaatgaacaagacttggtgagagaagaagcccagaaaatgagtagtcttttaccaactatgtggcttggagctcaaaatggctgtttgtatgtccattcatctgtagcccagtggaggaaatgtctccattccattaaacttaaagattcgattctcagtattgtacacgtgaagggaatcgtgttagtagccctggctgacggcacccttgcaatctttcacagaggagtggatgggcagtgggatttgtcaaactatcacctcttagaccttggacggcctcatcattccatccgttgcatgactgtggtacatgacaaagtctggtgtggctataggaacaaaatctatgtggtgcagccaaaggccatgaaaatagagaaatcttttgatgcacatcccaggaaggagagccaagtgcgacagcttgcgtgggtgggggatggcgtgtgggtctccattcgcttggattctacgctccgtctctatcatgcacacacttatcaacatctacaggatgtggacattgagccttatgtaagcaaaatgttaggtactggaaaactgggcttctcttttgtgagaattacagctcttatggtgtcttgtaatcgtttgtgggtggggacaggaaatggtgtcattatctccatcccattgacagaaacaaataaaacctcaggtgtaccaggaaatcgtcctggaagtgtaatccgtgtatatggtgatgaaaacagtgataaagtgactccagggacatttataccctattgttcaatggcacatgcacagctttgcttccatgggcaccgggatgctgtgaaattctttgtggcagtcccaggtcaagtcatcagcccacaaagtagcagtagtggcacggatctgacgggtgacaaagcagggccatctgcacaggagcctggtagtcagacgcccttgaagtctatgcttgtcatcagtggaggagagggctacatcgacttccgaatgggtgatgaaggtggagaatcagaacttcttggagaggatcttccacttgaaccttctgtcaccaaagcagaaaggagtcacttgatagtgtggcaagtgatgtatggcaatgagtgagcccatgggaaacaggtggagatggggaagccgtctcttctgcatggtttattttccctctatccttttatttaatgctcttttgtgagataagtttcaccacataatgtgtgagcattttttcctgttaactttatattacaaaatccgttctaccataacaatacagaggaactagctgtgttactgcaccagtgttataggtaacttcagtatattatgaacaaatcaaagaatgtttacttcctgcaaactggtgaattatagaaagcaatccagatgtggtttactctgccacagtctaatgtcattcacttcatttgatggggtcacttgttagctgtcactaataatggaattaatgggaaacacttgataaatgaaactgtaccgttaaatacaatagctgagttttccccagtgtattgtaaaattgacacacactaatacaagatggattatcaggatgtatctaaatgtcccgagagggttaaaagctaactgtaaattactttaactttcactttcaaatctgacaaatcttgtttatatggtatataaaactttgttttcatcagatttgggggggttttatattaaagaaattaagactacactatttaaataaacgtttcctgtttctgacttattagagctctaaagtttatgaggcctacttctctgaatattctgatgggttttttttgagaccagtctcattttcatactgacatgtctgaaagatttattatttataaagcttaggacatactctgggaagcttagaagatacttcagcactgggaggattttttaaaggaaatgtgttttgtatttcttgtaccagagaatggtgatgttgattgagttttttccatgtaaaaaatgtacttgtttgccaaatgttcctagattgctcttaacctgttaatacaagtaaaactgtagtggggatggagtctggcctaagtacagaatgagggatttaattagaaaagttattttcttttgttctgtatcaaactgcagaacagctatatacttggtattttgtacgtgaataacgttttagcttttgtgcccttttgagcttgaagggttatcctcaaaggggaaaactatgaaggggaagaagacaaacctaagataccataaagtaaaggttgacattacatattttcattcacaatgcccattaaaaaaaaaaaataggttgggcatggtggctcacgcctgtaatcccaacactttaggaggctgaggcagatggattgcttgagcccaggagttcaagaccagcctgggcaacatggcgaaaccctgtctctaccaaaaaaaaaaaacaaaataaattaaccgggtgtggtggcacatgcctgtagtcccagctacttgggaggctgaggtgggaggatgacctgggcccaggaggtggaggttgcagtgagccttgatagcaccactgcactccagcctgggtgacggagcaagaccctgtctcaaaacagacaaacaagcaaaaaatagattaaagtctggatttcactgattttcttgcttaataagttttttaaaaccacgatgctgcaattttttccctctcaagcttcttgaaaatgtgtgatttacccttttttatctattactctaggcaaagctaaatatgatttttttttttttttttgagacggagtctggctctgttgcccaggctggaatgcagtggtgcgatctcagctcactgcaacctccacctctcaggttcaagtagttctcctgcctcagcctcccaagtagctgggattacaggtgtgtgccaccctgcccagctaatttttgtatttttagtagagacagggtttcaccacattggccaggctggtctcaaactcctgacctcagatgatctacccgccttggcctcccgaagtgcttgaattacaggcgtgagcccccgcgccggtccgaagcaaagctaaatgtaattttatgtactgttttaacagtataaacctatgggataaaggcccccaatcatcagaaggactactgaaaagaaaagaaagcaaacgtagatgtcaaattgtctaaacattcttaagtaccactgattttttttttctggactattatacaaagatgtctgtaaaaagtataccagtggcttttatgcatatacacgattaggctagattgtgaagtacatgggatttcatgagccagaggaggcatttggatccattgggccacatgtgactataagcacattgtgtacacaataaaattgtagccactcatgtattaaaactgttttggtaaaagctgtattaaaagaataattttttgcttgagctacttagtcacttttttgcagggcaccaaaatgtaggctacttttccatagcttgtttgctatgtttttatttcatcttaaatctgagccatttttggcaatatcttttaaaaaatcattattaaacatttattggaaatgttgtatagattcacaagaaagagacaccaaagtgtttgggaattttaatcccaagaagtaaacatcccagagtcagatcccatttgctgttgttcagccatgtttgtatgactgaatgtaatttaggaaatcaggagttagagatgaaaaatacaaacatgtcaaatggttgtaattgctttttttgaacttactggctttaacttaagtaatataggtgtgtagttgttttatctaaagatgtcagattatctgtggccctgttaattaactgcagggaccagagagaggacaaaaatgcctgtataatttgctttaaaggcttgtccttatgtttgtaatttcagttaaatattttctacagattgcttcacttcccctttcccccaataacaagttcatattcttgtaatgtttactttggtcaacgtggtaatttttggaagaaaatgccaaaatgtaagcttctcacaagcagcaaaggaatgtaactgcctgtagctaccacatcaagggagagaagaggcttgcgtactttgggttgatctcactgtacaaaaaaagtgtacccctattggaagaaataaggaatacttgaaggtttctcctttttttacacttgagtcatgtgcaaggttgaaccatatgaaattgccagtgttcaaccattgctgatctgcaaaagcgacaatatcatatgcctcaacctaacacttactcttaaatgcaggttaaaatctctgtgaggcaaagggataatattctctaggaactcacttttgagagtatttttctctaacccatgtggatctaaattttaaaaataggaatgaatctcttaattgcagcttgtggagagtataaaacattttgagcacaatatgcagcacataacttttcagattgtgtttgcatagaaaaggttaaaatcaattctttcagttactgtattgttcatttcttgtaaaggtcttcctacatttgagacgagaccctttaacataggctgccttagtaacaaaataaaacagatgtgtcataatattaactgtcctaaagaacatgtgtcttgcaaatgccatggaactgaatatttatttccttgtgagtattatgaccgttaccaaaggactcaaccagatttagggctcttcttaattgatcatgttcagaaagggactcatttggtcccactttgtaacatgggaagagtagaagagaaaattaaatgtggaaatcataaatgcttttctaacagggttatgctattctgtaacactaaatgtctgtcttttctcttaaaagattaagttttattaattttgtcatacatttctctatttgaatatatcttaaccattttatgttccaaattcgttttttgtccaagacattctatcagaattttacttgcctctataatctgaaaaatgggttctagaatgtcccacttgctgtctcttagaggctgagcttcatttctatgagcaaagagctcatttagcaatgtagttatttcagtatttatttctattatggaatccctggggttcagaatgtaactttgtacatgagatatatataaatatgtatatgaacatgta

SEQ ID NO: 20194 - DNA, 3701 bp, Homo sapiens
  misc_feature 1..3701: note = ENST00000231061
  source 1..3701: mol_type = unassigned DNA
taggcagcagccccggaacagatgaggcaggcagggttgggacgtttggtcaggacagcccaccgcaaaaagaggaggaaagaaatgaaagacagagacagctttggctatgggagaaggaggaggccgggggaaggaggagacaggaggaggagggaccacggggtggaggggagatagacccagcccagagctctgagtggtttcctgttgcctgtctctaaacccctccacattcccgcggtccttcagactgcccggagagcgcgctctgcctgccgcctgcctgcctgccactgagggttcccagcaccatgagggcctggatcttctttctcctttgcctggccgggagggccttggcagcccctcagcaagaagccctgcctgatgagacagaggtggtggaagaaactgtggcagaggtgactgaggtatctgtgggagctaatcctgtccaggtggaagtaggagaatttgatgatggtgcagaggaaaccgaagaggaggtggtggcggaaaatccctgccagaaccaccactgcaaacacggcaaggtgtgcgagctggatgagaacaacacccccatgtgcgtgtgccaggaccccaccagctgcccagcccccattggcgagtttgagaaggtgtgcagcaatgacaacaagaccttcgactcttcctgccacttctttgccacaaagtgcaccctggagggcaccaagaagggccacaagctccacctggactacatcgggccttgcaaatacatccccccttgcctggactctgagctgaccgaattccccctgcgcatgcgggactggctcaagaacgtcctggtcaccctgtatgagagggatgaggacaacaaccttctgactgagaagcagaagctgcgggtgaagaagatccatgagaatgagaagcgcctggaggcaggagaccaccccgtggagctgctggcccgggacttcgagaagaactataacatgtacatcttccctgtacactggcagttcggccagctggaccagcaccccattgacgggtacctctcccacaccgagctggctccactgcgtgctcccctcatccccatggagcattgcaccacccgctttttcgagacctgtgacctggacaatgacaagtacatcgccctggatgagtgggccggctgcttcggcatcaagcagaaggatatcgacaaggatcttgtgatctaaatccactccttccacagtaccggattctctctttaaccctccccttcgtgtttcccccaatgtttaaaatgtttggatggtttgttgttctgcctggagacaaggtgctaacatagatttaagtgaatacattaacggtgctaaaaatgaaaattctaacccaagacatgacattcttagctgtaacttaactattaaggccttttccacacgcattaatagtcccatttttctcttgccatttgtagctttgcccattgtcttattggcacatgggtggacacggatctgctgggctctgccttaaacacacattgcagcttcaacttttctctttagtgttctgtttgaaactaatacttaccgagtcagactttgtgttcatttcatttcagggtcttggctgcctgtgggcttccccaggtggcctggaggtgggcaaagggaagtaacagacacacgatgttgtcaaggatggttttgggactagaggctcagtggtgggagagatccctgcagaacccaccaaccagaacgtggtttgcctgaggctgtaactgagagaaagattctggggctgtgttatgaaaatatagacattctcacataagcccagttcatcaccatttcctcctttacctttcagtgcagtttcttttcacattaggctgttggttcaaacttttgggagcacggactgtcagttctctgggaagtggtcagcgcatcctgcagggcttctcctcctctgtcttttggagaaccagggctcttctcaggggctctagggactgccaggctgtttcagccaggaaggccaaaatcaagagtgagatgtagaaagttgtaaaatagaaaaagtggagttggtgaatcggttgttctttcctcacatttggatgattgtcataaggtttttagcatgttcctccttttcttcaccctccccttttttcttctattaatcaagagaaacttcaaagttaatgggatggtcggatctcacaggctgagaactcgttcacctccaagcatttcatgaaaaagctgcttcttattaatcatacaaactctcaccatgatgtgaagagtttcacaaatccttcaaaataaaaagtaatgacttagaaactgccttcctgggtgatttgcatgtgtcttagtcttagtcaccttattatcctgacacaaaaacacatgagcatacatgtctacacatgactacacaaatgcaaacctttgcaaacacattatgcttttgcacacacacacctgtacacacacaccggcatgtttatacacagggagtgtatggttcctgtaagcactaagttagctgttttcatttaatgacctgtggtttaacccttttgatcactaccaccattatcagcaccagactgagcagctatatccttttattaatcatggtcattcattcattcattcattcacaaaatatttatgatgtatttactctgcaccaggtcccatgccaagcactggggacacagttatggcaaagtagacaaagcatttgttcatttggagcttagagtccaggaggaatacattagataatgacacaatcaaatataaattgcaagatgtcacaggtgtgatgaagggagagtaggagagaccatgagtatgtgtaacaggaggacacagcattattctagtgctgtactgttccgtacggcagccactacccacatgtaactttttaagatttaaatttaaattagttaacattcaaaacgcagctccccaatcacactagcaacatttcaagtgcttgagagccatgcatgattagtggttaccctattgaataggtcagaagtagaatcttttcatcatcacagaaagttctattggacagtgctcttctagatcatcataagactacagagcacttttcaaagctcatgcatgttcatcatgttagtgtcgtattttgagctggggttttgagactccccttagagatagagaaacagacccaagaaatgtgctcaattgcaatgggccacatacctagatctccagatgtcatttcccctctcttattttaagttatgttaagattactaaaacaataaaagctcctaaaaaatcaaactgtattctggtgttctcttctacacagtgggagggcgagcagtaggagagattggcccatttggtgctggccatttgaggaatgcaagcccagcactagtctcataatctctaggaatctgtagagagaggaattgaagtaaatttcagcattggctcattcagtcattcggcgacattcatcaggtacctgcaatgtgttaggggatcttatgagtaggcagcgtgcgtgatccttgctcccctggagctttctaacattctagcaggcagaccacacataaatttgcaatactgtttctgataaaaacgtgctgtaaaggaaataaagcagagaactatcatggaaaa

SEQ ID NO: 20195 - DNA, 1598 bp, Homo sapiens
  misc_feature 1..1598: note = ENST00000520687
  source 1..1598: mol_type = unassigned DNA
gggagcacggcccaggcagggtctgtgctgaccgcccttgtgtttggaacctagacatccccccttgcctggactctgagctgaccgaattccccctgcgcatgcgggactggctcaagaacgtcctggtcaccctgtatgagagggatgaggacaacaaccttctgactgagaagcagaagctgcgggtgaagaagatccatgagaatgagaagcgcctggaggcaggagaccaccccgtggagctgctggcccgggacttcgagaagaactataacatgtacatcttccctgtacactggcagttcggccagctggaccagcaccccattgacgggtacctctcccacaccgagctggctccactgcgtgctcccctcatccccatggagcattgcaccacccgctttttcgagacctgtgacctggacaatgacaagtacatcgccctggatgagtgggccggctgcttcggcatcaagcagaaggatatcgacaaggatcttgtgatctaaatccactccttccacagtaccggattctctctttaaccctccccttcgtgtttcccccaatgtttaaaatgtttggatggtttgttgttctgcctggagacaaggtgctaacatagatttaagtgaatacattaacggtgctaaaaatgaaaattctaacccaagacatgacattcttagctgtaacttaactattaaggccttttccacacgcattaatagtcccatttttctcttgccatttgtagctttgcccattgtcttattggcacatgggtggacacggatctgctgggctctgccttaaacacacattgcagcttcaacttttctctttagtgttctgtttgaaactaatacttaccgagtcagactttgtgttcatttcatttcagggtcttggctgcctgtgggcttccccaggtggcctggaggtgggcaaagggaagtaacagacacacgatgttgtcaaggatggttttgggactagaggctcagtggtgggagagatccctgcagaacccaccaaccagaacgtggtttgcctgaggctgtaactgagagaaagattctggggctgtgttatgaaaatatagacattctcacataagcccagttcatcaccatttcctcctttacctttcagtgcagtttcttttcacattaggctgttggttcaaacttttgggagcacggactgtcagttctctgggaagtggtcagcgcatcctgcagggcttctcctcctctgtcttttggagaaccagggctcttctcaggggctctagggactgccaggctgtttcagccaggaaggccaaaatcaagagtgagatgtagaaagttgtaaaatagaaaaagtggagttggtgaatcggttgttctttcctcacatttggatgattgtcataaggtttttagcatgttcctccttttcttcaccctccccttttttcttctattaatcaagagaaacttcaaagttaatgggatggtcggatctcacaggctgagaactcgttcacctccaagcatttcatgaaaaagctgcttcttattaatcatacaaactctcaccatgat

SEQ ID NO: 20196 - DNA, 576 bp, Homo sapiens
  misc_feature 1..576: note = ENST00000538026
  source 1..576: mol_type = unassigned DNA
gtttcctgttgcctgtctctaaacccctccacattcccgcggtccttcagactgcccggagaatccctgccagaaccaccactgcaaacacggcaaggtgtgcgagctggatgagaacaacacccccatgtgcgtgtgccaggaccccaccagctgcccagcccccattggcgagtttgagaaggtgtgcagcaatgacaacaagaccttcgactcttcctgccacttctttgccacaaagtgcaccctggagggcaccaagaagggccacaagctccacctggactacatcgggccttgcaaatacatccccccttgcctggactctgagctgaccgaattccccctgcgcatgcgggactggctcaagaacgtcctggtcaccctgtatgagagggatgaggacaacaaccttctgactgagaagcagaagctgcgggtgaagaagatccatgagaatgagaagcgcctggaggcaggagaccaccccgtggagctgctggcccgggacttcgagaagaactataacatgtacatcttccctgtacactggcagttcggccagctggaccagca

SEQ ID NO: 20197 - DNA, 218 bp, Homo sapiens
  misc_feature 1..218: note = ENST00000537849
  source 1..218: mol_type = unassigned DNA
ggactctgagctgaccgaattccccctgcgcatgcgggactggctcaagaacgtcctggtcaccctgtatgagagggatgaggacaacaaccttctgactgagaagcagaagctgcggtctctactccctcaggtgaagaagatccatgagaatgagaagcgcctggaggcaggagaccaccccgtggagctgctggcccgggacttcgagaagaact

SEQ ID NO: 20198 - DNA, 602 bp, Homo sapiens
  misc_feature 1..602: note = ENST00000521569
  source 1..602: mol_type = unassigned DNA
gagtggtttcctgttgcctgtctctaaacccctccacattcccgcggtccttcagactgcccggagagcgcgctctgcctgccgcctgcctgcctgccactgaggtatctgtgggagctaatcctgtccaggtggaagtaggagaatttgatgatggtgcagaggaaaccgaagaggaggtggtggcggaaaatccctgccagaaccaccactgcaaacacggcaaggtgtgcgagctggatgagaacaacacccccatgtgcgtgtgccaggaccccaccagctgcccagcccccattggcgagtttgagaaggtgtgcagcaatgacaacaagaccttcgactcttcctgccacttctttgccacaaagtgcaccctggagggcaccaagaagggccacaagctccacctggactacatcgggccttgcaaatacatccccccttgcctggactctgagctgaccgaattccccctgcgcatgcgggactggctcaagaacgtcctggtcaccctgtatgagagggatgaggacaacaaccttctgactgagaagcagaagctgcgggtgaagaagatccatgagaatgagaagcgcctg

SEQ ID NO: 20199 - DNA, 505 bp, Homo sapiens
  misc_feature 1..505: note = ENST00000524277
  source 1..505: mol_type = unassigned DNA
caggactcagggctgtccaaagcccagagtgggggccacagtcaaggactgtcagccctgagatctgtccaggtaggatgggggtggatgtgctagtccaggtgatgctaactcccttgtctttctgccctacagatccctgccagaaccaccactgcaaacacggcaaggtgtgcgagctggatgagaacaacacccccatgtgcgtgtgccaggaccccaccagctgcccagcccccattggcgagtttgagaaggtgtgcagcaatgacaacaagaccttcgactcttcctgccacttctttgccacaaagtgcaccctggagggcaccaagaagggccacaagctccacctggactacatcgggccttgcaaatacatccccccttgcctggactctgagctgaccgaattccccctgcgcatgcgggactggctcaagaacgtcctggtcaccctgtatgagagggatgaggacaacaaccttctgactgagaagcagaa

SEQ ID NO: 20200 - DNA, 511 bp, Homo sapiens
  misc_feature 1..511: note = ENST00000539687
  source 1..511: mol_type = unassigned DNA
agctatcagctgccacatcgacatagcctagagcaaagagggggagggaggagaagaagggggttgcctggagaaggaatcaacttttgaaactttctccaagtcccacccaccagaaggctcttctctgcctgactcactctccgaggaatgcgagttgccacgggttcccagcaccatgagggcctggatcttctttctcctttgcctggccgggagggccttggcagcccctcagcaagaagccctgcctgatgagacagaggtggtggaagaaactgtggcagaggtgactgaggtatctgtgggagctaatcctgtccaggtggaagtaggagaatttgatgatggtgcagaggaaaccgaagaggaggtggtggcggaaaatccctgccagaaccaccactgcaaacacggcaaggtgtgcgagctggatgagaacaacacccccatgtgcgtgtgccaggaccccaccagctgcccagcccccattggcgagtttgagaaggtg

SEQ ID NO: 20201 - DNA, 864 bp, Homo sapiens
  misc_feature 1..864: note = ENST00000521327
  source 1..864: mol_type = unassigned DNA
gagctctgagtggtttcctgttgcctgtctctaaacccctccacattcccgcggtccttcagactgcccggagagcgcgctctgcctgccgcctgcctgcctgccactgagggttcccagcaccatgagggcctggatcttctttctcctttgcctggccgggagggccttggcagcccctcagcaagaagccctgcctgatgagacagaggtggtggaagaaactgtggcagaggtgactgaggtatctgtgggagctaatcctgtccaggtggaagtaggagaatttgatgatggtgcagaggaaaccgaagaggaggtggtggcggaaagtatgtcccttccctgtaacttggcacatccaagctgcccttggctgcctgggcctggggcacgaggacagcctacatgaggctccttccagcagaaatgcagggtggggtcctcagtgggctatgaaggaaacacggctttgacttaacaagtgggaaactgtggcactcagtcccctgggatctgggcaagatcggtttccaggccatccatgtgtgtggtaggaaggagagttctccagctggaaatgggcttctcccctcatagctctttgccctgagtccaaagctgagtttcccagtcccacggaggtcgctgatcacatctggtcaccgaaatctcccattgcttctgtatcagcccgtgccccacagagaagtagaactgagagaagagatcaggaacttgcacactcataagctcattctatttcacacagtccaaggaaacgaggtcctgaggaaatgcaacctgacataatccgtaccatgctatccatgcgttagtgccctgggagagaaatgacctagg

SEQ ID NO: 20202 - DNA, 497 bp, Homo sapiens
  misc_feature 1..497: note = ENST00000522348
  source 1..497: mol_type = unassigned DNA
gtttcctgttgcctgtctctaaacccctccacattcccgcggtccttcagactgcccggagagcgcgctctgcctgccgcctgcctgcctgccactgaggccttggtcttctcatctgtactattgggcagaaatatgtgacttgagcccccagtggggtgctggattatgaaaacaccctgaaaatgataaatgtatgcatcatcacagactaaagaaatacaaaggagggagtttttgtttaatattggtcatttatatgaagggaatttaaattttcgccaggcacgctacacctaggtttgattggcaaaggatcacagctggttcccagcaccatgagggcctggatcttctttctcctttgcctggccgggagggccttggcagcccctcagcaagaagccctgcctgatgagacagaggtggtggaagaaactgtggcagaggtgactgaggtatctgtgggagctaatcctgtccaggtggaagtagga

SEQ ID NO: 20203 - DNA, 2906 bp, Homo sapiens
  misc_feature 1..2906: note = ENST00000282470
  source 1..2906: mol_type = unassigned DNA
aaaaaatgcataaagagccaagtgcttatattctggccaagttatgaggctctgagaacaagagcttgaggggaagactgttaaccccatccacgccaccagaattagctctttcccttttggtttgcaagcactgcctgtaaagccctcgcatgagaggccagcctgctagggaaatccaggaatctgcaacaaaaacgatgacagtctgaaatactctctggtgccaacctccaaattctcgtctgtcacttcagacccccactagttgacagagcagcagaatttcaactccagtagacttgaatatgcctctgggcaaagaagcagagctaacgaggaaagggatttaaagagtttttcttgggtgtttgtcaaacttttattccctgtctgtgtgcagaggggattcaacttcaatttttctgcagtggctctgggtccagccccttacttaaagatctggaaagcatgaagactgggctttttttcctatgtctcttgggaactgcagctgcaatcccgacaaatgcaagattattatctgatcattccaaaccaactgctgaaacggtagcacctgacaacactgcaatccccagtttaagggctgaagctgaagaaaatgaaaaagaaacagcagtatccacagaagacgattcccaccataaggctgaaaaatcatcagtactaaagtcaaaagaggaaagccatgaacagtcagcagaacagggcaagagttctagccaagagctgggattgaaggatcaagaggacagtgatggtcacttaagtgtgaatttggagtatgcaccaactgaaggtacattggacataaaagaagatatgagtgagcctcaggagaaaaaactctcagagaacactgattttttggctcctggtgttagttccttcacagattctaaccaacaagaaagtatcacaaagagagaggaaaaccaagaacaacctagaaattattcacatcatcagttgaacaggagcagtaaacatagccaaggcctaagggatcaaggaaaccaagagcaggatccaaatatttccaatggagaagaggaagaagaaaaagagccaggtgaagttggtacccacaatgataaccaagaaagaaagacagaattgcccagggagcatgctaacagcaagcaggaggaagacaatacccaatctgatgatattttggaagagtctgatcaaccaactcaagtaagcaagatgcaggaggatgaatttgatcagggtaaccaagaacaagaagataactccaatgcagaaatggaagaggaaaatgcatcgaacgtcaataagcacattcaagaaactgaatggcagagtcaagagggtaaaactggcctagaagctatcagcaaccacaaagagacagaagaaaagactgtttctgaggctctgctcatggaacctactgatgatggtaataccacgcccagaaatcatggagttgatgatgatggcgatgatgatggcgatgatggcggcactgatggccccaggcacagtgcaagtgatgactacttcatcccaagccaggcctttctggaggccgagagagctcaatccattgcctatcacctcaaaattgaggagcaaagagaaaaagtacatgaaaatgaaaatataggtaccactgagcctggagagcaccaagaggccaagaaagcagagaactcatcaaatgaggaggaaacgtcaagtgaaggcaacatgagggtgcatgctgtggattcttgcatgagcttccagtgtaaaagaggccacatctgtaaggcagaccaacagggaaaacctcactgtgtctgccaggatccagtgacttgtcctccaacaaaaccccttgatcaagtttgtggcactgacaatcagacctatgctagttcctgtcatctattcgctactaaatgcagactggaggggaccaaaaaggggcatcaactccagctggattattttggagcctgcaaatctattcctacttgtacggactttgaagtgattcagtttcctctacggatgagagactggctcaagaatatcctcatgcagctttatgaagccaactctgaacacgctggttatctaaatgagaagcagagaaataaagtcaagaaaatttacctggatgaaaagaggcttttggctggggaccatcccattgatcttctcttaagggactttaagaaaaactaccacatgtatgtgtatcctgtgcactggcagtttagtgaacttgaccaacaccctatggatagagtcttgacacattctgaacttgctcctctgcgagcatctctggtgcccatggaacactgcataacccgtttctttgaggagtgtgaccccaacaaggataagcacatcaccctgaaggagtggggccactgctttggaattaaagaagaggacatagatgaaaatctcttgttttgaacgaagattttaaagaactcaactttccagcatcctcctctgttctaaccacttcagaaatatatgcagctgtgatacttgtagatttatatttagcaaaatgttagcatgtatgacaagacaatgagagtaattgcttgacaacaacctatgcaccaggtatttaacattaactttggaaacaaaaatgtacaattaagtaaagtcaacatatgcaaaatactgtacattgtgaacagaagtttaattcatagtaatttcactctctgcattgacttatgagataattaatgattaaactattaatgataaaaataatgcatttgtattgttcataatatcatgtgcacttcaagaaaatggaatgctactcttttgtggtttacgtgtattattttcaatatcttaataccctaataaagagtccataaaaatccaaa

SEQ ID NO: 20204 - DNA, 2520 bp, Homo sapiens
  misc_feature 1..2520: note = ENST00000503414
  source 1..2520: mol_type = unassigned DNA
aacttcaatttttctgcagtggctctgggtccagccccttacttaaagatctggaaagcatgaagactgggctttttttcctatgtctcttgggaactgcagctgcaatcccggtgaaaaggagataagaagcaaaggagcaaaccaaacctaatatgaatcctgtactttggccagaagccgtggctcacatctgtaatcccagcactttgggaggccaagacaaatgcaagattattatctgatcattccaaaccaactgctgaaacggtagcacctgacaacactgcaatccccagtttaagggctgaagctgaagaaaatgaaaaagaaacagcagtatccacagaagacgattcccaccataaggctgaaaaatcatcagtactaaagtcaaaagaggaaagccatgaacagtcagcagaacagggcaagagttctagccaagagctgggattgaaggatcaagaggacagtgatggtcacttaagtgtgaatttggagtatgcaccaactgaaggtacattggacataaaagaagatatgagtgagcctcaggagaaaaaactctcagagaacactgattttttggctcctggtgttagttccttcacagattctaaccaacaagaaagtatcacaaagagagaggaaaaccaagaacaacctagaaattattcacatcatcagttgaacaggagcagtaaacatagccaaggcctaagggatcaaggaaaccaagagcaggatccaaatatttccaatggagaagaggaagaagaaaaagagccaggtgaagttggtacccacaatgataaccaagaaagaaagacagaattgcccagggagcatgctaacagcaagcaggaggaagacaatacccaatctgatgatattttggaagagtctgatcaaccaactcaagtaagcaagatgcaggaggatgaatttgatcagggtaaccaagaacaagaagataactccaatgcagaaatggaagaggaaaatgcatcgaacgtcaataagcacattcaagaaactgaatggcagagtcaagagggtaaaactggcctagaagctatcagcaaccacaaagagacagaagaaaagactgtttctgaggctctgctcatggaacctactgatgatggtaataccacgcccagaaatcatggagttgatgatgatggcgatgatgatggcgatgatggcggcactgatggccccaggcacagtgcaagtgatgactacttcatcccaagccaggcctttctggaggccgagagagctcaatccattgcctatcacctcaaaattgaggagcaaagagaaaaagtacatgaaaatgaaaatataggtaccactgagcctggagagcaccaagaggccaagaaagcagagaactcatcaaatgaggaggaaacgtcaagtgaaggcaacatgagggtgcatgctgtggattcttgcatgagcttccagtgtaaaagaggccacatctgtaaggcagaccaacagggaaaacctcactgtgtctgccaggatccagtgacttgtcctccaacaaaaccccttgatcaagtttgtggcactgacaatcagacctatgctagttcctgtcatctattcgctactaaatgcagactggaggggaccaaaaaggggcatcaactccagctggattattttggagcctgcaaatctattcctacttgtacggactttgaagtgattcagtttcctctacggatgagagactggctcaagaatatcctcatgcagctttatgaagccaactctgaacacgctggttatctaaatgagaagcagagaaataaagtcaagaaaatttacctggatgaaaagaggcttttggctggggaccatcccattgatcttctcttaagggactttaagaaaaactaccacatgtatgtgtatcctgtgcactggcagtttagtgaacttgaccaacaccctatggatagagtcttgacacattctgaacttgctcctctgcgagcatctctggtgcccatggaacactgcataacccgtttctttgaggagtgtgaccccaacaaggataagcacatcaccctgaaggagtggggccactgctttggaattaaagaagaggacatagatgaaaatctcttgttttgaacgaagattttaaagaactcaactttccagcatcctcctctgttctaaccacttcagaaatatatgcagctgtgatacttgtagatttatatttagcaaaatgttagcatgtatgacaagacaatgagagtaattgcttgacaacaacctatgcaccaggtatttaacattaactttggaaacaaaaatgtacaattaagtaaagtcaacatatgcaaaatactgtacattgtgaacagaagtttaattcatagtaatttcactctctgcattgacttatgagataattaatgattaaactattaatgataaaaataatgcatttgtattgttcataatatcatgtgcacttcaaga

SEQ ID NO: 20205 - DNA, 818 bp, Homo sapiens
  misc_feature 1..818: note = ENST00000541496
  source 1..818: mol_type = unassigned DNA
agaattagctctttcccttttggtttgcaagcactgcctgtaaagccctcgcatgagaggccagcctgctagggaaatccaggaatctgcaacaaaaacgatgacagtctgaaatactctctggtgccaacctccaaattctcgtctgtcacttcagacccccactagttgacagagcagcagaatttcaactccagtagacttgaatatgcctctgggcaaagaagcagagctaacgaggaaagggatttaaagagtttttcttgggtgtttgtcaaacttttattccctgtctgtgtgcagaggggattcaacttcaatttttctgcagtggctctgggtccagccccttacttaaagatctggaaagcatgaagactgggctttttttcctatgtctcttgggaactgcagctgcaatcccgtttttaattttttcagacaaatgcaagattattatctgatcattccaaaccaactgctgaaacggtagcacctgacaacactgcaatccccagtttaagggctgaagctgaagaaaatgaaaaagaaacagcagtatccacagaagacgattcccaccataaggctgaaaaatcatcagtactaaagtcaaaagaggaaagccatgaacagtcagcagaacagggcaagagttctagccaagagctgggattgaaggatcaagaggacagtgatggtcacttaagtgtgaatttggagtatgcaccaactgaaggtacattggacataaaagaagatatgagtgagcctcaggagaaaaaactctcagagaacactgattttttggctcctgg

SEQ ID NO: 20206 - DNA, 583 bp, Homo sapiens
  misc_feature 1..583: note = ENST00000509407
  source 1..583: mol_type = unassigned DNA
attgtctgaggcaaaaagacatcaagtcctttcatgctgtcctgggaaaggcggtttggaacaagttatcctgattctagagacaggggattcaacttcaatttttctgcagtggctctgggtccagccccttacttaaagatctggaaagcatgaagactgggctttttttcctatgtctcttgggaactgcagctgcaatcccgacaaatgcaagattattatctgatcattccaaaccaactgctgaaacggtagcacctgacaacactgcaatccccagtttaagggctgaagctgaagaaaatgaaaaagaaacagcagtatccacagaagacgattcccaccataaggctgaaaaatcatcagtactaaagtcaaaagaggaaagccatgaacagtcagcagaacagggcaagagttctagccaagagctgggattgaaggatcaagaggacagtgatggtcacttaagtgtgaatttggagtatgcaccaactgaaggtacattggacataaaagaagatatgagtgagcctcaggagaaaaaactctcagagaacactgattttttggctcctgg

SEQ ID NO: 20207 - DNA, 950 bp, Homo sapiens
  misc_feature 1..950: note = ENST00000434434
  source 1..950: mol_type = unassigned DNA
ggctctgagaacaagagcttgaggggaagactgttaaccccatccacgccaccagaattagctctttcccttttggtttgcaagcactgcctgtaaagccctcgcatgagaggccagcctgctagggaaatccaggaatctgcaacaaaaacgatgacagtctgaaatactctctggtgccaacctccaaattctcgtctgtcacttcagacccccactagttgacagagcagcagaatttcaactccagtagacttgaatatgcctctgggcaaagaagcagagctaacgaggaaagggatttaaagagtttttcttgggtgtttgtcaaacttttattccctgtctgtgtgcagaggggattcaacttcaatttttctgcagtggctctgggtccagccccttacttaaaggccataagatgttttattgaaagaaactttcaatatcaagtaatccaaccaaccttctaagataagccttttccttcaacacaaagaagtgcattttgccaaatctggaaagcatgaagactgggctttttttcctatgtctcttgggaactgcagctgcaatcccgacaaatgcaagattattatctgatcattccaaaccaactgctgaaacggtagcacctgacaacactgcaatccccagtttaagggctgaagctgaagaaaatgaaaaagaaacagcagtatccacagaagacgattcccaccataaggctgaaaaatcatcagtactaaagtcaaaagaggaaagccatgaacagtcagcagaacagggcaagagttctagccaagagctgggattgaaggatcaagaggacagtgatggtcacttaagtgtgaatttggagtatgcaccaactgaaggtacattggacataaaagaagatatgagtgagcctcaggagaaaaaactctcagagaacactgattttttgg

SEQ ID NO: 20208 - DNA, 561 bp, Homo sapiens
  misc_feature 1..561: note = ENST00000535835
  source 1..561: mol_type = unassigned DNA
taaagttattcaatctcctgagcctaacagcaatgtagaaacggaactttttgcttttccaaaaggccataagatgttttattgaaagaaactttcaatatcaagtaatccaaccaaccttctaagataagccttttccttcaacacaaagaagtgcattttgccaaatctggaaagcatgaagactgggctttttttcctatgtctcttgggaactgcagctgcaatcccgacaaatgcaagattattatctgatcattccaaaccaactgctgaaacggtagcacctgacaacactgcaatccccagtttaagggctgaagctgaagaaaatgaaaaagaaacagcagtatccacagaagacgattcccaccataaggctgaaaaatcatcagtactaaagtcaaaagaggaaagccatgaacagtcagcagaacagggcaagagttctagccaagagctgggattgaaggatcaagaggacagtgatggtcacttaagtgtgaatttggagtatgcaccaactgaaggtacattggacataaaagaagatatgagtga

SEQ ID NO: 20209 - DNA, 587 bp, Homo sapiens
  misc_feature 1..587: note = ENST00000512317
  source 1..587: mol_type = unassigned DNA
aaaaagacatcaagtcctttcatgctgtcctgggaaaggcggtttggaacaagttatcctgattctagagacgatgcaaagcactgtgctaggcaccaggagaatgcagaaagggcacatccccttccttcaaggagtttacagctttctcagaagcagaggggattcaacttcaatttttctgcagtggctctgggtccagccccttacttaaagatctggaaagcatgaagactgggctttttttcctatgtctcttgggaactgcagctgcaatcccgacaaatgcaagattattatctgatcattccaaaccaactgctgaaacggtagcacctgacaacactgcaatccccagtttaagggctgaagctgaagaaaatgaaaaagaaacagcagtatccacagaagacgattcccaccataaggctgaaaaatcatcagtactaaagtcaaaagaggaaagccatgaacagtcagcagaacagggcaagagttctagccaagagctgggattgaaggatcaagaggacagtgatggtcacttaagtgtgaatttggagtatgcaccaactgaaggtacattg

SEQ ID NO: 20210 - DNA, 583 bp, Homo sapiens
  misc_feature 1..583: note = ENST00000543631
  source 1..583: mol_type = unassigned DNA
actagttgacagagcagcagaatttcaactccagtagacttgaatatgcctctgggcaaagaagcagagctaacgaggaaagggatttaaagagtttttcttgggtgtttgtcaaacttttattccctgtctgtgtgcagaggggattcaacttcaatttttctgcagtggctctgggtccagccccttacttaaaggtattaaaggtcactctgcaagagaaaaaaagaaaagaaaggaaaagaaaagaaaaaaaaacatgcttttaactgcagatcaatactgttgaaacagtacaccaagagatctggaaagcatgaagactgggctttttttcctatgtctcttgggaactgcagctgcaatcccgacaaatgcaagattattatctgatcattccaaaccaactgctgaaacggtagcacctgacaacactgcaatccccagtttaagggctgaagctgaagaaaatgaaaaagaaacagcagtatccacagaagacgattcccaccataaggctgaaaaatcatcagtactaaagtcaaaagaggaaagccatgaacagtcagcagaacagggcaag

SEQ ID NO: 20211 - DNA, 568 bp, Homo sapiens
  misc_feature 1..568: note = ENST00000458304
  source 1..568: mol_type = unassigned DNA
actgcctgtaaagccctcgcatgagaggccagcctgctagggaaatccaggaatctgcaacaaaaacgatgacagtctgaaatactctctggtgccaacctccaaattctcgtctgtcacttcagacccccactagttgacagagcagcagaatttcaactccagtagacttgaatatgcctctgggcaaagaagcagagctaacgaggaaagggatttaaagagtttttcttgggtgtttgtcaaacttttattccctgtctgtgtgcagaggggattcaacttcaatttttctgcagtggctctgggtccagccccttacttaaagttattcaatctcctgagcctaacagcaatgtagaaacggaactttttgcttttccaaaagatctggaaagcatgaagactgggctttttttcctatgtctcttgggaactgcagctgcaatcccgacaaatgcaagattattatctgatcattccaaaccaactgctgaaacggtagcacctgacaacactgcaatccccagtttaagggctgaagctgaagaaaatgaaaaagaaacag

SEQ ID NO: 20212 - DNA, 2994 bp, Homo sapiens
  misc_feature 1..2994: note = ENST00000418378
  source 1..2994: mol_type = unassigned DNA
aaaaatgcataaagagccaagtgcttatattctggccaagttatgaggctctgagaacaagagcttgaggggaagactgttaaccccatccacgccaccagaattagctctttcccttttggtttgcaagcactgcctgtaaagccctcgcatgagaggccagcctgctagggaaatccaggaatctgcaacaaaaacgatgacagtctgaaatactctctggtgccaacctccaaattctcgtctgtcacttcagacccccactagttgacagagcagcagaatttcaactccagtagacttgaatatgcctctgggcaaagaagcagagctaacgaggaaagggatttaaagagtttttcttgggtgtttgtcaaacttttattccctgtctgtgtgcagaggggattcaacttcaatttttctgcagtggctctgggtccagccccttacttaaaggccataagatgttttattgaaagaaactttcaatatcaagtaatccaaccaaccttctaagataagccttttccttcaacacaaagaagtgcattttgccaaatctggaaagcatgaagactgggctttttttcctatgtctcttgggaactgcagctgcaatcccgacaaatgcaagattattatctgatcattccaaaccaactgctgaaacggtagcacctgacaacactgcaatccccagtttaagggctgaagctgaagaaaatgaaaaagaaacagcagtatccacagaagacgattcccaccataaggctgaaaaatcatcagtactaaagtcaaaagaggaaagccatgaacagtcagcagaacagggcaagagttctagccaagagctgggattgaaggatcaagaggacagtgatggtcacttaagtgtgaatttggagtatgcaccaactgaaggtacattggacataaaagaagatatgagtgagcctcaggagaaaaaactctcagagaacactgattttttggctcctggtgttagttccttcacagattctaaccaacaagaaagtatcacaaagagagaggaaaaccaagaacaacctagaaattattcacatcatcagttgaacaggagcagtaaacatagccaaggcctaagggatcaaggaaaccaagagcaggatccaaatatttccaatggagaagaggaagaagaaaaagagccaggtgaagttggtacccacaatgataaccaagaaagaaagacagaattgcccagggagcatgctaacagcaagcaggaggaagacaatacccaatctgatgatattttggaagagtctgatcaaccaactcaagtaagcaagatgcaggaggatgaatttgatcagggtaaccaagaacaagaagataactccaatgcagaaatggaagaggaaaatgcatcgaacgtcaataagcacattcaagaaactgaatggcagagtcaagagggtaaaactggcctagaagctatcagcaaccacaaagagacagaagaaaagactgtttctgaggctctgctcatggaacctactgatgatggtaataccacgcccagaaatcatggagttgatgatgatggcgatgatgatggcgatgatggcggcactgatggccccaggcacagtgcaagtgatgactacttcatcccaagccaggcctttctggaggccgagagagctcaatccattgcctatcacctcaaaattgaggagcaaagagaaaaagtacatgaaaatgaaaatataggtaccactgagcctggagagcaccaagaggccaagaaagcagagaactcatcaaatgaggaggaaacgtcaagtgaaggcaacatgagggtgcatgctgtggattcttgcatgagcttccagtgtaaaagaggccacatctgtaaggcagaccaacagggaaaacctcactgtgtctgccaggatccagtgacttgtcctccaacaaaaccccttgatcaagtttgtggcactgacaatcagacctatgctagttcctgtcatctattcgctactaaatgcagactggaggggaccaaaaaggggcatcaactccagctggattattttggagcctgcaaatctattcctacttgtacggactttgaagtgattcagtttcctctacggatgagagactggctcaagaatatcctcatgcagctttatgaagccaactctgaacacgctggttatctaaatgagaagcagagaaataaagtcaagaaaatttacctggatgaaaagaggcttttggctggggaccatcccattgatcttctcttaagggactttaagaaaaactaccacatgtatgtgtatcctgtgcactggcagtttagtgaacttgaccaacaccctatggatagagtcttgacacattctgaacttgctcctctgcgagcatctctggtgcccatggaacactgcataacccgtttctttgaggagtgtgaccccaacaaggataagcacatcaccctgaaggagtggggccactgctttggaattaaagaagaggacatagatgaaaatctcttgttttgaacgaagattttaaagaactcaactttccagcatcctcctctgttctaaccacttcagaaatatatgcagctgtgatacttgtagatttatatttagcaaaatgttagcatgtatgacaagacaatgagagtaattgcttgacaacaacctatgcaccaggtatttaacattaactttggaaacaaaaatgtacaattaagtaaagtcaacatatgcaaaatactgtacattgtgaacagaagtttaattcatagtaatttcactctctgcattgacttatgagataattaatgattaaactattaatgataaaaataatgcatttgtattgttcataatatcatgtgcacttcaagaaaatggaatgctactcttttgtggtttacgtgtattattttcaatatcttaataccctaataaagagtcc

SEQ ID NO: 20213 - DNA, 1721 bp, Homo sapiens
  misc_feature 1..1721: note = ENST00000439928
  source 1..1721: mol_type = unassigned DNA
cccgggacagtttccagtcggcttctccgtgaccttcctcccccttccagctcggagcgggatgctgggatccctccaaggaccctctgaggacgtaggagggatgctgagacagggccagcttcaaaccttgtcaagctctgacaagggaagatgaagcctagttccagctaggggtgacctgtctatctgcattttttgagctgcagagtgatgggagtcatattcgctgcctgtgcagcaccacaggcctgatgaaaatgaaatggcaacaccgtgcagatggcaaagcgtaggcctcacaaacatcctggccgtgaagagcttgtcttcaagagtagctggtgcagaaactcgctcggactgacctggaagaagaccctgaggagaacccgggcacacagcagccattccagtcctcagcttcaagggggctcacgaaggttgtggatccttgcccagcctgcagtggggacctggtgtggcattgagtggctgtgagtgctcagtgtcccccatctcatgctaagcacagcgaagtagggggagattgcgtagtgtgctgatggagcagttgcctccacctggctgcgtgtccctccgtcatgtgacagaaaagaagaaggcaatggtgtttttctgtagcaagtcactatttatggaagaggagaccctttatctgcatcgcaattctgaagattccactttgttccagtcattgttgtgggcacactttcaacatttgattaagagccataagggtggcttcctccacccacagaaaaattcctctaaggaatcatgagaccgtcgacatttagcagctgtttaaaagactgtttagactcctgggatgatgatggggaattcctggaattatggtcttgggcaagaagggaactcaagtaggaaagtcagcaatctaaatttcaaacctcagggaaccttctttgtataacctgataatctccttcgctcaacacagtgcttgctgagtgaaggagtgtaatggaaaagaaagttaataatcccttgtgctctggatcaaaaatgaggtaggagaccaaattttccatcaaactggttgggtccaatcacttaatgcaaaatgcttacttcagggtctgtagcacttgttgatcaatgtacctaacaggtcttaatagagaaagtgatcaattcaagcagtgtcttcccaaattctatatatatataacagatattgctgcataacaaaccagacaacgcttaatagtttaaggcaaccgttttattattccccagagttctatgcgtggaccaaggtcacttgggccctagtcttgtgatgtcacttggaccacagtcattgggaggttcaccaggtggaagcctccatgacagctcaatcccatagctgccagtgggtacggcacctacacgtggctgcttgtatggcctgggattttcacagcacagcagcaggggctgagaggcagagtcctaggagtgattgtccccagagagcagaagcaaaagctctcatcagtcttctaagaggctgagctgacaatgggcacagcaccactctgccatcatctatggcttaagcattcacagggccaggctaaattcaggctgtcggaagataaactccacctctcaatggagagagttcaaagcaactgtggccatctttaccccatcagctttcttgccaagaaataaagctctacatgaca

SEQ ID NO: 20214 - DNA, 8603 bp, Homo sapiens
  misc_feature 1..8603: note = ENST00000424834
  source 1..8603: mol_type = unassigned DNA
gcgcacccgggacagtttccagtcggcttctccgtgaccttcctcccccttccagctcggagcgggatgctgggatccctccaaggaccctctgaggacgtaggagggatgctgagacagggccagcttcaaaccttgtcaagctctgacaagggaagatgaagcctagttccagctaggggtgacctgtctatctgcattttttgagctgcagagtgatgggagtcatattcgctgcctgtgcagcaccacaggcctgatgaaaatgaaatggcaacaccgtgcagatggcaaagcgtaggcctcacaaacatcctggccgtgaagagcttgtcttcaagagtagctggtgcagaaactcgcccgtggccacccaggagcccgatgtgcaaggcaggtgtgagtgccaggacggcattcctggagatgaaggcctggagctgcggtctgcggactcggcagtgcccgtggccatgacccaggctgccgtgcggccctgggcaccctgcctggagaacatgaccactgccccaaacggcctcgggccaggccccgcagccccctgtgcaggctcggacctgaaagacgccaagatggtgacctcccttgcgtgtggaaatggagtctgtggctgcagccctggtggcgacacggacacccaggaagccaaactcagcccagccaagcttgtgcgcctcttttccaccagtcggaagaggacgggtgcccaccccgagcggccccactccatggtcctggtggggaactcctccacatggaacaccctcgcctccttccggaaaatgggatcctttaagaaactgaagtcctcagtcctgaaaggaattcagagccgagaggggtcaaatgcctgttcaaagggagaggcttcggagcatggcctgggaaagtccatcccaaatggcgctgtcccaggagcccaggcaagcaggggctcccccttagcaccgggaccagcatgtggtgccctcaggccagcagagtggggcacattggatggctccgacctcgaggacacggacgatgccttccagcggagcacacaccgctcccgcagcctccgcagagcctacggcctgggccgcatctgcctgctggatgcgccccagaaccatgcgacacccacgatagccactggccaggtgcccgccgtgtgtgagattctcgtgagggaccctgaaaacaacagcatgggctacaggaggagcaagagcacggacaatcttgcctttctgaagaagagctcctttaagcggaagtccacctccaatcttgcagacctcaggacggcccatgacgcacgggtaccacagaggaccctgagcagttcctccactgactcccaaaagcttgggtcaggaaggaccaaacgctggaggagcccgataagggccaaggactttgacagagtcttcaaacttgtgagcaatgtgactgaggctgcctggaggagggagagtcctaggagtggggccccatcccctggagaggccagcctgagacttcaggcacacagccggctgcatgacgactactcccgccgcgtctccaggagcactgagcaggacagcaggcggggcggggcggtcatgcatgggaccactgcaacctgcaccgtggcccccggtttcggctcagccacctctaaggggccccacctagacgctgacactgccgtatttcctcttgaaaccaaaagttcctgggcggtggaaagcgacagttcctgcacttgcagctctttgccaagcccgattgtccaggatgtgttgagcaaagactcctgtgacccaaacgctggcagccagttgacatttgaccctgagcagcctcccacccctctaaggcccaccacacccaagccccagagccctcagagcccccagagccccggggcaggaagtgccagctgtcacagcaatcacagtgccctgtccgcgaattcagaggaaagtgaaggaagggcagaagagcctgctcagagagagccagggcctgtgtccttgcaggatcccctggaagccacacatggtgatgagggcagcaaggaccttctggtgaacattggtgtggcagccggcccagaagaaaaggagaaggaggaggtcgtccctgatggcccctggaggcgaagctcatcacaggatgaggaaaggacagaggcacagagaacccccaagaggagatggggctctgggagacggccaaggcctcggccattctctgactacggccagctggccagccgcagtttgtctattcctgaagactcggttgctgcagacccccagaaggaagaccgtgtggacgaggacccccaggcaagcatgacttctgccagccctgaagaccagaatgctccagtgggctgccccaaaggagcccggagaaggcgccccatttccgtgataggtggggtcagcttgtatgggaccaaccagacggaggaactggacaatcttctgacccaaccggcttccaggccgcccatgcctgctcaccaggtgccaccctacaaggctgtgtcggcccggttccggcccttcacattctcccagagcacccccattgggttggaccgtgtgggacgccggcggcagatgagagcatccaacgtttcttcagatggaggtactgagccctctgccttagtggatgacaacggtagtgaggaggacttcagctatgaagacctctgccaggccagccctcggtacctgcagcccggcggggagcagctggccatcaatgagctgatcagtgatggcaacgtggtctgcgcagaagccctgtgggaccatgtgaccatggatgaccaggaactgggcttcaaagccggggatgtcatccaggttctggaagcctccaacaaggactggtggtggggccgcagtgaagataaggaagcctggttccccgcgagcttcgtcagattgcgagtgaatcaggaagagctgtcggaaaactccagcagcacccccagtgaggagcaggacgaggaggccagccagagccgccacagacactgtgagaacaagcagcagatgcggaccaacgtcatccgggagatcatggacaccgagcgggtgtacatcaaacacctcagggacatctgtgagggctatatccgacagtgccgcaagcacacaggaatgttcaccgttgcgcagctagccactatttttggaaacattgaagatatttacaaattccaaagaaagtttctgaaagaccttgagaaacagtacaacaaagaggaacctcacttaagtgaaataggatcttgctttcttcaaaatcaagagggctttgccatctattccgagtactgcaacaaccacccgggcgcctgcctggagctcgccaacctcatgaagcagggcaagtacagacatttctttgaagcctgccgcctgctgcagcagatgattgacatcgccatcgacgggttcctgctcacaccagtgcagaagatctgcaaatacccgctgcagctggccgagctgctcaagtataccacacaggaacacggtgattacagcaacataaaggcagcatatgaggccatgaagaatgtggcctgtctgatcaacgagcgcaagcgcaagctggagagcatcgacaagatagctcgctggcaggtgtctatcgtgggctgggagggactggatatcttagaccgaagctcagaattgattcattctggggagctgaccaaaatcactaagcaaggcaaaagccagcagcggacgttcttcctgtttgaccaccagctggtgtcctgcaagaaggacctgctgcgcagggacatgctgtactacaagggccggctggacatggatgagatggagcttgtggacctgggggatgggcgcgacaaggactgcaacctcagcgtgaaaaatgccttcaagctcgtcagtaggaccacagacgaggtttatttgttttgtgccaaaaaacaagaagacaaggcgaggtggctgcaggcctgtgcagatgaaaggaggcgggtgcaagaggacaaggagatgggaatggaaatttcagaaaaccagaagaaacttgccatgttaaatgctcaaaaggcaggacatggaaagtcaaaaggctacaacaggtgccctgtggccccaccgcaccagggcctgcaccccatccaccagcgccacatcactatgcccacaagcgtcccccagcagcaggtctttggcctggcggaacccaagaggaagtcctcgctcttctggcacaccttcaacaggctcacccccttccggaaatgaaaacaggaggctgtgcttccatggagctgggtgtcaagagaagaactgtctttgtttcttgtgtgcttcaatccagggaaagtttcttggacccagtgataaaaacttccttttagggatcaatgaaggagagaaggtcttggaatcaccttcagtctttggagacccagctgcctttgtggaagggaggagacggtcatgacacaaagctttatcctacacagaaacacccgtgacccactatgagatggcccagatgtgggacccggtaccatgctctaaagcgagtgattaggcagcagctgaagccacccctgctgatgatgagcaagtgcctgctgcaggtccaaacacagcatccagggctttgcagttcctaaggagtgatgaggttagaggatcacttctgcatttgattttcaaggatgccgtcaagacggggttgacacaatgctgcacgtgtctggtcacacttagaaattgagctcttactctcttctgtaatactgggggacctacagctgccgtggggctgaccacggtgttccctggcatcgtctgtgtccacacagatgctaactggtagtgcaaatgtcatcctgcaaggttcctcttcctgcaagcaaagtggagagaaagaagatgcatctgtcaccttcatcagggtcctcagtgcagagcaacttacgcatcctcaagaatccactgcttttcaggcaaggagggagaaatcctgctgcacactggctttgtcccggagtcggattccctcctgcctgcacgccttcagtaactccgagcagaaatcacatcttgcccacatgctgtaacctaagaaactgctatgcaaggctgggtgctgtggctcatgcctgtaatcccagcactttgggaggccaaggcaggtggatcacctgaggtcaggagttcgagacaagcgtggccaatatggcaaagcccagtctctactaataatacaaaaattagctgggcatggtggcgcatgcctgtaatcccagctactgggaaggctgaggtaggagaatcttttgaatctgggaagcggaggttgcagtgagctgagatcgcaccactgcactccagcctgggagatacagcgagactgtctccaaaaacaaaaacaaaaacaaaaaacattcaaacaactgtttgcaatataaaaagctcatttactgtaatatttatgatacagtgaatatgaaaatgcactggtcagaaggcactctcaaagagccgcactgctcctgacatcgtccttagcaatgaagtcacaaagacagccaaagcagtcctgcttcttggaaatcagaagctgcctttatcacatataaagccaaacagggcataaccatgtcacgtgagcatgtcatcaggcttctgaggacttgttctttataaaaaaagaccttcacaaaatatcttggcttagagatagcagtctttattaacaaaggccacctaggctgacacctgcagataatcatctccttttctttgtctatgttgtacattttcatgatataacttttaactatgtctagagaaggcaggctctgcaagagaggtgccctttcaacccgctcagtgccctggacaggagatgctgtgttaaactgttaatggatatctatatgagaagctcatttttgtatgctatccctgcagtttttttttttctaacaggcccatgtttgagaataaacaagtctgtgatgtcagagacaaaggtgtattcttcagtctgcaggtgtgtggcacctcccttctcccctgcagccccccacatccagagccgttcctgagagtgacatcatgcatcaagaaaacataaccttggtcctcaggtgaacccttggaacattctgtgaccgcctgatgtccattctgagccaccttggcacacatgcttacaggcagcactgctaagggttcaggtgccccatggctgacagcccgagttgcttctgtggaccatcatgccgctcggcacgtcctgagacagaagttgctgcaggaaggagcttctggagaggtcctgtggcatgtgtgggggtgtgtgtgtgtatgtttccttcttgaacagacattccaactttagatgtgtttatagaactgacctttttactaacaaaatacaatgatatatgttggaaactacttaatatgcttttcctgcacaccttagcaataactgtaggggtctctgctagagttgtttgtatgtacagcaattttgaacaaattgttttaaatgtaatataagagaattagtttaaggaagtaaagagaatcatttgcttgtgttacattttcagtgaggattcagtttaagagtcattcttaggacttccatttcctaatatttattcatgggtaatgaagaaatggtttgcattttgtggccagtcctaatttattttccagctgagccctaacttccggctcccacctacctccacggacttcctaacagagacttatgaataccaggatgtgtttttgttaagtcaggttcaattcgttgcccctgtcagttttatagagtgtgagggtcactccattaaagatctctcctgggtggatcctacttggatgttcaggtgattttgaaaactgctaacatttttaaaaggctagaacatcctttgacttcttgaaaatctgcatgtctggcttgggttttattaccacatgcctgagttcttcaagaatggaaggctcaagtattctcatcttccatttgccaaacttccttcctgatttgagtcacgtgttccacttggaaagaaagggaacagagagcctcctccatggacagtgtatgaatttcattgggaatcttgctctctcccgcctctatgcctttctctctttttaaccttactttacataatattatagatgggccaagaaaagaaaagatgacataacattttgatgaatttcacctattccattcttcacgtttcagaattggtcgactttgttagaagataattgaagtagccttgggtcaaaagcaaccttttcaattgtgatcatacctaaaacatataaaaaccctgccgtagattaaaagcaattataaaatcataaaattgaatgtttgcagaatcctggagcagtagatttctttgtctttggcctgcggactagaaagagggcagcagtagtatgctggagcttccctgggataccagccacatggtttcttttcattagatctgatttttgtttcccactgtagatctgattttgtagttgaaaacatttcaccaccatcaaacactatttctgaatattgtgcctttttatacctagcctagatgaaaaccgatgccattcttattcagaaaatccccccatcctacatgactgttatctagacataaagcaaagtgcatttaattcaaaatttggttcacaatataagtattttgtaaaagccagctgaaccagcattttatcaggtggaaatctctgcaagccaaattgctgatactccttcatgcagatcaacttggtgtcccagtcagaatagaacagcataattacctggagttagggggagtatttctgcactattacttgtcagggagagaagaaacttagaattgtccctcaaaggagtgtcaagaagtatgaataaatgtcctttcaccagctcacaggccagaaatggaggacccaagtcaactaggtgaaactactagcagacccagctttcccataataacctaatctgcaaattgttctattaaagtctcattgttttcaggatgcaatgaaagtggatttcaaaaggctttggaaaaataagtggaacatgactgatcttgaaaaaaaaagcaaaagcttaaatatttgatacaagtttacttagctacaacatactttacattgttgcctttagttatctcacaggcactgacattttatatttagaaaatacttttaatctttctaatctttttttgtaaatattagtgtccattctgtatgactcgctaacctactttgcaaggctttgggcaacattttagctcattaacttcaagatgatgtgtcatctgtataggtcaaagaatgggacttctgaactgaggaatttgctgttgacagccaaagtatagtgtacaagattgatgtaacttgatatgtatttttgttgaagttttttgtaaaaaaaaattatttacaatgttatttgaatgatttttttaaatgctgtgaatctatatttgttgttttgtatattaaaattcatttgccaaa

SEQ ID NO: 20215 - DNA, 2191 bp, Homo sapiens
  misc_feature 1..2191: note = ENST00000466831
  source 1..2191: mol_type = unassigned DNA
gtgtgctgccgcggcgcgggaggagagtgtgcgttgcgctttctcccgcgatcgccctgccggtcgctagctccgagggcgcgcactggatcccaggctcctccgagagtgcggcgacctcggggctccgccggcaccggaggtggctctgagggcagggacgtgttggacacgctgactttgtaggctccgccaagaggcgccgcaggagcccgtggccacccaggagcccgatgtgcaaggcaggtgtgagtgccaggacggcattcctggagatgaaggcctggagctgcggtctgcggactcggcagtgcccgtggccatgacccaggctgccgtgcggccctgggcaccctgcctggagaacatgaccactgccccaaacggcctcgggccaggccccgcagccccctgtgcaggctcggacctgaaagacgccaagatggtgacctcccttgcgtgtggaaatggagtctgtggctgcagccctggtggcgacacggacacccaggaagccaaactcagcccagccaagcttgtgcgcctcttttccaccagtcggaagaggacgggtgcccaccccgagcggccccactccatggtcctggtggggaactcctccacatggaacaccctcgcctccttccggaaaatgggatcctttaagaaactgaagtcctcagtcctgaaaggaattcagagccgagaggggtcaaatgcctgttcaaagggagaggcttcggagcatggcctgggaaagtccatcccaaatggcgctgtcccaggagcccaggcaagcaggggctcccccttagcaccgggaccagcatgtggtgccctcaggccagcagagtggggcacattggatggctccgacctcgaggacacggacgatgccttccagcggagcacacaccgctcccgcagcctccgcagagcctacggcctgggccgcatctgcctgctggatgcgccccagaaccatgcgacacccacgatagccactggccaggtgcccgccgtgtgtgagattctcgtgagggaccctgaaaacaacagcatgggctacaggaggagcaagagcacggacaatcttgcctttctgaagaagagctcctttaagcggaagtccacctccaatcttgcagacctcaggacggcccatgacgcacgggtaccacagaggaccctgagcagttcctccactgactcccaaaagcttgggtcaggaaggaccaaacgctggaggagcccgataagggccaaggactttgacagagtcttcaaacttgtgagcaatgtgactgaggctgcctggaggagggagagtcctaggagtggggccccatcccctggagaggccagcctgagacttcaggcacacagccggctgcatgacgactactcccgccgcgtctccaggagcactgagcaggacagcaggcggggcggggcggtcatgcatgggaccactgcaacctgcaccgtggcccccggtttcggctcagccacctctaaggggccccacctagacgctgacactgccgtatttcctcttgaaaccaaaagttcctgggcggtggaaagcgacagttcctgcacttgcagctctttgccaagcccgattgtccaggatgtgttgagcaaagactcctgtgacccaaacgctggcagccagttgacatttgaccctgagcagcctcccacccctctaaggcccaccacacccaagccccagagccctcagagcccccagagccccggggcaggaagtgccagctgtcacagcaatcacagtgccctgtccgcgaattcagaggaaagtgaaggaagggcagaagagcctgctcagagagagccagggcctgtgtccttgcaggatcccctggaagccacacatggtgatgagggcagcaaggaccttctggtgaacattggtgtggcagccggcccagaagaaaaggagaaggaggaggtaagggcagcggcgaggtccctcatgtgggcgaccctcctgcgggaagggagcttgcacaggtgttgcccttggtccctaacctgtcaaggtcagtggccctctgctgaccttgttgcccttacagtattagtgggaatgggagttgtcaagttgctgtttaccaagttcagaagtaatctctatctcctttgaaataaattgacaatgtacgag

SEQ ID NO: 20216 - DNA, 6665 bp, Homo sapiens
  misc_feature 1..6665: note = ENST00000382095
  source 1..6665: mol_type = unassigned DNA
gtgtgcgttgcgctttctcccgcgatcgccctgccggtcgctagctccgagggcgcgcactggatcccaggctcctccgagagtgcggcgacctcggggctccgccggcaccggaggtggctctgagggcagggacgtgttggacacgctgactttgtaggctccgccaagaggcgccgcaggaggtcgtccctgatggcccctggaggcgaagctcatcacaggatgaggaaaggacagaggcacagagaacccccaagaggagatggggctctgggagacggccaaggcctcggccattctctgactacggccagctggccagccgcagtttgtctattcctgaagactcggttgctgcagacccccagaaggaagaccgtgtggacgaggacccccaggcaagcatgacttctgccagccctgaagaccagaatgctccagtgggctgccccaaaggagcccggagaaggcgccccatttccgtgataggtggggtcagcttgtatgggaccaaccagacggaggaactggacaatcttctgacccaaccggcttccaggccgcccatgcctgctcaccaggtgccaccctacaaggctgtgtcggcccggttccggcccttcacattctcccagagcacccccattgggttggaccgtgtgggacgccggcggcagatgagagcatccaacgtttcttcagatggaggtactgagccctctgccttagtggatgacaacggtagtgaggaggacttcagctatgaagacctctgccaggccagccctcggtacctgcagcccggcggggagcagctggccatcaatgagctgatcagtgatggcaacgtggtctgcgcagaagccctgtgggaccatgtgaccatggatgaccaggaactgggcttcaaagccggggatgtcatccaggttctggaagcctccaacaaggactggtggtggggccgcagtgaagataaggaagcctggttccccgcgagcttcgtcagattgcgagtgaatcaggaagagctgtcggaaaactccagcagcacccccagtgaggagcaggacgaggaggccagccagagccgccacagacactgtgagaacaagcagcagatgcggaccaacgtcatccgggagatcatggacaccgagcgggtgtacatcaaacacctcagggacatctgtgagggctatatccgacagtgccgcaagcacacaggaatgttcaccgttgcgcagctagccactatttttggaaacattgaagatatttacaaattccaaagaaagtttctgaaagaccttgagaaacagtacaacaaagaggaacctcacttaagtgaaataggatcttgctttcttcaaaatcaagagggctttgccatctattccgagtactgcaacaaccacccgggcgcctgcctggagctcgccaacctcatgaagcagggcaagtacagacatttctttgaagcctgccgcctgctgcagcagatgattgacatcgccatcgacgggttcctgctcacaccagtgcagaagatctgcaaatacccgctgcagctggccgagctgctcaagtataccacacaggaacacggtgattacagcaacataaaggcagcatatgaggccatgaagaatgtggcctgtctgatcaacgagcgcaagcgcaagctggagagcatcgacaagatagctcgctggcaggtgtctatcgtgggctgggagggactggatatcttagaccgaagctcagaattgattcattctggggagctgaccaaaatcactaagcaaggcaaaagccagcagcggacgttcttcctgtttgaccaccagctggtgtcctgcaagaaggacctgctgcgcagggacatgctgtactacaagggccggctggacatggatgagatggagcttgtggacctgggggatgggcgcgacaaggactgcaacctcagcgtgaaaaatgccttcaagctcgtcagtaggaccacagacgaggtttatttgttttgtgccaaaaaacaagaagacaaggcgaggtggctgcaggcctgtgcagatgaaaggaggcgggtgcaagaggacaaggagatgggaatggaaatttcagaaaaccagaagaaacttgccatgttaaatgctcaaaaggcaggacatggaaagtcaaaaggctacaacaggtgccctgtggccccaccgcaccagggcctgcaccccatccaccagcgccacatcactatgcccacaagcgtcccccagcagcaggtctttggcctggcggaacccaagaggaagtcctcgctcttctggcacaccttcaacaggctcacccccttccggaaatgaaaacaggaggctgtgcttccatggagctgggtgtcaagagaagaactgtctttgtttcttgtgtgcttcaatccagggaaagtttcttggacccagtgataaaaacttccttttagggatcaatgaaggagagaaggtcttggaatcaccttcagtctttggagacccagctgcctttgtggaagggaggagacggtcatgacacaaagctttatcctacacagaaacacccgtgacccactatgagatggcccagatgtgggacccggtaccatgctctaaagcgagtgattaggcagcagctgaagccacccctgctgatgatgagcaagtgcctgctgcaggtccaaacacagcatccagggctttgcagttcctaaggagtgatgaggttagaggatcacttctgcatttgattttcaaggatgccgtcaagacggggttgacacaatgctgcacgtgtctggtcacacttagaaattgagctcttactctcttctgtaatactgggggacctacagctgccgtggggctgaccacggtgttccctggcatcgtctgtgtccacacagatgctaactggtagtgcaaatgtcatcctgcaaggttcctcttcctgcaagcaaagtggagagaaagaagatgcatctgtcaccttcatcagggtcctcagtgcagagcaacttacgcatcctcaagaatccactgcttttcaggcaaggagggagaaatcctgctgcacactggctttgtcccggagtcggattccctcctgcctgcacgccttcagtaactccgagcagaaatcacatcttgcccacatgctgtaacctaagaaactgctatgcaaggctgggtgctgtggctcatgcctgtaatcccagcactttgggaggccaaggcaggtggatcacctgaggtcaggagttcgagacaagcgtggccaatatggcaaagcccagtctctactaataatacaaaaattagctgggcatggtggcgcatgcctgtaatcccagctactgggaaggctgaggtaggagaatcttttgaatctgggaagcggaggttgcagtgagctgagatcgcaccactgcactccagcctgggagatacagcgagactgtctccaaaaacaaaaacaaaaacaaaaaacattcaaacaactgtttgcaatataaaaagctcatttactgtaatatttatgatacagtgaatatgaaaatgcactggtcagaaggcactctcaaagagccgcactgctcctgacatcgtccttagcaatgaagtcacaaagacagccaaagcagtcctgcttcttggaaatcagaagctgcctttatcacatataaagccaaacagggcataaccatgtcacgtgagcatgtcatcaggcttctgaggacttgttctttataaaaaaagaccttcacaaaatatcttggcttagagatagcagtctttattaacaaaggccacctaggctgacacctgcagataatcatctccttttctttgtctatgttgtacattttcatgatataacttttaactatgtctagagaaggcaggctctgcaagagaggtgccctttcaacccgctcagtgccctggacaggagatgctgtgttaaactgttaatggatatctatatgagaagctcatttttgtatgctatccctgcagtttttttttttctaacaggcccatgtttgagaataaacaagtctgtgatgtcagagacaaaggtgtattcttcagtctgcaggtgtgtggcacctcccttctcccctgcagccccccacatccagagccgttcctgagagtgacatcatgcatcaagaaaacataaccttggtcctcaggtgaacccttggaacattctgtgaccgcctgatgtccattctgagccaccttggcacacatgcttacaggcagcactgctaagggttcaggtgccccatggctgacagcccgagttgcttctgtggaccatcatgccgctcggcacgtcctgagacagaagttgctgcaggaaggagcttctggagaggtcctgtggcatgtgtgggggtgtgtgtgtgtatgtttccttcttgaacagacattccaactttagatgtgtttatagaactgacctttttactaacaaaatacaatgatatatgttggaaactacttaatatgcttttcctgcacaccttagcaataactgtaggggtctctgctagagttgtttgtatgtacagcaattttgaacaaattgttttaaatgtaatataagagaattagtttaaggaagtaaagagaatcatttgcttgtgttacattttcagtgaggattcagtttaagagtcattcttaggacttccatttcctaatatttattcatgggtaatgaagaaatggtttgcattttgtggccagtcctaatttattttccagctgagccctaacttccggctcccacctacctccacggacttcctaacagagacttatgaataccaggatgtgtttttgttaagtcaggttcaattcgttgcccctgtcagttttatagagtgtgagggtcactccattaaagatctctcctgggtggatcctacttggatgttcaggtgattttgaaaactgctaacatttttaaaaggctagaacatcctttgacttcttgaaaatctgcatgtctggcttgggttttattaccacatgcctgagttcttcaagaatggaaggctcaagtattctcatcttccatttgccaaacttccttcctgatttgagtcacgtgttccacttggaaagaaagggaacagagagcctcctccatggacagtgtatgaatttcattgggaatcttgctctctcccgcctctatgcctttctctctttttaaccttactttacataatattatagatgggccaagaaaagaaaagatgacataacattttgatgaatttcacctattccattcttcacgtttcagaattggtcgactttgttagaagataattgaagtagccttgggtcaaaagcaaccttttcaattgtgatcatacctaaaacatataaaaaccctgccgtagattaaaagcaattataaaatcataaaattgaatgtttgcagaatcctggagcagtagatttctttgtctttggcctgcggactagaaagagggcagcagtagtatgctggagcttccctgggataccagccacatggtttcttttcattagatctgatttttgtttcccactgtagatctgattttgtagttgaaaacatttcaccaccatcaaacactatttctgaatattgtgcctttttatacctagcctagatgaaaaccgatgccattcttattcagaaaatccccccatcctacatgactgttatctagacataaagcaaagtgcatttaattcaaaatttggttcacaatataagtattttgtaaaagccagctgaaccagcattttatcaggtggaaatctctgcaagccaaattgctgatactccttcatgcagatcaacttggtgtcccagtcagaatagaacagcataattacctggagttagggggagtatttctgcactattacttgtcagggagagaagaaacttagaattgtccctcaaaggagtgtcaagaagtatgaataaatgtcctttcaccagctcacaggccagaaatggaggacccaagtcaactaggtgaaactactagcagacccagctttcccataataacctaatctgcaaattgttctattaaagtctcattgttttcaggatgcaatgaaagtggatttcaaaaggctttggaaaaataagtggaacatgactgatcttgaaaaaaaaagcaaaagcttaaatatttgatacaagtttacttagctacaacatactttacattgttgcctttagttatctcacaggcactgacattttatatttagaaaatacttttaatctttctaatctttttttgtaaatattagtgtccattctgtatgactcgctaacctactttgcaaggctttgggcaacattttagctcattaacttcaagatgatgtgtcatctgtataggtcaaagaatgggacttctgaactgaggaatttgctgttgacagccaaagtatagtgtacaagattgatgtaacttgatatgtatttttgttgaagttttttgtaaaaaaaaattatttacaatgttatttgaatgatttttttaaatgctgtgaatctatatttgttgttttgtatattaaaattcatttgccaaactc

SEQ ID NO: 20217 - DNA, 529 bp, Homo sapiens
  misc_feature 1..529: note = ENST00000474317
  source 1..529: mol_type = unassigned DNA
gatgtgttgagcaaagactcctgtgacccaaacgctggcagccagttgacatttgaccctgagcagcctcccacccctctaaggcccaccacacccaagccccagagccctcagagcccccagagccccggggcaggaagtgccagctgtcacagcaatcacagtgccctgtccgcgaattcagaggaaagtgaaggaagggcagaagagcctgctcagagagagccagggcctgtgtccttgcaggatcccctggaagccacacatggtgatgagggcagcaaggaccttctggtgaacattggtgtggcagccggcccagaagaaaaggagaaggaggaggtcgtccctgatggcccctggaggcgaagctcatcacaggatgaggaaaggacagaggcacagagaacccccaagaggagatggggctctgggagacggccaaggcctcggccattctctgactacggccagctggccagccgcagtttgtctattcctgaagactcggttgctgcagacccccaga

SEQ ID NO: 20218 - DNA, 2001 bp, Homo sapiens
  misc_feature 1..2001: note = ENST00000434675
  source 1..2001: mol_type = unassigned DNA
acagattttgctttctttttgcagccggcttccaggccgcccatgcctgctcaccaggtgccaccctacaaggctgtgtcggcccggttccggcccttcacattctcccagagcacccccattgggttggaccgtgtgggacgccggcggcagatgagagcatccaacgtttcttcagatggaggtactgagccctctgccttagtggatgacaacggtagtgaggaggacttcagctatgaagacctctgccaggccagccctcggtacctgcagcccggcggggagcagctggccatcaatgagctgatcagtgatggcaacgtggtctgcgcagaagccctgtgggaccatgtgaccatggatgaccaggaactgggcttcaaagccggggatgtcatccaggttctggaagcctccaacaaggactggtggtggggccgcagtgaagataaggaagcctggttccccgcgagcttcgtcagaggctatatccgacagtgccgcaagcacacaggaatgttcaccgttgcgcagctagccactatttttggaaacattgaagatatttacaaattccaaagaaagtttctgaaagaccttgagaaacagtacaacaaagaggaacctcacttaagtgaaataggatcttgctttcttcaaaatcaagagggctttgccatctattccgagtactgcaacaaccacccgggcgcctgcctggagctcgccaacctcatgaagcagggcaagtacagacatttctttgaagcctgccgcctgctgcagcagatgattgacatcgccatcgacgggttcctgctcacaccagtgcagaagatctgcaaatacccgctgcagctggccgagctgctcaagtataccacacaggaacacggtgattacagcaacataaaggcagcatatgaggccatgaagaatgtggcctgtctgatcaacgagcgcaagcgcaagctggagagcatcgacaagatagctcgctggcaggtgtctatcgtgggctgggagggactggatatcttagaccgaagctcagaattgattcattctggggagctgaccaaaatcactaagcaaggcaaaagccagcagcggacgttcttcctgtttgaccaccagctggtgtcctgcaagaaggacctgctgcgcagggacatgctgtactacaagggccggctggacatggatgagatggagcttgtggacctgggggatgggcgcgacaaggactgcaacctcagcgtgaaaaatgccttcaagctcgtcagtaggaccacagacgaggtttatttgttttgtgccaaaaaacaagaagacaaggcgaggtggctgcaggcctgtgcagatgaaaggaggcgggtgcaagaggacaaggagatgggaatggaaatttcagaaaaccagaagaaacttgccatgttaaatgctcaaaaggcaggacatggaaagtcaaaaggctacaacaggtgccctgtggccccaccgcaccagggcctgcaccccatccaccagcgccacatcactatgcccacaagcgtcccccagcagcaggtctttggcctggcggaacccaagaggaagtcctcgctcttctggcacaccttcaacaggctcacccccttccggaaatgaaaacaggaggctgtgcttccatggagctgggtgtcaagagaagaactgtctttgtttcttgtgtgcttcaatccagggaaagtttcttggacccagtgataaaaacttccttttagggatcaatgaaggagagaaggtcttggaatcaccttcagtctttggagacccagctgcctttgtggaagggaggagacggtcatgacacaaagctttatcctacacagaaacacccgtgacccactatgagatggcccagatgtgggacccggtaccatgctctaaagcgagtgattaggcagcagctgaagccacccctgctgatgatgagcaagtgcctgctgcaggtcc

SEQ ID NO: 20219 - DNA, 301 bp, Homo sapiens
  misc_feature 1..301: note = ENST00000494772
  source 1..301: mol_type = unassigned DNA
ccggcttccaggccgcccatgcctgctcaccaggtgccaccctacaaggctgtgtcggcccggttccggcccttcacattctcccagagcacccccattgggttggaccgtgtgggacgccggcggcagatgagagcatccaacgggtgctttcatgtatcatcattccacttgaggctcaaagcacaccaataacaagtacttgttcagaatgtataaacaaccctgagagatgggttttatcatccacattcaacaggtgaaaaaacaaagaaagaaacttgaccaaggactcatactc

SEQ ID NO: 20220 - DNA, 3026 bp, Homo sapiens
  misc_feature 1..3026: note = ENST00000399949
  source 1..3026: mol_type = unassigned DNA
gtttctgggcaggctctggccgggaacgcatacaacgtcaaagcagtgaataagcgatttctgcagttcccgtagctgccagcctgtgcagtcctctgtgatgcttggggaccggctcctcggtcacaccccagtcctgctctgaaggttgccgttttccaaacagaaggatggtagctagaggggagatagcaagattctggagtctggaaagccttcacttggtttcttcagatggaggtactgagccctctgccttagtggatgacaacggtagtgaggaggacttcagctatgaagacctctgccaggccagccctcggtacctgcagcccggcggggagcagctggccatcaatgagctgatcagtgatggcaacgtggtctgcgcagaagccctgtgggaccatgtgaccatggatgaccaggaactgggcttcaaagccggggatgtcatccaggttctggaagcctccaacaaggactggtggtggggccgcagtgaagataaggaagcctggttccccgcgagcttcgtcagattgcgagtgaatcaggaagagctgtcggaaaactccagcagcacccccagtgaggagcaggacgaggaggccagccagagccgccacagacactgtgagaacaagcagcagatgcggaccaacgtcatccgggagatcatggacaccgagcgggtgtacatcaaacacctcagggacatctgtgagggctatatccgacagtgccgcaagcacacaggaatgttcaccgttgcgcagctagccactatttttggaaacattgaagatatttacaaattccaaagaaagtttctgaaagaccttgagaaacagtacaacaaagaggaacctcacttaagtgaaataggatcttgctttcttcaaaatcaagagggctttgccatctattccgagtactgcaacaaccacccgggcgcctgcctggagctcgccaacctcatgaagcagggcaagtacagacatttctttgaagcctgccgcctgctgcagcagatgattgacatcgccatcgacgggttcctgctcacaccagtgcagaagatctgcaaatacccgctgcagctggccgagctgctcaagtataccacacaggaacacggtgattacagcaacataaaggcagcatatgaggccatgaagaatgtggcctgtctgatcaacgagcgcaagcgcaagctggagagcatcgacaagatagctcgctggcaggtgtctatcgtgggctgggagggactggatatcttagaccgaagctcagaattgattcattctggggagctgaccaaaatcactaagcaaggcaaaagccagcagcggacgttcttcctgtttgaccaccagctggtgtcctgcaagaaggacctgctgcgcagggacatgctgtactacaagggccggctggacatggatgagatggagcttgtggacctgggggatgggcgcgacaaggactgcaacctcagcgtgaaaaatgccttcaagctcgtcagtaggaccacagacgaggtttatttgttttgtgccaaaaaacaagaagacaaggcgaggtggctgcaggcctgtgcagatgaaaggaggcgggtgcaagaggacaaggagatgggaatggaaatttcagaaaaccagaagaaacttgccatgttaaatgctcaaaaggcaggacatggaaagtcaaaaggctacaacaggtgccctgtggccccaccgcaccagggcctgcaccccatccaccagcgccacatcactatgcccacaagcgtcccccagcagcaggtctttggcctggcggaacccaagaggaagtcctcgctcttctggcacaccttcaacaggctcacccccttccggaaatgaaaacaggaggctgtgcttccatggagctgggtgtcaagagaagaactgtctttgtttcttgtgtgcttcaatccagggaaagtttcttggacccagtgataaaaacttccttttagggatcaatgaaggagagaaggtcttggaatcaccttcagtctttggagacccagctgcctttgtggaagggaggagacggtcatgacacaaagctttatcctacacagaaacacccgtgacccactatgagatggcccagatgtgggacccggtaccatgctctaaagcgagtgattaggcagcagctgaagccacccctgctgatgatgagcaagtgcctgctgcaggtccaaacacagcatccagggctttgcagttcctaaggagtgatgaggttagaggatcacttctgcatttgattttcaaggatgccgtcaagacggggttgacacaatgctgcacgtgtctggtcacacttagaaattgagctcttactctcttctgtaatactgggggacctacagctgccgtggggctgaccacggtgttccctggcatcgtctgtgtccacacagatgctaactggtagtgcaaatgtcatcctgcaaggttcctcttcctgcaagcaaagtggagagaaagaagatgcatctgtcaccttcatcagggtcctcagtgcagagcaacttacgcatcctcaagaatccactgcttttcaggcaaggagggagaaatcctgctgcacactggctttgtcccggagtcggattccctcctgcctgcacgccttcagtaactccgagcagaaatcacatcttgcccacatgctgtaacctaagaaactgctatgcaaggctgggtgctgtggctcatgcctgtaatcccagcactttgggaggccaaggcaggtggatcacctgaggtcaggagttcgagacaagcgtggccaatatggcaaagcccagtctctactaataatacaaaaattagctgggcatggtggcgcatgcctgtaatcccagctactgggaaggctgaggtaggagaatcttttgaatctgggaagcggaggttgcagtgagctgagatcgcaccactgcactccagcctgggagatacagcgagactgtctcc

SEQ ID NO: 20221 - DNA, 2111 bp, Homo sapiens
  misc_feature 1..2111: note = ENST00000409126
  source 1..2111: mol_type = unassigned DNA
acaacgtcaaagcagtgaataagcgatttctgcagttcccgtagctgccagcctgtgcagtcctctgtgatgcttggggaccggctcctcggtcacaccccagtcctgctctgaaggttgccgttttccaaacagaaggatggtagctagaggggagatagcaagattctggagtctggaaagccttcacttggtttcttcagatggaggtactgagccctctgccttagtggatgacaacggtagtgaggaggacttcagctatgaagacctctgccaggccagccctcggtacctgcagcccggcggggagcagctggccatcaatgagctgatcagtgatggcaacgtggtctgcgcagaagccctgtgggaccatgtgaccatggatgaccaggaactgggcttcaaagccggggatgtcatccaggttctggaagcctccaacaaggactggtggtggggccgcagtgaagataaggaagcctggttccccgcgagcttcgtcagaggctatatccgacagtgccgcaagcacacaggaatgttcaccgttgcgcagctagccactatttttggaaacattgaagatatttacaaattccaaagaaagtttctgaaagaccttgagaaacagtacaacaaagaggaacctcacttaagtgaaataggatcttgctttcttcaaaatcaagagggctttgccatctattccgagtactgcaacaaccacccgggcgcctgcctggagctcgccaacctcatgaagcagggcaagtacagacatttctttgaagcctgccgcctgctgcagcagatgattgacatcgccatcgacgggttcctgctcacaccagtgcagaagatctgcaaatacccgctgcagctggccgagctgctcaagtataccacacaggaacacggtgattacagcaacataaaggcagcatatgaggccatgaagaatgtggcctgtctgatcaacgagcgcaagcgcaagctggagagcatcgacaagatagctcgctggcaggtgtctatcgtgggctgggagggactggatatcttagaccgaagctcagaattgattcattctggggagctgaccaaaatcactaagcaaggcaaaagccagcagcggacgttcttcctgtttgaccaccagctggtgtcctgcaagaaggacctgctgcgcagggacatgctgtactacaagggccggctggacatggatgagatggagcttgtggacctgggggatgggcgcgacaaggactgcaacctcagcgtgaaaaatgccttcaagctcgtcagtaggaccacagacgaggtttatttgttttgtgccaaaaaacaagaagacaaggcgaggtggctgcaggcctgtgcagatgaaaggaggcgggtgcaagaggacaaggagatgggaatggaaatttcagaaaaccagaagaaacttgccatgttaaatgctcaaaaggcaggacatggaaagtcaaaaggctacaacaggtgccctgtggccccaccgcaccagggcctgcaccccatccaccagcgccacatcactatgcccacaagcgtcccccagcagcaggtctttggcctggcggaacccaagaggaagtcctcgctcttctggcacaccttcaacaggctcacccccttccggaaatgaaaacaggaggctgtgcttccatggagctgggtgtcaagagaagaactgtctttgtttcttgtgtgcttcaatccagggaaagtttcttggacccagtgataaaaacttccttttagggatcaatgaaggagagaaggtcttggaatcaccttcagtctttggagacccagctgcctttgtggaagggaggagacggtcatgacacaaagctttatcctacacagaaacacccgtgacccactatgagatggcccagatgtgggacccggtaccatgctctaaagcgagtgattaggcagcagctgaagccacccctgctgatgatgagcaagtgcctgctgcaggtccaaacacagcatccagggctttgcagttcctaaggagtgatgaggttagaggatcacttctgcatttgattttcaaggatgccgtc

SEQ ID NO: 20222 - DNA, 597 bp, Homo sapiens
  misc_feature 1..597: note = ENST00000454083
  source 1..597: mol_type = unassigned DNA
gttttccaaacagaaggatggtagctagaggggagatagcaagattctggagtctggaaagccttcacttggggtgctttcatgtatcatcattccacttgaggctcaaagcacaccaataacaagtacttgttcagaatgtataaacaaccctgagagatgggttttatcatccacattcaacaggtgaaaaaacaaagaaagaaacttgaccaaggactcatactcaaaaaagaaaaatatagaaaagaaaaaaaatgtgcatcgctatcatttgaagtttcttcagatggaggtactgagccctctgccttagtggatgacaacggtagtgaggaggacttcagctatgaagacctctgccaggccagccctcggtacctgcagcccggcggggagcagctggccatcaatgagctgatcagtgatggcaacgtggtctgcgcagaagccctgtgggaccatgtgaccatggatgaccaggaactgggcttcaaagccggggatgtcatccaggttctggaagcctccaacaaggactggtggtggggccgcagtgaagataaggaagcctggttccccgcgagcttcgtcaga

SEQ ID NO: 20223 - DNA, 605 bp, Homo sapiens
  misc_feature 1..605: note = ENST00000488060
  source 1..605: mol_type = unassigned DNA
gagacaggctcatagcaggatcgctttgctggcagacacacctggctttgaatccagccccgcaacttggggaaagttacttaacatctttgagccacggtttcctccttcataaccagacagcaacactccaagatgcttgtgaggctctcaagaggatttattccagcgctgagcgcagtgcctggcgcacattaagatgccaggaagccggatgggtgattgctcaggtctgtccagccagttgggcagccgtcagaaactgggagggctgacgagacaccagcccagagagctgtcagggagcggcagagcagaggagagggcccaggatggatcggcaggtgtcagccaggatggacgggaggagccgtgctcagagccagcagccccaggacgagcagctcctggctaggaacagaagacaggcactgtgggacaagtcaaagggtgctttcatgtatcatcattccacttgaggctcaaagcacaccaataacaagtacttgttcagaatgtataaacaaccctgagagatgggttttatcatccacattcaacaggtgaaaaaacaaagaaagaaacttgaccaaggactcatactc

SEQ ID NO: 20224 - DNA, 6405 bp, Homo sapiens
  misc_feature 1..6405: note = ENST00000343003
  source 1..6405: mol_type = unassigned DNA
agtttctgggcaggctctggccgggaacgcatacaacgtcaaagcagtgaataagcgatttctgcagttcccgtagctgccagcctgtgcagtcctctgtgatgcttggggaccggctcctcggtcacaccccagtcctgctctgaaggttgccgttttccaaacagaaggatggtagctagaggggagatagcaagattctggagtctggaaagccttcacttggggtgctttcatgtatcatcattccacttgaggctcaaagcacaccaataacaagtacttgttcagaatgtataaacaaccctgagagatgggttttatcatccacattcaacaggtgaaaaaacaaagaaagaaacttgaccaaggactcatactcaaaaaagaaaaatatagaaaagaaaaaaaatgtgcatcgctatcatttgaagtttcttcagatggaggtactgagccctctgccttagtggatgacaacggtagtgaggaggacttcagctatgaagacctctgccaggccagccctcggtacctgcagcccggcggggagcagctggccatcaatgagctgatcagtgatggcaacgtggtctgcgcagaagccctgtgggaccatgtgaccatggatgaccaggaactgggcttcaaagccggggatgtcatccaggttctggaagcctccaacaaggactggtggtggggccgcagtgaagataaggaagcctggttccccgcgagcttcgtcagattgcgagtgaatcaggaagagctgtcggaaaactccagcagcacccccagtgaggagcaggacgaggaggccagccagagccgccacagacactgtgagaacaagcagcagatgcggaccaacgtcatccgggagatcatggacaccgagcgggtgtacatcaaacacctcagggacatctgtgagggctatatccgacagtgccgcaagcacacaggaatgttcaccgttgcgcagctagccactatttttggaaacattgaagatatttacaaattccaaagaaagtttctgaaagaccttgagaaacagtacaacaaagaggaacctcacttaagtgaaataggatcttgctttcttcaaaatcaagagggctttgccatctattccgagtactgcaacaaccacccgggcgcctgcctggagctcgccaacctcatgaagcagggcaagtacagacatttctttgaagcctgccgcctgctgcagcagatgattgacatcgccatcgacgggttcctgctcacaccagtgcagaagatctgcaaatacccgctgcagctggccgagctgctcaagtataccacacaggaacacggtgattacagcaacataaaggcagcatatgaggccatgaagaatgtggcctgtctgatcaacgagcgcaagcgcaagctggagagcatcgacaagatagctcgctggcaggtgtctatcgtgggctgggagggactggatatcttagaccgaagctcagaattgattcattctggggagctgaccaaaatcactaagcaaggcaaaagccagcagcggacgttcttcctgtttgaccaccagctggtgtcctgcaagaaggacctgctgcgcagggacatgctgtactacaagggccggctggacatggatgagatggagcttgtggacctgggggatgggcgcgacaaggactgcaacctcagcgtgaaaaatgccttcaagctcgtcagtaggaccacagacgaggtttatttgttttgtgccaaaaaacaagaagacaaggcgaggtggctgcaggcctgtgcagatgaaaggaggcgggtgcaagaggacaaggagatgggaatggaaatttcagaaaaccagaagaaacttgccatgttaaatgctcaaaaggcaggacatggaaagtcaaaaggctacaacaggtgccctgtggccccaccgcaccagggcctgcaccccatccaccagcgccacatcactatgcccacaagcgtcccccagcagcaggtctttggcctggcggaacccaagaggaagtcctcgctcttctggcacaccttcaacaggctcacccccttccggaaatgaaaacaggaggctgtgcttccatggagctgggtgtcaagagaagaactgtctttgtttcttgtgtgcttcaatccagggaaagtttcttggacccagtgataaaaacttccttttagggatcaatgaaggagagaaggtcttggaatcaccttcagtctttggagacccagctgcctttgtggaagggaggagacggtcatgacacaaagctttatcctacacagaaacacccgtgacccactatgagatggcccagatgtgggacccggtaccatgctctaaagcgagtgattaggcagcagctgaagccacccctgctgatgatgagcaagtgcctgctgcaggtccaaacacagcatccagggctttgcagttcctaaggagtgatgaggttagaggatcacttctgcatttgattttcaaggatgccgtcaagacggggttgacacaatgctgcacgtgtctggtcacacttagaaattgagctcttactctcttctgtaatactgggggacctacagctgccgtggggctgaccacggtgttccctggcatcgtctgtgtccacacagatgctaactggtagtgcaaatgtcatcctgcaaggttcctcttcctgcaagcaaagtggagagaaagaagatgcatctgtcaccttcatcagggtcctcagtgcagagcaacttacgcatcctcaagaatccactgcttttcaggcaaggagggagaaatcctgctgcacactggctttgtcccggagtcggattccctcctgcctgcacgccttcagtaactccgagcagaaatcacatcttgcccacatgctgtaacctaagaaactgctatgcaaggctgggtgctgtggctcatgcctgtaatcccagcactttgggaggccaaggcaggtggatcacctgaggtcaggagttcgagacaagcgtggccaatatggcaaagcccagtctctactaataatacaaaaattagctgggcatggtggcgcatgcctgtaatcccagctactgggaaggctgaggtaggagaatcttttgaatctgggaagcggaggttgcagtgagctgagatcgcaccactgcactccagcctgggagatacagcgagactgtctccaaaaacaaaaacaaaaacaaaaaacattcaaacaactgtttgcaatataaaaagctcatttactgtaatatttatgatacagtgaatatgaaaatgcactggtcagaaggcactctcaaagagccgcactgctcctgacatcgtccttagcaatgaagtcacaaagacagccaaagcagtcctgcttcttggaaatcagaagctgcctttatcacatataaagccaaacagggcataaccatgtcacgtgagcatgtcatcaggcttctgaggacttgttctttataaaaaaagaccttcacaaaatatcttggcttagagatagcagtctttattaacaaaggccacctaggctgacacctgcagataatcatctccttttctttgtctatgttgtacattttcatgatataacttttaactatgtctagagaaggcaggctctgcaagagaggtgccctttcaacccgctcagtgccctggacaggagatgctgtgttaaactgttaatggatatctatatgagaagctcatttttgtatgctatccctgcagtttttttttttctaacaggcccatgtttgagaataaacaagtctgtgatgtcagagacaaaggtgtattcttcagtctgcaggtgtgtggcacctcccttctcccctgcagccccccacatccagagccgttcctgagagtgacatcatgcatcaagaaaacataaccttggtcctcaggtgaacccttggaacattctgtgaccgcctgatgtccattctgagccaccttggcacacatgcttacaggcagcactgctaagggttcaggtgccccatggctgacagcccgagttgcttctgtggaccatcatgccgctcggcacgtcctgagacagaagttgctgcaggaaggagcttctggagaggtcctgtggcatgtgtgggggtgtgtgtgtgtatgtttccttcttgaacagacattccaactttagatgtgtttatagaactgacctttttactaacaaaatacaatgatatatgttggaaactacttaatatgcttttcctgcacaccttagcaataactgtaggggtctctgctagagttgtttgtatgtacagcaattttgaacaaattgttttaaatgtaatataagagaattagtttaaggaagtaaagagaatcatttgcttgtgttacattttcagtgaggattcagtttaagagtcattcttaggacttccatttcctaatatttattcatgggtaatgaagaaatggtttgcattttgtggccagtcctaatttattttccagctgagccctaacttccggctcccacctacctccacggacttcctaacagagacttatgaataccaggatgtgtttttgttaagtcaggttcaattcgttgcccctgtcagttttatagagtgtgagggtcactccattaaagatctctcctgggtggatcctacttggatgttcaggtgattttgaaaactgctaacatttttaaaaggctagaacatcctttgacttcttgaaaatctgcatgtctggcttgggttttattaccacatgcctgagttcttcaagaatggaaggctcaagtattctcatcttccatttgccaaacttccttcctgatttgagtcacgtgttccacttggaaagaaagggaacagagagcctcctccatggacagtgtatgaatttcattgggaatcttgctctctcccgcctctatgcctttctctctttttaaccttactttacataatattatagatgggccaagaaaagaaaagatgacataacattttgatgaatttcacctattccattcttcacgtttcagaattggtcgactttgttagaagataattgaagtagccttgggtcaaaagcaaccttttcaattgtgatcatacctaaaacatataaaaaccctgccgtagattaaaagcaattataaaatcataaaattgaatgtttgcagaatcctggagcagtagatttctttgtctttggcctgcggactagaaagagggcagcagtagtatgctggagcttccctgggataccagccacatggtttcttttcattagatctgatttttgtttcccactgtagatctgattttgtagttgaaaacatttcaccaccatcaaacactatttctgaatattgtgcctttttatacctagcctagatgaaaaccgatgccattcttattcagaaaatccccccatcctacatgactgttatctagacataaagcaaagtgcatttaattcaaaatttggttcacaatataagtattttgtaaaagccagctgaaccagcattttatcaggtggaaatctctgcaagccaaattgctgatactccttcatgcagatcaacttggtgtcccagtcagaatagaacagcataattacctggagttagggggagtatttctgcactattacttgtcagggagagaagaaacttagaattgtccctcaaaggagtgtcaagaagtatgaataaatgtcctttcaccagctcacaggccagaaatggaggacccaagtcaactaggtgaaactactagcagacccagctttcccataataacctaatctgcaaattgttctattaaagtctcattgttttcaggatgcaatgaaagtggatttcaaaaggctttggaaaaataagtggaacatgactgatcttgaaaaaaaaagcaaaagcttaaatatttgatacaagtttacttagctacaacatactttacattgttgcctttagttatctcacaggcactgacattttatatttagaaaatacttttaatctttctaatctttttttgtaaatattagtgtccattctgtatgactcgctaacctactttgcaaggctttgggcaacattttagctcattaacttcaagatgatgtgtcatctgtataggtcaaagaatgggacttctgaactgaggaatttgctgttgacagccaaagtatagtgtacaagattgatgtaacttgatatgtatttttgttgaagttttttgtaaaaaaaaattatttacaatgttatttgaatgatttttttaaatgctgtgaatctatatttgttgttttgtatattaaaattcatttgccaaactcgt

SEQ ID NO: 20225 - DNA, 8463 bp, Homo sapiens
  misc_feature 1..8463: note = ENST00000382108
  source 1..8463: mol_type = unassigned DNA
ggctgagtgtgctgccgcggcgcgggaggagagtgtgcgttgcgctttctcccgcgatcgccctgccggtcgctagctccgagggcgcgcactggatcccaggctcctccgagagtgcggcgacctcggggctccgccggcaccggaggtggctctgagggcagggacgtgttggacacgctgactttgtaggctccgccaagaggcgccgcaggagcccgtggccacccaggagcccgatgtgcaaggcaggtgtgagtgccaggacggcattcctggagatgaaggcctggagctgcggtctgcggactcggcagtgcccgtggccatgacccaggctgccgtgcggccctgggcaccctgcctggagaacatgaccactgccccaaacggcctcgggccaggccccgcagccccctgtgcaggctcggacctgaaagacgccaagatggtgacctcccttgcgtgtggaaatggagtctgtggctgcagccctggtggcgacacggacacccaggaagccaaactcagcccagccaagcttgtgcgcctcttttccaccagtcggaagaggacgggtgcccaccccgagcggccccactccatggtcctggtggggaactcctccacatggaacaccctcgcctccttccggaaaatgggatcctttaagaaactgaagtcctcagtcctgaaaggaattcagagccgagaggggtcaaatgcctgttcaaagggagaggcttcggagcatggcctgggaaagtccatcccaaatggcgctgtcccaggagcccaggcaagcaggggctcccccttagcaccgggaccagcatgtggtgccctcaggccagcagagtggggcacattggatggctccgacctcgaggacacggacgatgccttccagcggagcacacaccgctcccgcagcctccgcagagcctacggcctgggccgcatctgcctgctggatgcgccccagaaccatgcgacacccacgatagccactggccaggtgcccgccgtgtgtgagattctcgtgagggaccctgaaaacaacagcatgggctacaggaggagcaagagcacggacaatcttgcctttctgaagaagagctcctttaagcggaagtccacctccaatcttgcagacctcaggacggcccatgacgcacgggtaccacagaggaccctgagcagttcctccactgactcccaaaagcttgggtcaggaaggaccaaacgctggaggagcccgataagggccaaggactttgacagagtcttcaaacttgtgagcaatgtgactgaggctgcctggaggagggagagtcctaggagtggggccccatcccctggagaggccagcctgagacttcaggcacacagccggctgcatgacgactactcccgccgcgtctccaggagcactgagcaggacagcaggcggggcggggcggtcatgcatgggaccactgcaacctgcaccgtggcccccggtttcggctcagccacctctaaggggccccacctagacgctgacactgccgtatttcctcttgaaaccaaaagttcctgggcggtggaaagcgacagttcctgcacttgcagctctttgccaagcccgattgtccaggatgtgttgagcaaagactcctgtgacccaaacgctggcagccagttgacatttgaccctgagcagcctcccacccctctaaggcccaccacacccaagccccagagccctcagagcccccagagccccggggcaggaagtgccagctgtcacagcaatcacagtgccctgtccgcgaattcagaggaaagtgaaggaagggcagaagagcctgctcagagagagccagggcctgtgtccttgcaggatcccctggaagccacacatggtgatgagggcagcaaggaccttctggtgaacattggtgtggcagccggcccagaagaaaaggagaaggaggaggtcgtccctgatggcccctggaggcgaagctcatcacaggatgaggaaaggacagaggcacagagaacccccaagaggagatggggctctgggagacggccaaggcctcggccattctctgactacggccagctggccagccgcagtttgtctattcctgaagactcggttgctgcagacccccagaaggaagaccgtgtggacgaggacccccaggcaagcatgacttctgccagccctgaagaccagaatgctccagtgggctgccccaaaggagcccggagaaggcgccccatttccgtgataggtggggtcagcttgtatgggaccaaccagacggaggaactggacaatcttctgacccaaccggcttccaggccgcccatgcctgctcaccaggtgccaccctacaaggctgtgtcggcccggttccggcccttcacattctcccagagcacccccattgggttggaccgtgtgggacgccggcggcagatgagagcatccaacgtttcttcagatggaggtactgagccctctgccttagtggatgacaacggtagtgaggaggacttcagctatgaagacctctgccaggccagccctcggtacctgcagcccggcggggagcagctggccatcaatgagctgatcagtgatggcaacgtggtctgcgcagaagccctgtgggaccatgtgaccatggatgaccaggaactgggcttcaaagccggggatgtcatccaggttctggaagcctccaacaaggactggtggtggggccgcagtgaagataaggaagcctggttccccgcgagcttcgtcagattgcgagtgaatcaggaagagctgtcggaaaactccagcagcacccccagtgaggagcaggacgaggaggccagccagagccgccacagacactgtgagaacaagcagcagatgcggaccaacgtcatccgggagatcatggacaccgagcgggtgtacatcaaacacctcagggacatctgtgagggctatatccgacagtgccgcaagcacacaggaatgttcaccgttgcgcagctagccactatttttggaaacattgaagatatttacaaattccaaagaaagtttctgaaagaccttgagaaacagtacaacaaagaggaacctcacttaagtgaaataggatcttgctttcttcaaaatcaagagggctttgccatctattccgagtactgcaacaaccacccgggcgcctgcctggagctcgccaacctcatgaagcagggcaagtacagacatttctttgaagcctgccgcctgctgcagcagatgattgacatcgccatcgacgggttcctgctcacaccagtgcagaagatctgcaaatacccgctgcagctggccgagctgctcaagtataccacacaggaacacggtgattacagcaacataaaggcagcatatgaggccatgaagaatgtggcctgtctgatcaacgagcgcaagcgcaagctggagagcatcgacaagatagctcgctggcaggtgtctatcgtgggctgggagggactggatatcttagaccgaagctcagaattgattcattctggggagctgaccaaaatcactaagcaaggcaaaagccagcagcggacgttcttcctgtttgaccaccagctggtgtcctgcaagaaggacctgctgcgcagggacatgctgtactacaagggccggctggacatggatgagatggagcttgtggacctgggggatgggcgcgacaaggactgcaacctcagcgtgaaaaatgccttcaagctcgtcagtaggaccacagacgaggtttatttgttttgtgccaaaaaacaagaagacaaggcgaggtggctgcaggcctgtgcagatgaaaggaggcgggtgcaagaggacaaggagatgggaatggaaatttcagaaaaccagaagaaacttgccatgttaaatgctcaaaaggcaggacatggaaagtcaaaaggctacaacaggtgccctgtggccccaccgcaccagggcctgcaccccatccaccagcgccacatcactatgcccacaagcgtcccccagcagcaggtctttggcctggcggaacccaagaggaagtcctcgctcttctggcacaccttcaacaggctcacccccttccggaaatgaaaacaggaggctgtgcttccatggagctgggtgtcaagagaagaactgtctttgtttcttgtgtgcttcaatccagggaaagtttcttggacccagtgataaaaacttccttttagggatcaatgaaggagagaaggtcttggaatcaccttcagtctttggagacccagctgcctttgtggaagggaggagacggtcatgacacaaagctttatcctacacagaaacacccgtgacccactatgagatggcccagatgtgggacccggtaccatgctctaaagcgagtgattaggcagcagctgaagccacccctgctgatgatgagcaagtgcctgctgcaggtccaaacacagcatccagggctttgcagttcctaaggagtgatgaggttagaggatcacttctgcatttgattttcaaggatgccgtcaagacggggttgacacaatgctgcacgtgtctggtcacacttagaaattgagctcttactctcttctgtaatactgggggacctacagctgccgtggggctgaccacggtgttccctggcatcgtctgtgtccacacagatgctaactggtagtgcaaatgtcatcctgcaaggttcctcttcctgcaagcaaagtggagagaaagaagatgcatctgtcaccttcatcagggtcctcagtgcagagcaacttacgcatcctcaagaatccactgcttttcaggcaaggagggagaaatcctgctgcacactggctttgtcccggagtcggattccctcctgcctgcacgccttcagtaactccgagcagaaatcacatcttgcccacatgctgtaacctaagaaactgctatgcaaggctgggtgctgtggctcatgcctgtaatcccagcactttgggaggccaaggcaggtggatcacctgaggtcaggagttcgagacaagcgtggccaatatggcaaagcccagtctctactaataatacaaaaattagctgggcatggtggcgcatgcctgtaatcccagctactgggaaggctgaggtaggagaatcttttgaatctgggaagcggaggttgcagtgagctgagatcgcaccactgcactccagcctgggagatacagcgagactgtctccaaaaacaaaaacaaaaacaaaaaacattcaaacaactgtttgcaatataaaaagctcatttactgtaatatttatgatacagtgaatatgaaaatgcactggtcagaaggcactctcaaagagccgcactgctcctgacatcgtccttagcaatgaagtcacaaagacagccaaagcagtcctgcttcttggaaatcagaagctgcctttatcacatataaagccaaacagggcataaccatgtcacgtgagcatgtcatcaggcttctgaggacttgttctttataaaaaaagaccttcacaaaatatcttggcttagagatagcagtctttattaacaaaggccacctaggctgacacctgcagataatcatctccttttctttgtctatgttgtacattttcatgatataacttttaactatgtctagagaaggcaggctctgcaagagaggtgccctttcaacccgctcagtgccctggacaggagatgctgtgttaaactgttaatggatatctatatgagaagctcatttttgtatgctatccctgcagtttttttttttctaacaggcccatgtttgagaataaacaagtctgtgatgtcagagacaaaggtgtattcttcagtctgcaggtgtgtggcacctcccttctcccctgcagccccccacatccagagccgttcctgagagtgacatcatgcatcaagaaaacataaccttggtcctcaggtgaacccttggaacattctgtgaccgcctgatgtccattctgagccaccttggcacacatgcttacaggcagcactgctaagggttcaggtgccccatggctgacagcccgagttgcttctgtggaccatcatgccgctcggcacgtcctgagacagaagttgctgcaggaaggagcttctggagaggtcctgtggcatgtgtgggggtgtgtgtgtgtatgtttccttcttgaacagacattccaactttagatgtgtttatagaactgacctttttactaacaaaatacaatgatatatgttggaaactacttaatatgcttttcctgcacaccttagcaataactgtaggggtctctgctagagttgtttgtatgtacagcaattttgaacaaattgttttaaatgtaatataagagaattagtttaaggaagtaaagagaatcatttgcttgtgttacattttcagtgaggattcagtttaagagtcattcttaggacttccatttcctaatatttattcatgggtaatgaagaaatggtttgcattttgtggccagtcctaatttattttccagctgagccctaacttccggctcccacctacctccacggacttcctaacagagacttatgaataccaggatgtgtttttgttaagtcaggttcaattcgttgcccctgtcagttttatagagtgtgagggtcactccattaaagatctctcctgggtggatcctacttggatgttcaggtgattttgaaaactgctaacatttttaaaaggctagaacatcctttgacttcttgaaaatctgcatgtctggcttgggttttattaccacatgcctgagttcttcaagaatggaaggctcaagtattctcatcttccatttgccaaacttccttcctgatttgagtcacgtgttccacttggaaagaaagggaacagagagcctcctccatggacagtgtatgaatttcattgggaatcttgctctctcccgcctctatgcctttctctctttttaaccttactttacataatattatagatgggccaagaaaagaaaagatgacataacattttgatgaatttcacctattccattcttcacgtttcagaattggtcgactttgttagaagataattgaagtagccttgggtcaaaagcaaccttttcaattgtgatcatacctaaaacatataaaaaccctgccgtagattaaaagcaattataaaatcataaaattgaatgtttgcagaatcctggagcagtagatttctttgtctttggcctgcggactagaaagagggcagcagtagtatgctggagcttccctgggataccagccacatggtttcttttcattagatctgatttttgtttcccactgtagatctgattttgtagttgaaaacatttcaccaccatcaaacactatttctgaatattgtgcctttttatacctagcctagatgaaaaccgatgccattcttattcagaaaatccccccatcctacatgactgttatctagacataaagcaaagtgcatttaattcaaaatttggttcacaatataagtattttgtaaaagccagctgaaccagcattttatcaggtggaaatctctgcaagccaaattgctgatactccttcatgcagatcaacttggtgtcccagtcagaatagaacagcataattacctggagttagggggagtatttctgcactattacttgtcagggagagaagaaacttagaattgtccctcaaaggagtgtcaagaagtatgaataaatgtcctttcaccagctcacaggccagaaatggaggacccaagtcaactaggtgaaactactagcagacccagctttcccataataacctaatctgcaaattgttctattaaagtctcattgttttcaggatgcaatgaaagtggatttcaaaaggctttggaaaaataagtggaacatgactgatcttgaaaaaaaaagcaaaagcttaaatatttgatacaagtttacttagctacaacatactttacattgttgcctttagttatctcacaggcactgacattttatatttagaaaatacttttaatctttctaatctttttttgtaaatattagtgtccattctgtatgactcgctaacctactttgcaaggctttgggcaacattttagctcattaacttcaagatgatgtgtcatctgtataggtcaaagaatgggacttctgaactgaggaatttgctgttgacagccaaagtatagtgtacaagattgatgtaacttgatatgtatttttgttgaagttttttgtaaaaaaaaattatttacaatgttatttgaatgatttttttaaatgctgtgaatctatatttgttgttttgtatattaaaattcatttgccaaactcgt

SEQ ID NO: 20226 - DNA, 2169 bp, Homo sapiens
  misc_feature 1..2169: note = ENST00000477715
  source 1..2169: mol_type = unassigned DNA
agtaacaaagaattccagcagtgagctgtgagttctgtccttgctggctttcccaagtggaaggctaccctcatctttcactaatggcagactaggacaagcattacccaggcctgcaagcttgttaaggactaggaacccaagcaagaactcaccatgccaatcaaacctgttgggtggatatgtgggcaggtgttgaagaacttttctggaagaatcgaggggatccagaaagcaatcatggaccttgtagatgagtttaaagatgaatttcccaccatcctaagattatcacagtctaatcaggtcagaaagggttctttgtttgaaatcatctcctttccagcaaagactgctttaactagcataatatatgcttcatatgcagcactaatttatttggcagtctgtgttaatgctgtgctgaagaaggtaaagaacatcttccaggaagaagaatccataaggcaaaacagagaggagagtgaaaattgtagaaaagccttttctgagcctgtgctttcggagcctatgtttgctgaaggtgaaatcaaagcaaaaccttataggtcattgccggagaagccagacatttcagattaccccaagcttcttgctaataagcagagtaataacatccaagttttacattctgtgtttgaccaatcagctgaaatgaatgagcaaatctgaatacaggcattcaaagaacattggctcactgaataggagactttacatctctcatggctgggcagcagctgtgtctggcttccttacttcaagatctgccttgatcacagatcacttaacagtggttaagtttcttattttcaagttcagcaggggcaaactatacacggtcgtccatcaaaatcctggggaagagaataactcatttaatattctgacatgtcaaatgttcttgatagactctgaagagtctgctgcagaagaaccaggttaaaaaaacagtaggtctaaggggttggggtgacaagattctgcatgtctaagaagctcccatgtgacaccaaagttgctggtctatggacaacagtttgaggagcaaggtcttcaagctctcattatggactgaaactggagaaaattctatggaactattatcagctcacacatataaaaactggtcactgagatgacagctgagctgaaatgcccaaaatgcaaatgaactagacatgccaacagcttggggaagagaattccatactgaaagaagagcaaatacaaaagcctgaaggaaagaaaagtcttggtgaatgtgttccagaagactggaacataatatgcaagattggtaaacaggcaggagccaggttgtgcagtgctgtgtatggattttactctaagagcaaaggaaagccactgaagagtataaagcaggaaagtgtgaattgatttctttttgaaagaatgctcccggctctgtggagaatggattatagcaaaacaacaatggatgcccagaaatcagaaagctaggggtccatgaaaaaggtggtggcttgccgcagggggttgatgctgtaggggataaaaagtaataacaacagtagcagtagtagctacaattatattgtgttaactatgtgccaggcactattcaaaggctacatttatttattaactcctttaatcctccatgttactaaaaaggtattattttaattttatagtacagagaagttgggttgatgaacttgaatgaagatgctacagaaaaataaataaagatgactcccaagttttaggtttgtgcagctaggtgaactgtagtgccaaagactgtgaggagaaaggccaagaaatgaatggtatttttgcagaatggaaaatcaagagctatatatattttacacatattgagtttaaggtatctcagagacatccaagtagagatgtcaagtcaacaaccagatatatgagactaaagtcgagaatttctagagagaaaaactggggagtttccaggtcatagaattctatggactcacttggagaggaagtgtagataaggaagaaggtctaagacaattcctgaaacacttcaacatttagaggtcaggtggaagagaggttgtagagaggcaagatcagtagagtgtccaatctattgctaatcaaatgaaattcattcacagcttt

SEQ ID NO: 20227 - DNA, 1592 bp, Homo sapiens
  misc_feature 1..1592: note = ENST00000477047
  source 1..1592: mol_type = unassigned DNA
agtgagctgtgagttctgtccttgctggctttcccaagtggaaggctaccctcatctttcactaatggcagactaggacaagcattacccaggcctgcaagcttgttaaggactaggaacccaagcaagaactcaccatgccaatcaaacctgttgggtggatatgtgggcagtcgaggggatccagaaagcaatcatggaccttgtagatgagtttaaagatgaatttcccaccatcctaagattatcacagtctaatcagaaaagagaacctgcgcagaaaacatccaaaatcaggatggctattgctttagctaagattaatcgagcaacattaattcgtggattaaacagcatatccagatcctccaaatcagtggccaaacttctgcatcctcagcttgcatgcagacttttagagctaagggacatatctggtcgtctgctgagggaagttaatgcgccgaggcaacccctatataacattcaggtcagaaagggttctttgtttgaaatcatctcctttccagcaaagactgctttaactagcataatatatgcttcatatgcagcactaatttatttggcagtctgtgttaatgctgtgctgaagaaggtaaagaacatcttccaggaagaagaatccataaggcaaaacagagaggagagtgaaaattgtagaaaagccttttctgagcctgtgctttcggagcctatgtttgctgaaggggcaaactatacacggtcgtccatcaaaatcctggggaagagaataactcatttaatattctgacatgtcaaatgttcttgatagactctgaagagtctgctgcagaagaaccaggttaaaaaaacagtaggtctaaggggttggggtgacaagattctgcatgtctaagaagctcccatgtgacaccaaagttgctggtctatggacaacagtttgaggagcaaggtcttcaagctctcattatggactgaaactggagaaaattctatggaactattatcagctcacacatataaaaactggtcactgagatgacagctgagctgaaatgcccaaaatgcaaatgaactagacatgccaacagcttggggaagagaattccatactgaaagaagagcaaatacaaaagcctgaaggaaagaaaagtcttggtgaatgtgttccagaagactggaacataatatgcaagattggtaaacaggcaggagccaggttgtgcagtgctgtgtatggattttactctaagagcaaaggaaagccactgaagagtataaagcaggaaagtgtgaattgatttctttttgaaagaatgctcccggctctgtggagaatggattatagcaaaacaacaatggatgcccagaaatcagaaagctaggggtccatgaaaaaggtggtggcttgccgcagggggttgatgctgtaggggataaaaagtaataacaacagtagcagtagtagctacaattatattgtgttaactatgtgccaggcactattcaaaggctacatttatttattaactcctttaatcctccatgttactaaaaaggtattattttaattttatagtacagagaag

SEQ ID NO: 20228 - DNA, 1583 bp, Homo sapiens
  misc_feature 1..1583: note = ENST00000316087
  source 1..1583: mol_type = unassigned DNA
ccagcagtgagctgtgagttctgtccttgctggctttcccaagtggaaggctaccctcatctttcactaatggcagactaggacaagcattacccaggcctgcaagcttgttaaggactaggaacccaagcaagaactcaccatgccaatcaaacctgttgggtggatatgtgggcaggtgttgaagaacttttctggaagaatcgaggggatccagaaagcaatcatggaccttgtagatgagtttaaagatgaatttcccaccatcctaagattatcacagtctaatcagaaaagagaacctgcgcagaaaacatccaaaatcaggatggctattgctttagctaagattaatcgagcaacattaattcgtggattaaacagcatatccagatcctccaaatcagtggccaaacttctgcatcctcagcttgcatgcagacttttagagctaagggacatatctggtcgtctgctgagggaagttaatgcgccgaggcaacccctatataacattcaggtcagaaagggttctttgtttgaaatcatctcctttccagcaaagactgctttaactagcataatatatgcttcatatgcagcactaatttatttggcagtctgtgttaatgctgtgctgaagaaggtaaagaacatcttccaggaagaagaatccataaggcaaaacagagaggagagtgaaaattgtagaaaagccttttctgagcctgtgctttcggagcctatgtttgctgaaggtgaaatcaaagcaaaaccttataggtcattgccggagaagccagacatttcagattaccccaagcttcttgctaataagcagagtaataacatccaagttttacattctgtgtttgaccaatcagctgaaatgaatgagcaaatctgaatacaggcattcaaagaacattggctcactgaataggagactttacatctctcatggctgggcagcagctgtgtctggcttccttacttcaagatctgccttgatcacagatcacttaacagtggttaagtttcttattttcaagttcagcaggggcaaactatacacggtcgtccatcaaaatcctggggaagagaataactcatttaatattctgacatgtcaaatgttcttgatagactctgaagagtctgctgcagaagaaccaggttaaaaaaacagtaggtctaaggggttggggtgacaagattctgcatgtctaagaagctcccatgtgacaccaaagttgctggtctatggacaacagtttgaggagcaaggtcttcaagctctcattatggactgaaactggagaaaattctatggaactattatcagctcacacatataaaaactggtcactgagatgacagctgagctgaaatgcccaaaatgcaaatgaactagacatgccaacagcttggggaagagaattccatactgaaagaagagcaaatacaaaagcctgaaggaaagaaaagtcttggtgaatgtgttccagaagactggaacataatatgcaagattggtaaacaggcaggagccaggttgtgcagtgctgtgtatggattttact

SEQ ID NO: 20229 - DNA, 1100 bp, Homo sapiens
  misc_feature 1..1100: note = ENST00000274432
  source 1..1100: mol_type = unassigned DNA
ccagcagtgagctgtgagttctgtccttgctggctttcccaagtggaaggctaccctcatctttcactaatggcagactaggacaagcattacccaggcctgcaagcttgttaaggactaggaacccaagcaagaactcaccatgccaatcaaacctgttgggtggatatgtgggcaggtgttgaagaacttttctggaagaatcgaggggatccagaaagcaatcatggaccttgtagatgagtttaaagatgaatttcccaccatcctaagattatcacagtctaatcagaaaagagaacctgcgcagaaaacatccaaaatcaggatggctattgctttagctaagattaatcgagcaacattaattcgtggattaaacagcatatccagatcctccaaatcagtggccaaacttctgcatcctcagcttgcatgcagacttttagagctaagggacatatctggtcgtctgctgagggaagttaatgcgccgaggcaacccctatataacattcaggtcagaaagggttctttgtttgaaatcatctcctttccagcaaagactgctttaactagcataatatatgcttcatatgcagcactaatttatttggcagtctgtgttaatgctgtgctgaagaaggtaaagaacatcttccaggaagaagaatccataaggcaaaacagagaggagagtgaaaattgtagaaaagccttttctgagcctgtgctttcggagcctatgtttgctgaaggtgaaatcaaagcaaaaccttataggtcattgccggagaagccagacatttcagattaccccaagcttcttgctaataagcagagtaataacatccaagttttacattctgtgtttgaccaatcagctgaaatgaatgagcaaatctgaatacaggtatcactgaacagaacttaagagttatctatttaatggcacatttcatctgacaaaactcagagtctagtttacatattctgaattgctctgctttcttaaaaaaaagagaagggggctactattaaaatgtcattttctagtatttacatgatagagtaaataaaatgaatattgatgtggaata

SEQ ID NO: 20230 - DNA, 702 bp, Homo sapiens
  misc_feature 1..702: note = ENST00000379990
  source 1..702: mol_type = unassigned DNA
gcttggaagtctacagtggaagagtgagggaactttggtcagctgcttttcctctcctcagctctcctccctcatcggtttctgcttttggcctcttcaaagctgcaagagggaaggagaaaaggtcagaaagggttctttgtttgaaatcatctcctttccagcaaagactgctttaactagcataatatatgcttcatatgcagcactaatttatttggcagtctgtgttaatgctgtgctgaagaaggtaaagaacatcttccaggaagaagaatccataaggcaaaacagagaggagagtgaaaattgtagaaaagccttttctgagcctgtgctttcggagcctatgtttgctgaaggtgaaatcaaagcaaaaccttataggtcattgccggagaagccagacatttcagattaccccaagcttcttgctaataagcagagtaataacatccaagttttacattctgtgtttgaccaatcagctgaaatgaatgagcaaatctgaatacaggtatcactgaacagaacttaagagttatctatttaatggcacatttcatctgacaaaactcagagtctagtttacatattctgaattgctctgctttcttaaaaaaaagagaagggggctactattaaaatgtcattttctagtatttacatgatagagtaaataaaatgaatattgatgtggaa

SEQ ID NO: 20231 - DNA, 1046 bp, Homo sapiens
  misc_feature 1..1046: note = ENST00000489917
  source 1..1046: mol_type = unassigned DNA
agtaacaaagaattccagcagtgagctgtgagttctgtccttgctggctttcccaagtggaaggctaccctcatctttcactaatggcagactaggacaagcattacccaggcctgcaagcttgttaaggactaggaacccaagcaagaactcaccatgccaatcaaacctgttgggtggatatgtgggcaggtgttgaagaacttttctggaagaatcgaggggatccagaaagcaatcatggaccttgtagatgagtttaaagatgaatttcccaccatcctaagattatcacagtctaatcagaaaagagaacctgcgcagaaaacatccaaaatcaggatggctattgctttagctaagattaatcgagcaacattaattcgtggattaaacagcatatccagatcctccaaatcagtggccaaacttctgcatcctcagcttgcatgcagacttttagagctaagggacatatctggtcgtctgctgagggaagttaatgcgccgaggcaacccctatataacattcaggagaagaaaatggggctccaattgagttaaaccaaaaaagaagatgtattagctcccataaacaacccagagctgttgagattcccgacatggctggatacaggtcagaaagggttctttgtttgaaatcatctcctttccagcaaagactgctttaactagcataatatatgcttcatatgcagcactaatttatttggcagtctgtgttaatgctgtgctgaagaaggtaaagaacatcttccaggaagaagaatccataaggcaaaacagagaggagagtgaaaattgtagaaaagccttttctgagcctgtgctttcggagcctatgtttgctgaaggtgaaatcaaagcaaaaccttataggtcattgccggagaagccagacatttcagattaccccaagcttcttgctaataagcagagtaataacatccaagttttacattctgtgtttgaccaatcagctgaaatgaatgagcaaatctgaatacaggtatcactgaacagaa

SEQ ID NO: 20232 - DNA, 2007 bp, Homo sapiens
  misc_feature 1..2007: note = ENST00000377470
  source 1..2007: mol_type = unassigned DNA
agactctgcaccctccttcagcccaggcaaggcctggggccctgggcagcctccaggtgcagtgccctcccgtgggccgcacccttgccactgccccagggcatgtctctactcaccaattatgaagggcttcggcatcagatagagaggctggtgcgggaaaatgaggaactgaagaagttggtgcggctcattcgggagaatcacgagctcaagtcagcgatcaagactcaggcaggcgggctcggcatcagcgggttcacgagtgggcttggtgaggcaacagcaggcctttcctcacgccagaacaatggtgtcttcctgcccccgtccccagcagtggcaaacgaacgagtcctcgaagaagtggggatcatggccttggcacccctggccgagatgctaaccagcttgcagcccagcgccacaccgggctcactcatgagccccctgacaggcaccctcagcacgctgctgtctggcccagcacccacgtcacagagcagccccctcaccagcttcctgaccagtcccattgcgggacccctaacaggcacactggccagttccctgggcctgccctccactggcaccctgactcccagcagcctcgtggcaggccctgtggccatgtcccagagcagccccctgatagcccctgtgatgggcacggtggctgtctctctgagcagccccctcctcagctccactgccaccccaccaggggtctctcagaacctgctggccaaccccatgagcaacctggtcctgccagaggccccaaggctgcggctggctgagccactccgcggaggccccactgggccccagtccccagcttgcgtggtacccactgccaccaccaaagtcccactctccactgagcccccccagtcgacccaggacccagagcctctcagcatggcgtttgcaggagcacccctccagacctccacccctatcggagccatgggcacacctgctcccaagacggccttctccttcaacacttcggacacacaggcccagcccagtgccgcccaggaacaagtggtccctgcatctgtccccacctcccccaccacctcccccacggtcaccgtccttgcctctgcccccgcccttgccccccaggttgccaccagctacacaccctcaagcaccacccacatcgcccagggtgccccccatcccccttcccgaatgcataattccccaacccagaacctgcctgtcccccactgtcctccacacaacgcccactccccacctcgtacctcatcctccccggcttcagtcaatgactctcgaggtccacgcaccacagaaccgtcgacgaagagcatgatggaggtggaacggaagctggcccaccgcaagaccagcaagttccccgagaacccccgagagtcgaagcagctggcctgggagaggctggtgggtgagattgccttccagctggaccgcaggatcctgtccagcatcttcccagagcgcgtacggctctacggcttcactgtctccaacatcccagagaagatcatccaggcttccctgaaccccagtgaccacaagctggatgagaagctgtgccagaggctcacacagcgctatgtgagcgtcatgaacaggctgcagagtctgggctacaacgggcgggtgcaccctgcgctgaccgagcagctggtgaacgcttatggcatcctgcgagagcgcccggagctggcggcgtctgagggcggcccctacaccgtggacttcctgcagcgtgtggtggtggagaccgtgcaccccggcatgctcgccgacgcgctgctgctgctctcctgcctcagccagctggcgcacgatgacggcaagcccatgttcatctggtgacgctggagctgggaggtccaggctcgctcagccccacagccctgtgcacggccattaaagcttcccacagacactggtcgctgggcctgtgccagcgctcctgggtggtgctgcctcctctggggtggc

SEQ ID NO: 20233 - DNA, 1795 bp, Homo sapiens
  misc_feature 1..1795: note = ENST00000447830
  source 1..1795: mol_type = unassigned DNA
ctccttcagcccaggcaaggcctggggccctgggcagcctccaggtgcagtgccctcccgtgggccgcacccttgccactgccccagggcatgtctctactcaccaattatgaagggcttcggcatcagatagagaggctggtgcgggaaaatgaggaactgaagaagttggtgcggctcattcgggagaatcacgagctcaagtcagcgatcaagactcaggcaggcgggctcggcatcagcgggttcacgagtgggcttggtgaggcaacagcaggcctttcctcacgccagaacaatggtgtcttcctgcccccgtccccagcagtggcaaacgaacgagtcctcgaagaagtggggatcatggccttggcacccctggccgagatgctaaccagcttgcagcccagcgccacaccgggctcactcatgagccccctgacaggcaccctcagcacgctgctgtctggcccagcacccacgtcacagagcagccccctcaccagcttcctgaccagtcccattgcgggacccctaacaggcacactggccagttccctgggcctgccctccactggcaccctgactcccagcagcctcgtggcaggccctgtggccatgtcccagagcagccccctgatagcccctgtgatgggcacggtggctgtctctctgagcagccccctcctcagctccactgccaccccaccaggggtctctcagaacctgctggccaaccccatgagcaacctggtcctgccagaggccccaaggctgcggctggctgagccactccgcggaggccccactgggccccagtccccagcttgcgtggtacccactgccaccaccaaagtcccactctccactgagcccccccagtcgacccaggacccagagcctctcagcatggcgtttgcaggagcacccctccagacctccacccctatcggagccatgggcacacctgctcccaagacggccttctccttcaacacttcggacacacaggcccagcccagtgccgcccaggaacaagtggtccctgcatctgtccccacctcccccaccacctcccccacggtcaccgtccttgcctctgcccccgcccttgccccccaggttgccaccagctacacaccctcaagcaccacccacatcgcccagggtgccccccatcccccttcccgaatgcataattccccaacccagaacctgcctgtcccccactgtcctccacacaacgcccactccccacctcgtacctcatcctccccggcttcagtcaatgactctcgaggtccacgcaccacagaaccgtcgacgaagagcatgatggaggtggaacggaagctggcccaccgcaagaccagcaagttccccgagaacccccgaggcttccctgaaccccagtgaccacaagctggatgagaagctgtgccagaggctcacacagcgctatgtgagcgtcatgaacaggctgcagagtctgggctacaacgggcgggtgcaccctgcgctgaccgagcagctggtgaacgcttatggcatcctgcgagagcgcccggagctggcggcgtctgagggcggcccctacaccgtggacttcctgcagcgtgtggtggtggagaccgtgcaccccggcatgctcgccgacgcgctgctgctgctctcctgcctcagccagctggcgcacgatgacggcaagcccatgttcatctggtgacgctggagctgggaggtccaggctcgctcagccccacagccctgtgcacggccattaaagcttcccaca

SEQ ID NO: 20234 - DNA, 614 bp, Homo sapiens
  misc_feature 1..614: note = ENST00000472876
  source 1..614: mol_type = unassigned DNA
gcgggtccctctcctgagcatcagtgagcgcccggagccgtggccgctgggggttgcggcggcgctgagccagcggggccggtggaaaaggattattcatacctgaaggagatatgtgatcaccaagccgaacagctgagcagaaccagcctaaagctgcaagaaaaagcatcagagagtgatgcagagatcaaagacatgaaagaaaccatatttgaattggaagatcaggtggaacagcaccgggctgtcaagttacacaataatcaactcatcagtgagctagaaagtagtgtgatcaagctggaggaacagaagtcagacctggagaggcagctgaagactctgaccaagcagatgaaggaggagaccgaggaatggaggcggttccaggcggatctgcagaccgcagtggtggtggccaatgacatcaagtgtgaggcccagcaggagctgcgcaccgtgaagaggaaactgctggaggaggaggagaagaatgcccggttgcagaaggagctgggggatgtgcagggccacggcagggtggtcaccagcagagccgcccctccctccctgggctctgtcagctagcagagcatttggtggaagaaaga

SEQ ID NO: 20235 - DNA, 3363 bp, Homo sapiens
  misc_feature 1..3363: note = ENST00000395527
  source 1..3363: mol_type = unassigned DNA
atcagtgagcgcccggagccgtggccgctgggggttgcggcggcgctgagccagcggggccggacagacccacgaagtcaagcatgcggagtgcagccaagccctggaacccagccatcagagcagggggccacggcccagaccgggtgcggcctctgcctgcagcctcttccggcatgaagagttctaagtcttcaacttccttggcttttgagtcccgactcagcaggctcaagagggccagcagtgaggacacgctcaacaagccaggaagtaccgctgcatcgggggtggttcgcctgaagaagaccgccactgccggagccatctcggagctcacggagagccgcctgaggagcggcacaggggcctttacaacaactaaacggacaggcattccagccccacgggaattttcagtaactgtctcaagagagaggtctgtgccacgtggtccctccaaccccaggaaatcagtgtccagtccaacttcttccaacactcccactcctacgaaacacctgaggaccccttccacaaagcccaagcaagagaatgaaggtggagaaaaggctgcgcttgagtcccaagttcgggaacttttggcagaagccaaagcaaaagatagtgaaattaacaggcttcgaagtgaactaaagaaatacaaagagaaaaggactctgaacgctgaggggactgatgctttgggcccaaatgtcgatggaacatcagtctccccaggtgacacggaacctatgataagagctcttgaggagaagaacaagaactttcagaaagagctttccgatctagaggaagaaaaccgggtcctgaaggagaaactgatctatcttgagcactccccaaattcagaaggggcagcaagtcacactggcgacagcagctgcccaacatccataactcaagagtcaagcttcggaagcccaactggaaatcagatgtccagtgacattgatgagtataaaaaaaacatacatggaaatgcattacggacatcaggctcctcaagtagcgatgttaccaaagcttctttgtcgccagatgcttccgactttgagcacattacagcagagacaccctcaaggcccctgtcctccaccagtaacccctttaagagttcaaagtgttctactgctgggagttccccaaacagcgtaagtgaattgtccctggcttccctcacagagaagatacaaaagatggaagaaaaccaccatagcactgcagaagaactacaggctactctacaagaattatcagaccagcaacaaatggtacaggaattgacagctgaaaatgagaagctggtggatgaaaagacgattttagagacatcctttcatcagcatcgagagagggcagagcagctaagtcaagaaaatgagaagctgatgaatcttttacaagagcgagtaaagaatgaagagcccaccactcaggaaggaaaaattattgaactggagcagaagtgcacaggtattcttgaacagggccgctttgaaagagagaagctactcaacattcagcagcagttgacctgtagcttgcggaaggttgaggaagaaaaccaaggagctttagaaatgattaaacgtctgaaggaagaaaatgaaaaactgaatgagtttctagaactggaacggcataataataacatgatggccaaaactttggaagagtgtagagttaccttggaagggctaaaaatggagaatggatctttgaagtctcatttgcagggtgagaagcagaaagccacagaggccagtgctgtggagcagacggcagagagctgcgaagttcaagaaatgttgaaagtagcccgagcagagaaagatctactggaactgtcttgcaatgagctcagacaagaattactaaaggcaaacggtgaaattaaacatgtttccagtctgctggccaaggtggaaaaggattattcatacctgaaggagatatgtgatcaccaagccgaacagctgagcagaaccagcctaaagctgcaagaaaaagcatcagagagtgatgcagagatcaaagacatgaaagaaaccatatttgaattggaagatcaggtggaacagcaccgggctgtcaagttacacaataatcaactcatcagtgagctagaaagtagtgtgatcaagctggaggaacagaagtcagacctggagaggcagctgaagactctgaccaagcagatgaaggaggagaccgaggaatggaggcggttccaggcggatctgcagaccgcagtggtggtggccaatgacatcaagtgtgaggcccagcaggagctgcgcaccgtgaagaggaaactgctggaggaggaggagaagaatgcccggttgcagaaggagctgggggatgtgcagggccacggcagggtggtcaccagcagagccgcccctccacctgtggatgaagagccagagtcctctgaggtcgatgctgctggtcggtggcctggtgtctgtgttagcagaacatctccaacacccccagagtcggcaaccaccgttaagtcacttatcaagtcatttgacttgggacgcccaggtggagctggacagaatatttctgtccataagacccccagaagtcccctaagtgggataccagtgaggactgctccagcagctgctgtctctccaatgcagaggcattcgacttacagcagtgtgcggccagccagcagaggggtgactcaacgcttggaccttcctgaccttcccctctcagatattctaaagggaaggactgagaccctgaagccagacccccacctccgcaagagtccctcactagagtcactgagcagacccccgtctctgggctttggggacacaagactgctgagtgcttccacccgggcatggaaaccacaaagcaaactcagtgtggaaagaaaagaccctctggcagccttggcccgggaatacggtggttccaagcgcaatgctctactgaaatggtgccagaagaagacacaaggttatgcgaacattgacatcaccaatttcagcagcagctggagcgatggcctggccttctgtgctctgctccacacctacctgcctgcccacatcccctaccaggagctgaatagtcaggagaaaaagaggaatctcttgttggcatttgaagcggctgaaagtgtaggcatcaaacccagcctggaactcagcgagatgctgtacacagaccggcccgactggcagagtgtgatgcagtacgtggcccaaatctacaagtactttgagacgtaaccctggagggcctggggcagccaccattgccacctactgcagcttttcctggaagcgcctgattactgtccac

SEQ ID NO: 20236 - DNA, 570 bp, Homo sapiens
  misc_feature 1..570: note = ENST00000583482
  source 1..570: mol_type = unassigned DNA
tcagtgagcgcccggagccgtggccgctgggggttgcggcggcgctgagccagcggggccgatgtagattccaatgatgtcatctcactgaaacctccgcctcccaggttcaagtgatcctcctgcctcagcctcccaagtagctgggactacaggtgcacaccaccacgcccagctgatttttgtatttagtagagacaggatttcaccatgttagccagactggtcttgaactcctgacctaaggacagacccacgaagtcaagcatgcggagtgcagccaagccctggaacccagccatcagagcagggggccacggcccagaccgggtgcggcctctgcctgcagcctcttccggcatgaagagttctaagtcttcaacttccttggcttttgagtcccgactcagcaggctcaagagggccagcagtgaggacacgctcaacaagccaggaagtaccgctgcatcgggggtggttcgcctgaagaagaccgccactgccggagccatctcggagctcacggagagccgcctgaggagcggcacaggggcctttacaacaactaaa

SEQ ID NO: 20237 - DNA, 571 bp, Homo sapiens
  misc_feature 1..571: note = ENST00000583528
  source 1..571: mol_type = unassigned DNA
agtgagcgcccggagccgtggccgctgggggttgcggcggcgctgagccagcggggccggcgtagcgtgcctcctgtgattgttgaagagctgtggtgtgctgctgagtggcgtgtgtattccatgtgaggggaagggtccaacagtcctggtcattcagactgcagttccccagagacagagttttgctatgttgctcaggctggtcttgagctcctggcctcaagcaatccacctgccttggcctcccaaagtgctgagattacagatgtgagccaccacacccagtccaagtgtttctatttagttgataatggacagacccacgaagtcaagcatgcggagtgcagccaagccctggaacccagccatcagagcagggggccacggcccagaccgggtgcggcctctgcctgcagcctcttccggcatgaagagttctaagtcttcaacttccttggcttttgagtcccgactcagcaggctcaagagggccagcagtgaggacacgctcaacaagccaggaagtaccgctgcatcgggggtggttcgcctgaagaagaccgccact

SEQ ID NO: 20238 - DNA, 581 bp, Homo sapiens
  misc_feature 1..581: note = ENST00000583463
  source 1..581: mol_type = unassigned DNA
agccgtggccgctgggggttgcggcggcgctgagccagcggggccggcgtagcgtgcctcctgtgattgttgaagagctgtggtgtgctgctgagtggcgtgtgtattccatgtgaggggaagggtccaacagtcctggtcattcagactgcagttccccaggacagacccacgaagtcaagcatgcggagtgcagccaagccctggaacccagccatcagagcagggggccacggcccagaccgggtgcggcctctgcctgcagcctcttccggcatgaagagttctaagtcttcaacttccttggcttttgagtcccgactcagcaggctcaagagggccagcagtgaggacacgctcaacaagccaggaagtaccgctgcatcgggggtggttcgcctgaagaagaccgccactgccggagccatctcggagctcacggagagccgcctgaggagcggcacaggggcctttacaacaactaaacggacaggcattccagccccacgggaattttcagtaactgtctcaagagagaggtctgtgccacgtggtccctccaaccccaggaaatcagtgtc

SEQ ID NO: 20239 - DNA, 433 bp, Homo sapiens
  misc_feature 1..433: note = ENST00000578321
  source 1..433: mol_type = unassigned DNA
ctccctgttgtgccttgggggtgctgcgtggtgcagaggaccgagaagcccttcgccctcggcgtccgccgcgctcccgccccttcctggccggggtgacaggggaagggctagggctgcgcatcccgggtcagctggggcgccgcggcgcagtgcacctggaaggcccgggggcagcgcgcggtgcccgtgggtttcccggtggtgcggacctgcgggcgtgcggaagtaacgacctccttccccagtgcccatgcaaggaaattagtgttatgtgcttgctttttttttttttttttcctaaggaagtttgactctgaatatcttattttgctggagctccatttgccagcacgacagacccacgaagtcaagcatgcggagtgcagccaagccctggaacccagccatcagagcagggggccacggccca

SEQ ID NO: 20240 - DNA, 662 bp, Homo sapiens
  misc_feature 1..662: note = ENST00000582604
  source 1..662: mol_type = unassigned DNA
ggtaacgtgctgcggtcgcattccgcgctgctgaaggtttgtccttttgatgtttggaatgcgttcttattactgctcactctttgggtctgcactgtctatatgagctgcaacacacacctcgaaggtctgcagcttcactcctgaagctagcgagaccacgaactcaccaggaggaacgaacaactctagatgcgcccccttaagagctgtaacactcgccgcgaaggtctgcagcttcactcctgagtcagcgagactacgaacccaccagaaggaagaaactccgaacacatccaaacatcagaaggaacaaactccagacacaccgcctttaagaactgttacgctcaccgcgagggtccacggcttcattctccaagtcagaccaagaacccaccaattccggacacaaaaggtgttcccaccattcctgtcctcttacttctctcgccttacaagcgtagcgtgcctcctgtgattgttgaagagctgtggtgtgctgctgagtggcgtgtgtattccatgtgaggggaagggtccaacagtcctggtcattcagactgcagttccccaggacagacccacgaagtcaagcatgcggagtgcagccaagccctggaacccagccatcagagcagggggccacggcccagaccggg

SEQ ID NO: 20241 - DNA, 574 bp, Homo sapiens
  misc_feature 1..574: note = ENST00000413167
  source 1..574: mol_type = unassigned DNA
attgctcaagcgctctctgcccggccccctccgagtgtggttttcctcccaggccagcaccaaacccagaatagagtggctgacttgctgattgaggtcggcagctcccgagaagcaggagaagcagagtttttgcagacagacccacgaagtcaagcatgcggagtgcagccaagccctggaacccagccatcagagcagggggccacggcccagaccgggtgcggcctctgcctgcagcctcttccggcatgaagagttctaagtcttcaacttccttggcttttgagtcccgactcagcaggctcaagagggccagcagtgaggacacgctcaacaagccaggaagtaccgctgcatcgggggtggttcgcctgaagaagaccgccactgccggagccatctcggagctcacggagagccgcctgaggagcggcacaggggcctttacaacaactaaacggacaggcattccagccccacgggaattttcagtaactgtctcaagagagaggtctgtgccacgtggtccctccaaccccaggaaatcagtgtccagtccaacttcttccaa

SEQ ID NO: 20242 - DNA, 4971 bp, Homo sapiens
  misc_feature 1..4971: note = ENST00000395529
  source 1..4971: mol_type = unassigned DNA
aagaagcagaaaaggttggataaaagataaggacagacccacgaagtcaagcatgcggagtgcagccaagccctggaacccagccatcagagcagggggccacggcccagaccgggtgcggcctctgcctgcagcctcttccggcatgaagagttctaagtcttcaacttccttggcttttgagtcccgactcagcaggctcaagagggccagcagtgaggacacgctcaacaagccaggaagtaccgctgcatcgggggtggttcgcctgaagaagaccgccactgccggagccatctcggagctcacggagagccgcctgaggagcggcacaggggcctttacaacaactaaacggacaggcattccagccccacgggaattttcagtaactgtctcaagagagaggtctgtgccacgtggtccctccaaccccaggaaatcagtgtccagtccaacttcttccaacactcccactcctacgaaacacctgaggaccccttccacaaagcccaagcaagagaatgaaggtggagaaaaggctgcgcttgagtcccaagttcgggaacttttggcagaagccaaagcaaaagatagtgaaattaacaggcttcgaagtgaactaaagaaatacaaagagaaaaggactctgaacgctgaggggactgatgctttgggcccaaatgtcgatggaacatcagtctccccaggtgacacggaacctatgataagagctcttgaggagaagaacaagaactttcagaaagagctttccgatctagaggaagaaaaccgggtcctgaaggagaaactgatctatcttgagcactccccaaattcagaaggggcagcaagtcacactggcgacagcagctgcccaacatccataactcaagagtcaagcttcggaagcccaactggaaatcagatgtccagtgacattgatgagtataaaaaaaacatacatggaaatgcattacggacatcaggctcctcaagtagcgatgttaccaaagcttctttgtcgccagatgcttccgactttgagcacattacagcagagacaccctcaaggcccctgtcctccaccagtaacccctttaagagttcaaagtgttctactgctgggagttccccaaacagcgtaagtgaattgtccctggcttccctcacagagaagatacaaaagatggaagaaaaccaccatagcactgcagaagaactacaggctactctacaagaattatcagaccagcaacaaatggtacaggaattgacagctgaaaatgagaagctggtggatgaaaagacgattttagagacatcctttcatcagcatcgagagagggcagagcagctaagtcaagaaaatgagaagctgatgaatcttttacaagagcgagtaaagaatgaagagcccaccactcaggaaggaaaaattattgaactggagcagaagtgcacaggtattcttgaacagggccgctttgaaagagagaagctactcaacattcagcagcagttgacctgtagcttgcggaaggttgaggaagaaaaccaaggagctttagaaatgattaaacgtctgaaggaagaaaatgaaaaactgaatgagtttctagaactggaacggcataataataacatgatggccaaaactttggaagagtgtagagttaccttggaagggctaaaaatggagaatggatctttgaagtctcatttgcagggtgagaagcagaaagccacagaggccagtgctgtggagcagacggcagagagctgcgaagttcaagaaatgttgaaagtagcccgagcagagaaagatctactggaactgtcttgcaatgagctcagacaagaattactaaaggcaaacggtgaaattaaacatgtttccagtctgctggccaaggtggaaaaggattattcatacctgaaggagatatgtgatcaccaagccgaacagctgagcagaaccagcctaaagctgcaagaaaaagcatcagagagtgatgcagagatcaaagacatgaaagaaaccatatttgaattggaagatcaggtggaacagcaccgggctgtcaagttacacaataatcaactcatcagtgagctagaaagtagtgtgatcaagctggaggaacagaagtcagacctggagaggcagctgaagactctgaccaagcagatgaaggaggagaccgaggaatggaggcggttccaggcggatctgcagaccgcagtggtggtggccaatgacatcaagtgtgaggcccagcaggagctgcgcaccgtgaagaggaaactgctggaggaggaggagaagaatgcccggttgcagaaggagctgggggatgtgcagggccacggcagggtggtcaccagcagagccgcccctccctccctgggctctgtcagctagcagagcatttggtggaagaaagacagcccagctcttgccatgattgggagccgcagccatctctagatgaaagggggaatgtgtagaggagaaattgcctctttataaagagcccagttgtctccttgtgacattctctgtttctcagagtcattgccgtcgagtctctgctttttgtccacattttgggatcagcttactgcatgatcaaagatgatgtttccctctttttacttttcctcagaagattgagctgtcttttatttggagaataaaatgaagttctgaaaaaaacaaagtacaagtcttatgaaaagttatttgcagctggagtgctgaaaagggcacagtggcagagcagatgcagagctgggtacagcgcaggcccgagttcttttgttttttgttgttgttgttgttgttgttttgttttgttttttttttttttttgagacagagtttcactcttgttgcccaggctggagtgcaatggtacgatctcggctcactgcaacctctgcctcccgggttcaagtgattctcttgcctcagccttccaagtagctggaattacaggcgcctgccaccacacccagctaatttttgtattgttagtagagatggggtttcaccgtgttggccaggctgctcttgaactcctgacctcaggtgatccccacctcagcctcccaaagtgctgggattacagacatgagccaccgcacccagaacctaaggcccaagttctactttttggtgttcatttctctgcttccttttgatcgtggtgtctgatcatcttggaattcacattactcaaggcaaaataggaagccatctgcgtgatgtcacattccgaagaagtcagaaggttcggcgagttggagctttactcttgttgcccaggctagagtgcagtggtgcgatcttggctcattgcaagctccgcttcctgggtttaagctattctcctgccttggcctcccaagtagctgggattacaggcatgtgccgtcactcctggctaattttgtatttttagtagagatgcaatttcaccatgttggtcaggctggtctcgaactcctgacctcaagtgatctggccgcctcagcctcccaaagtgctgggattacaggcttgagaccccatgtctggccccttctgtggggtcttgattgagccccttcacttggagtctgacttcattacctcgtctgaaacaaggtgcctccaagctttgggttgatttccagaatcttgttgggttaaacataagtagaagtttgatcataaaggatgttattaagccggataggtaagcacggtgacaatggcaatagaaatctaatggaaaacgattgaatgacaactacaccaaagtttcatggatgaaactcaccccagaaacttagtgttcaaatcagagtgatacacaattcaaaatgtgattttaaacttctggaaatatgtgtgtttgtgaagatccaaatccaattcagcaacctccatcaggcagaaaccttctgcaatcctcacatgaggaactggttcacagtgtacacagcatggagccattagtgacgttatccaaaggatgagacaagacaaaagttactgtctaataaaaggaaaattaggaacaggaatgctctttaaactcaggaagatcttttggggtgtcaaactggacagcacagaatcattagaaaaattagcttggcgtgagaagagacattgaggtcttctctgtaaaatttacttagatacttgtgaataggactgaaatttatattttgggcactctttacctcagattcagagttcttaggattatttaaaattcatttgctggatgttttcaagtataaacaataagaaaactgcaacttcaacttaaaaggcactgctgtatttgcaccctatattttgacctgtcgttaggtactgttgaatatttttatctgtaagcatttatgaagtgcaaaataaacatgttattatatagaagcgtctgctgcttagttttaatcaccagctacgtttctgcagggcctttatgtcgttttgttctacatttttttctgaatacagtttcagaacttcaaagtcacatcaagtaactagaatttgaggtagaaaaaagctggatgtaagttgtaaataggaggttgacatggaatatgaacagtttcattagtagaacaaaagggcatggagtaaaaatgctaattttgcataaatttttaaaactctagggtctcagaaaatatagcatggacttaaagtctagatgtgttttgttgacatttaaatatgaatagattgatgatttaatgtattggattttttcttaattatgaagtattatttaggtatactaataacaaaatggagacgtgtgaagaaaaatattaatctttcttctccctcagtaccacctgtgaggaaatcagtgttaacagtgtgtacatttttctttactcatgaatatgtatagggttcattttcatatttttaataaaaattggattatattcttttca

SEQ ID NO: 20243 - DNA, 3948 bp, Homo sapiens
  misc_feature 1..3948: note = ENST00000261503
  source 1..3948: mol_type = unassigned DNA
agaagcagaaaaggttggataaaagataaggacagacccacgaagtcaagcatgcggagtgcagccaagccctggaacccagccatcagagcagggggccacggcccagaccgggtgcggcctctgcctgcagcctcttccggcatgaagagttctaagtcttcaacttccttggcttttgagtcccgactcagcaggctcaagagggccagcagtgaggacacgctcaacaagccaggaagtaccgctgcatcgggggtggttcgcctgaagaagaccgccactgccggagccatctcggagctcacggagagccgcctgaggagcggcacaggggcctttacaacaactaaacggacaggcattccagccccacgggaattttcagtaactgtctcaagagagaggtctgtgccacgtggtccctccaaccccaggaaatcagtgtccagtccaacttcttccaacactcccactcctacgaaacacctgaggaccccttccacaaagcccaagcaagagaatgaaggtggagaaaaggctgcgcttgagtcccaagttcgggaacttttggcagaagccaaagcaaaagatagtgaaattaacaggcttcgaagtgaactaaagaaatacaaagagaaaaggactctgaacgctgaggggactgatgctttgggcccaaatgtcgatggaacatcagtctccccaggtgacacggaacctatgataagagctcttgaggagaagaacaagaactttcagaaagagctttccgatctagaggaagaaaaccgggtcctgaaggagaaactgatctatcttgagcactccccaaattcagaaggggcagcaagtcacactggcgacagcagctgcccaacatccataactcaagagtcaagcttcggaagcccaactggaaatcagatgtccagtgacattgatgagtataaaaaaaacatacatggaaatgcattacggacatcaggctcctcaagtagcgatgttaccaaagcttctttgtcgccagatgcttccgactttgagcacattacagcagagacaccctcaaggcccctgtcctccaccagtaacccctttaagagttcaaagtgttctactgctgggagttccccaaacagcgtaagtgaattgtccctggcttccctcacagagaagatacaaaagatggaagaaaaccaccatagcactgcagaagaactacaggctactctacaagaattatcagaccagcaacaaatggtacaggaattgacagctgaaaatgagaagctggtggatgaaaagacgattttagagacatcctttcatcagcatcgagagagggcagagcagctaagtcaagaaaatgagaagctgatgaatcttttacaagagcgagtaaagaatgaagagcccaccactcaggaaggaaaaattattgaactggagcagaagtgcacaggtattcttgaacagggccgctttgaaagagagaagctactcaacattcagcagcagttgacctgtagcttgcggaaggttgaggaagaaaaccaaggagctttagaaatgattaaacgtctgaaggaagaaaatgaaaaactgaatgagtttctagaactggaacggcataataataacatgatggccaaaactttggaagagtgtagagttaccttggaagggctaaaaatggagaatggatctttgaagtctcatttgcagggtgagaagcagaaagccacagaggccagtgctgtggagcagacggcagagagctgcgaagttcaagaaatgttgaaagtagcccgagcagagaaagatctactggaactgtcttgcaatgagctcagacaagaattactaaaggcaaacggtgaaattaaacatgtttccagtctgctggccaaggtggaaaaggattattcatacctgaaggagatatgtgatcaccaagccgaacagctgagcagaaccagcctaaagctgcaagaaaaagcatcagagagtgatgcagagatcaaagacatgaaagaaaccatatttgaattggaagatcaggtggaacagcaccgggctgtcaagttacacaataatcaactcatcagtgagctagaaagtagtgtgatcaagctggaggaacagaagtcagacctggagaggcagctgaagactctgaccaagcagatgaaggaggagaccgaggaatggaggcggttccaggcggatctgcagaccgcagtggtggtggccaatgacatcaagtgtgaggcccagcaggagctgcgcaccgtgaagaggaaactgctggaggaggaggagaagaatgcccggttgcagaaggagctgggggatgtgcagggccacggcagggtggtcaccagcagagccgcccctccacctgtggatgaagagccagagtcctctgaggtcgatgctgctggtcggtggcctggtgtctgtgttagcagaacatctccaacacccccagagtcggcaaccaccgttaagtcacttatcaagtcatttgacttgggacgcccaggtggagctggacagaatatttctgtccataagacccccagaagtcccctaagtgggataccagtgaggactgctccagcagctgctgtctctccaatgcagaggcattcgacttacagcagtgtgcggccagccagcagaggggtgactcaacgcttggaccttcctgaccttcccctctcagatattctaaagggaaggactgagaccctgaagccagacccccacctccgcaagagtccctcactagagtcactgagcagacccccgtctctgggctttggggacacaagactgctgagtgcttccacccgggcatggaaaccacaaagcaaactcagtgtggaaagaaaagaccctctggcagccttggcccgggaatacggtggttccaagcgcaatgctctactgaaatggtgccagaagaagacacaaggttatgcgaacattgacatcaccaatttcagcagcagctggagcgatggcctggccttctgtgctctgctccacacctacctgcctgcccacatcccctaccaggagctgaatagtcaggagaaaaagaggaatctcttgttggcatttgaagcggctgaaagtgtaggcatcaaacccagcctggaactcagcgagatgctgtacacagaccggcccgactggcagagtgtgatgcagtacgtggcccaaatctacaagtactttgagacgtaaccctggagggcctggggcagccaccattgccacctactgcagcttttcctggaagcgcctgattactgtccactgaccctgctctgcccaccacccagctgcctagacttcaaagacaggctcaatccaagtggaccaacacccaaataagaaacagagtgggtcccacgatgtacctgtctgaaatgcaaatgcagctggactgtaaattggggactctttgatctcttgtgggatgcttctaaagagggcagcctccctccttccagaccaagaccccacacccaggcttgttttgctgattatattgggtggctgaacgaacacattatctgcagaaattcagacaaagaacatctccaaatcagtcttttggttgctgttgttaaaaatatcccggctttgcctttatgaaacctttgcccttggctgggtgtggtagctcgtggctgtaatcccagcactttaggaagccaaggcagtaggatcgtttgagcccaggagttcgaggctgcagtgagctatgagcataccactgcactccagcctgtgtgaaagagccagaccctgtctcaaaaaaatgataaaacccaaaactttgcccttgtgaaccctcccttcccccctccccccccaaaaaaaaacaacaaaacacaaaaaataaacatttgttccagggcaacctggaaa

SEQ ID NO: 20244 - DNA, 674 bp, Homo sapiens
  misc_feature 1..674: note = ENST00000581973
  source 1..674: mol_type = unassigned DNA
tgtgagagtggcagttagaattggttgtcacttgtgggtgttttgtaaagtgcatttctgatgttctttgaaaggacagaacatcatgggtttggtgccctgtgtcacaccctgagtccatggggacaggcggagtcagggttggggctggaagagaaccgagagggcatttaatccagtcctgttatgttattgacagaagaaacagaggctctgagagggtgagggatggaccaggccgctccttgctcaggaatcacagtgccggtccctgctggccagtctcgggctgccttccacatctctgtgtggattttcccctgatgtcttcagctgtatcttgctggacagacccacgaagtcaagcatgcggagtgcagccaagccctggaacccagccatcagagcagggggccacggcccagaccgggtgcggcctctgcctgcagcctcttccggcatgaagagttctaagtcttcaacttccttggcttttgagtcccgactcagcaggctcaagagggccagcagtgaggacacgctcaacaagccaggaagtaccgctgcatcgggggtggttcgcctgaagaagaccgccactgccggagccatctcggagctcacggagagccgcctgaggagcggcacaggggcctttacaacaactaaacgga

SEQ ID NO: 20245 - DNA, 462 bp, Homo sapiens
  misc_feature 1..462: note = ENST00000580934
  source 1..462: mol_type = unassigned DNA
gtgagagtggcagttagaattggttgtcacttgtgggtgttttgtaaagtgcatttctgatgttctttgaaaggacagaacatcatgggtttggtgccctgtgtcacaccctgagtccatggggacaggcggagtcagggttggggctggaagagaaccgagagggcatttaatccagtcctgttatgttattgacagaagaaacagaggctctgagagggacagacccacgaagtcaagcatgcggagtgcagccaagccctggaacccagccatcagagcagggggccacggcccagaccgggtgcggcctctgcctgcagcctcttccggcatgaagagttctaagtcttcaacttccttggcttttgagtcccgactcagcaggctcaagagggccagcagtgaggacacgctcaacaagccaggaagtaccgctgcatcgggggtggttcgcctgaa

SEQ ID NO: 20246 - DNA, 580 bp, Homo sapiens
  misc_feature 1..580: note = ENST00000582063
  source 1..580: mol_type = unassigned DNA
tgcacgagatagaaccagtcataccactaatggtttttttagtcctaaatatttttactgcaagatttcgttgttctaagtgttttcactgtcagatgaaggatgaaagtcgttcagggtaatttccattttagtaatttccgacagcggcagaacagtttctacttacgattggggcctttacaacaactaaacggacaggcattccagccccacgggaattttcagtaactgtctcaagagagaggtctgtgccacgtggtccctccaaccccaggaaatcagtgtccagtccaacttcttccaacactcccactcctacgaaacacctgaggaccccttccacaaagcccaagcaagagaatgaaggtggagaaaaggctgcgcttgagtcccaagttcgggaacttttggcagaagccaaagcaaaagatagtgaaattaacaggcttcgaagtgaactaaagaaatacaaagagaaaaggactctgaacgctgaggggactgatgctttgggcccaaatgtcgatggaacatcagtctccccaggtgacacggaacctatgataagagctcttga

SEQ ID NO: 20247 - DNA, 461 bp, Homo sapiens
  misc_feature 1..461: note = ENST00000579688
  source 1..461: mol_type = unassigned DNA
gcagtggggtttttccagcctaccttgtgcagctgcggttctcagcatccgcgggcggaggcctgcagccggtcagccggtgcgtcccgcccacggcgcggggccttctggcagccaagaaggaaatacagatgaggggcctttacaacaactaaacggacaggcattccagccccacgggaattttcagtaactgtctcaagagagaggtctgtgccacgtggtccctccaaccccaggaaatcagtgtccagtccaacttcttccaacactcccactcctacgaaacacctgaggaccccttccacaaagcccaagcaagagaatgaaggtggagaaaaggctgcgcttgagtcccaagttcgggaacttttggcagaagccaaagcaaaagatagtgaaattaacaggcttcgaagtgaactaaagaaatacaaagagaaaaggactctgaacgctga

SEQ ID NO: 20248 - DNA, 8133 bp, Homo sapiens
  misc_feature 1..8133: note = ENST00000395530
  source 1..8133: mol_type = unassigned DNA
gatgcagatgagggggcggggcccacgggcgcgggagagcagcggctccgccggcagctgctgggaactggaaggcgcccggtcctttctttgactggagcggacccgccggacgcaaccgcctcgccagccggagccagcgcgagctcggcacggtggacacccggtccgaggccggcaagccggctggtgcccgagtcggccaagcatgggcaaccactcaggacggcccgaggatccggaaccaggggcctttacaacaactaaacggacaggcattccagccccacgggaattttcagtaactgtctcaagagagaggtctgtgccacgtggtccctccaaccccaggaaatcagtgtccagtccaacttcttccaacactcccactcctacgaaacacctgaggaccccttccacaaagcccaagcaagagaatgaaggtggagaaaaggctgcgcttgagtcccaagttcgggaacttttggcagaagccaaagcaaaagatagtgaaattaacaggcttcgaagtgaactaaagaaatacaaagagaaaaggactctgaacgctgaggggactgatgctttgggcccaaatgtcgatggaacatcagtctccccaggtgacacggaacctatgataagagctcttgaggagaagaacaagaactttcagaaagagctttccgatctagaggaagaaaaccgggtcctgaaggagaaactgatctatcttgagcactccccaaattcagaaggggcagcaagtcacactggcgacagcagctgcccaacatccataactcaagagtcaagcttcggaagcccaactggaaatcagatgtccagtgacattgatgagtataaaaaaaacatacatggaaatgcattacggacatcaggctcctcaagtagcgatgttaccaaagcttctttgtcgccagatgcttccgactttgagcacattacagcagagacaccctcaaggcccctgtcctccaccagtaacccctttaagagttcaaagtgttctactgctgggagttccccaaacagcgtaagtgaattgtccctggcttccctcacagagaagatacaaaagatggaagaaaaccaccatagcactgcagaagaactacaggctactctacaagaattatcagaccagcaacaaatggtacaggaattgacagctgaaaatgagaagctggtggatgaaaagacgattttagagacatcctttcatcagcatcgagagagggcagagcagctaagtcaagaaaatgagaagctgatgaatcttttacaagagcgagtaaagaatgaagagcccaccactcaggaaggaaaaattattgaactggagcagaagtgcacaggtattcttgaacagggccgctttgaaagagagaagctactcaacattcagcagcagttgacctgtagcttgcggaaggttgaggaagaaaaccaaggagctttagaaatgattaaacgtctgaaggaagaaaatgaaaaactgaatgagtttctagaactggaacggcataataataacatgatggccaaaactttggaagagtgtagagttaccttggaagggctaaaaatggagaatggatctttgaagtctcatttgcagggtgagaagcagaaagccacagaggccagtgctgtggagcagacggcagagagctgcgaagttcaagaaatgttgaaagtagcccgagcagagaaagatctactggaactgtcttgcaatgagctcagacaagaattactaaaggcaaacggtgaaattaaacatgtttccagtctgctggccaaggtggaaaaggattattcatacctgaaggagatatgtgatcaccaagccgaacagctgagcagaaccagcctaaagctgcaagaaaaagcatcagagagtgatgcagagatcaaagacatgaaagaaaccatatttgaattggaagatcaggtggaacagcaccgggctgtcaagttacacaataatcaactcatcagtgagctagaaagtagtgtgatcaagctggaggaacagaagtcagacctggagaggcagctgaagactctgaccaagcagatgaaggaggagaccgaggaatggaggcggttccaggcggatctgcagaccgcagtggtggtggccaatgacatcaagtgtgaggcccagcaggagctgcgcaccgtgaagaggaaactgctggaggaggaggagaagaatgcccggttgcagaaggagctgggggatgtgcagggccacggcagggtggtcaccagcagagccgcccctccacctgtggatgaagagccagagtcctctgaggtcgatgctgctggtcggtggcctggtgtctgtgttagcagaacatctccaacacccccagagtcggcaaccaccgttaagtcacttatcaagtcatttgacttgggacgcccaggtggagctggacagaatatttctgtccataagacccccagaagtcccctaagtgggataccagtgaggactgctccagcagctgctgtctctccaatgcagaggcattcgacttacagcagtgtgcggccagccagcagaggggtgactcaacgcttggaccttcctgaccttcccctctcagatattctaaagggaaggactgagaccctgaagccagacccccacctccgcaagagtccctcactagagtcactgagcagacccccgtctctgggctttggggacacaagactgctgagtgcttccacccgggcatggaaaccacaaagcaaactcagtgtggaaagaaaagaccctctggcagccttggcccgggaatacggtggttccaagcgcaatgctctactgaaatggtgccagaagaagacacaaggttatgcgaacattgacatcaccaatttcagcagcagctggagcgatggcctggccttctgtgctctgctccacacctacctgcctgcccacatcccctaccaggagctgaatagtcaggagaaaaagaggaatctcttgttggcatttgaagcggctgaaagtgtaggcatcaaacccagcctggaactcagcgagatgctgtacacagaccggcccgactggcagagtgtgatgcagtacgtggcccaaatctacaagtactttgagacgtaaccctggagggcctggggcagccaccattgccacctactgcagcttttcctggaagcgcctgattactgtccactgaccctgctctgcccaccacccagctgcctagacttcaaagacaggctcaatccaagtggaccaacacccaaataagaaacagagtgggtcccacgatgtacctgtctgaaatgcaaatgcagctggactgtaaattggggactctttgatctcttgtgggatgcttctaaagagggcagcctccctccttccagaccaagaccccacacccaggcttgttttgctgattatattgggtggctgaacgaacacattatctgcagaaattcagacaaagaacatctccaaatcagtcttttggttgctgttgttaaaaatatcccggctttgcctttatgaaacctttgcccttggctgggtgtggtagctcgtggctgtaatcccagcactttaggaagccaaggcagtaggatcgtttgagcccaggagttcgaggctgcagtgagctatgagcataccactgcactccagcctgtgtgaaagagccagaccctgtctcaaaaaaatgataaaacccaaaactttgcccttgtgaaccctcccttcccccctccccccccaaaaaaaaacaacaaaacacaaaaaataaacatttgttccagggcaacctggaaacgtgcgtgcgcactcagccttttggggaaaaatgggagttctaggtaacaatgttaacacctggaacttgattcacttttagctctcaccatcccttatttgatttattgtagcaaaaggaaagcctgtgagaatgcaagggagcccctggctgctttgctggagtccctgggaggtgccccacacctctgccaccaaagtctgtgtgctcctgagcagctcgcggctttcacagtagggaaaccgcagtcctcgtcacctgcgcctttgtcctcccattcgtttaccctcccgttcacatccacacaggcttgtaccccacagaacttgacaggaggtcacatgtgtgaatggcctgtgtctgctttacagggttgagcaggctgagggtgtgtgcctctggggatgctgggctgacagcaaatcccaacagtatttcggctctggactgatttggcctttagtgcttccccaggcctctttcatcggcatgggaaaagcccttaggggtgggcggtgagggcacatttataactaacaaagaagaatgcagttgccccagcatcctactggtcaccttaagtggcagcagagccctccccagcggtgccccagtccctcagaagtgctcagtccggcccgagtgcccatctggtggctctgccgtgttcttctgggcggatctgtgtgcactacacagcgagtgagggcgtggctcacacagttgtttgagggaaatgggtaatgcccatcccttgctgttttaagtgccaaatagcgtgttagcgcccctccaacaaaggatcatccttccagtgagtcaccgagaatgacagtgactgccattactattcaaagtacatctctgattgctgatctgagccactggttcagagccaggttctagaggctgcaggtccagccccttaccattcctggagaggtaggagctcagtcccttcctccaagccagacctttgcagaggtggcaactgggctgcacgggtcagcagatccctgattctcaagccaccttgagacaagaactccgcccccctgttagtgcatcccagctgcagctctgcatcagaacctacagtggacccttttgaaaacactcttggctgccctagttggttaacttcagaatgtctggaatgggaccagagatgcagttcacatgttttgtaagttctttaggcgactgaagcacagctgcttggagaaccactgaggggtggacaccttcccctggcagccacaaggcaggcagcctgcgggagctcctgagcagctgttgggcgatggtcattacatcacccatgcctttgtatttaaatgaaactcgacacatagaaccaattcaacctgaaagttactacttctgctgattcaggcacttgtttgaagcattttttttttattaaccctgtacttcttctttgcccaccattaaagtgggggaaagtaatatcccaagtagttgagttgagctgttggttgttagatttaagctggaattagtccagggttttatgtggggaggcagttgctgtcttgggatacccggagtgggagtgggtgttttctgtgattggttctgttttttatttttacttatttattttgagatggagtttcatccttattgcccaggctggagggcaatagcaccgtctcagctcactgcaacctccgccgcccgtgtttaagcgattctcctgcctcagcctcccatgtggctgggattacaggtgcccatcaccacacccagctaatgtttttgtatttttagtaaagagggggtttcaccatgttggcccggctggtctcgaactcctgatggcaaggtgatctgcctgcctcagcctcccaaagtgctgggattacaggcatgagccactgagcccggctgtttttttgtgttttttttgttgttgtttgtttgtttttttttttgagacagagtcttgctctgtcgcccaggctggagtgccagtggcgcgatttcagctcactcaggagtgagccaccacacctggcctgtgattggctctattttgagtgattacgtgtaaatcatctagaaccagctctgagcaatggcgttgcggtgtccctccctccccgctggggccataccagcccctctccactgggagcccaagttgccaatgactgtggccaaactcccccatttttgtctgtatcctgctctctttaggttaaaaagaaggaaagaaacatgaaaggccatgtacaatttatttttacaactccaggagtttccccgactaccattttttttttttttatttgccagtggtgtgcatgtagaagaggaatgccatgtcctgtccatagaaatacacatggtggtcaggcatggtggctcatgcctataatcccagcactttgggaggctgaggtgggaggattgcttgagcccaggagtttgagaccagcctgggcaacatggcaagacctctgactctataaaaaaatttttttttttttttttttttgagagagcgtctcacttctctgtcacccaggctagagtagtgtgatcttggcttattacaacttccgcctcccaggttcaagagattctcctgccttagcctcctaagtagctgggattataggcacatgccaccatgcctggcatatttttgtatttttagtagaaacagtttcaccatgttggccaggctggtcttgaactcctgacctcaagtgataagcctgcctcaacctcccaaagtgctgggactacaggggtaagccaccgcgcctggcccaaaattttgttttttaattagctgggtacaatgataggcacctgtaatctcagctgcttgggaggctgaggtgggagcatcacttgagcccaggagtttgaggctgcagtaagctgtgtttgtgccactgcactctggcctgggccaaagagcaagaccctgtcacacacacacacaaaaaaaagaaatacaggtggtgttttggggaagggaaggttctgctggggtcctggaactgtgactgatggcctcaggagtccaggaataggccttctagcacagcagctagtagggctcccccaagccatccgctggcgtgtggaggtgcaggacctgggggaggcagtccccaacccagctaggccaaggggtagggtttttaggtctgtttttaacagagctcagagcaccaggtgaaggtggaaagttggcaggaaaacaaggtcagcatcttattttttctatactcagcagagtgtgccattcccagtttctgtcctgaggatttcaaagaccacaacagccacatttctttccatcttccctcagccagtagtcatttaaaattcttcagttgttctgaagatcctttttttaatgtatcatttttacatgaaagacagctgcaaaatgcaagccccagtagagttggagagtttttcaaggtgagaagtcgctgttctctgcattgaacatggattgaattttccttgtctgatggtaacccatggcccccgccctgcggggataacattctcaggagcttctcttgtcctagccccttctcatttcaaaaatattagtcttttattttcctttttcattcagtttttgttttacagcttttgtagagaccaacccaagtagatgcaggtgggtgttagataaaaacacacatccccaggggacaagccatccagcggtgaggaatctctgccatgttctcttccctgctgcccacaaacgttacggagactcccttagcctccccctcctcttccccactgaggggcagcttgtggagatggaggactcgggcccatagatgcagaccccctaccaaatctagcaatagttctcacccttccaaagctcgagtgccattttgagatgacctaccaatgacatgcagtaaaggacataacctcacagcctttttagaagcatttcgaatatctacagttgcctcaattcacggggcatttcactcctctgatccaggttagaattttgctaaatctgtagcatcctgaatagcacactaatttttttttttagcacactaactttaactacattagttgagtgtagttgatacatctgtggcctcgtgtctataaagagcacactagattgtacccagcacttttggatatgacatgctaattagatgtatttaactattcataggaaagtgtatgataaatgactgtaatatttctaataaatatattttgtttctaatta

SEQ ID NO: 20249 - DNA, 731 bp, Homo sapiens
  misc_feature 1..731: note = ENST00000467722
  source 1..731: mol_type = unassigned DNA
agatgagggggcggggcccacgggcgcgggagagcagcggctccgccggcagctgctgggaactggaaggcgcccggtcctttctttgactggagcggacccgccggacgcaaccgcctcgccagccggagccagcgcgagctcggcacggtggacacccggtccgaggccggcaagccggctggtgcccgagtcggccaagcatgggcaaccactcaggacggcccgaggatccggaaccaggtggaaaaggattattcatacctgaaggagatatgtgatcaccaagccgaacagctgagcagaaccagcctaaagctgcaagaaaaagcatcagagagtgatgcagagatcaaagacatgaaagaaaccatatttgaattggaagatcaggtggaacagcaccgggctgtcaagttacacaataatcaactcatcagtgagctagaaagtagtgtgatcaagctggaggaacagaagtcagacctggagaggcagctgaagactctgaccaagcagatgaaggaggagaccgaggaatggaggcggttccaggcggatctgcagaccgcagtggtggtggccaatgacatcaagtgtgaggcccagcaggagctgcgcaccgtgaagaggaaactgctggaggaggaggagaagaatgcccggttgcagaaggagctgggggatgtgcagggccacggcagggtggtcaccagcagagccgcccctcc

SEQ ID NO: 20250 - DNA, 2982 bp, Homo sapiens
  misc_feature 1..2982: note = ENST00000395522
  source 1..2982: mol_type = unassigned DNA
ctggagcggacccgccggacgcaaccgcctcgccagccggagccagcgcgagctcggcacggtggacacccggtccgaggccggcaagccggctggtgcccgagtcggccaagcatgggcaaccactcaggacggcccgaggatccggaaccaggggcctttacaacaactaaacggacaggcattccagccccacgggaattttcagtaactgtctcaagagagaggtctgtgccacgtggtccctccaaccccaggaaatcagtgtccagtccaacttcttccaacactcccactcctacgaaacacctgaggaccccttccacaaagcccaagcaagagaatgaaggtggagaaaaggctgcgcttgagtcccaagttcgggaacttttggcagaagccaaagcaaaagatagtgaaattaacaggcttcgaagtgaactaaagaaatacaaagagaaaaggactctgaacgctgaggggactgatgctttgggcccaaatgtcgatggaacatcagtctccccaggtgacacggaacctatgataagagctcttgaggagaagaacaagaactttcagaaagagctttccgatctagaggaagaaaaccgggtcctgaaggagaaactgatctatcttgagcactccccaaattcagaaggggcagcaagtcacactggcgacagcagctgcccaacatccataactcaagagtcaagcttcggaagcccaactggaaatcagatgtccagtgacattgatgagtataaaaaaaacatacatggaaatgcattacggacatcaggctcctcaagtagcgatgttaccaaagcttctttgtcgccagatgcttccgactttgagcacattacagcagagacaccctcaaggcccctgtcctccaccagtaacccctttaagagttcaaagtgttctactgctgggagttccccaaacagcgtaagtgaattgtccctggcttccctcacagagaagatacaaaagatggaagaaaaccaccatagcactgcagaagaactacaggctactctacaagaattatcagaccagcaacaaatggtacaggaattgacagctgaaaatgagaagctggtggatgaaaagacgattttagagacatcctttcatcagcatcgagagagggcagagcagctaagtcaagaaaatgagaagctgatgaatcttttacaagagcgagtaaagaatgaagagcccaccactcaggaaggaaaaattattgaactggagcagaagtgcacaggtattcttgaacagggccgctttgaaagagagaagctactcaacattcagcagcagttgacctgtagcttgcggaaggttgaggaagaaaaccaaggagctttagaaatgattaaacgtctgaaggaagaaaatgaaaaactgaatgagtttctagaactggaacggcataataataacatgatggccaaaactttggaagagtgtagagttaccttggaagggctaaaaatggagaatggatctttgaagtctcatttgcagggtgagaagcagaaagccacagaggccagtgctgtggagcagacggcagagagctgcgaagttcaagaaatgttgaaagtagcccgagcagagaaagatctactggaactgtcttgcaatgagctcagacaagaattactaaaggcaaacggtgaaattaaacatgtttccagtctgctggccaaggtggaaaaggattattcatacctgaaggagatatgtgatcaccaagccgaacagctgagcagaaccagcctaaagctgcaagaaaaagcatcagagagtgatgcagagatcaaagacatgaaagaaaccatatttgaattggaagatcaggtggaacagcaccgggctgtcaagttacacaataatcaactcatcagtgagctagaaagtagtgtgatcaagctggaggaacagaagtcagacctggagaggcagctgaagactctgaccaagcagatgaaggaggagaccgaggaatggaggcggttccaggcggatctgcagaccgcagtggtggtggccaatgacatcaagtgtgaggcccagcaggagctgcgcaccgtgaagaggaaactgctggaggaggaggagaagaatgcccggttgcagaaggagctgggggatgtgcagggccacggcagggtggtcaccagcagagccgcccctccgtgagtctgctccctgggctctgtcagctagcagagcatttggtggaagaaagacagcccagctcttgccatgattgggagccgcagccatctctagatgaaagggggaatgtgtagaggagaaattgcctctttataaagagcccagttgtctccttgtgacattctctgtttctcagagtcattgccgtcgagtctctgctttttgtccacattttgggatcagcttactgcatgatcaaagatgatgtttccctctttttacttttcctcagaagattgagctgtcttttatttggagaataaaatgaagttctgaaaaaaacaaagtacaagtcttatgaaaagttatttgcagctggagtgctgaaaagggcacagtggcagagcagatgcagagctgggtacagcgcaggcccgagttcttttgttttttgttgttgttgttgttgttgttttgttttgttttttttttttttttgagacagagtttcactcttgttgcccaggctggagtgcaatggtacgatctcggctcactgcaacctctgcctcccgggttcaagtgattctcttgcctcagccttccaagtagctggaattacaggcgcctgccaccacacccagctaatttttgtattgttagtagagatggggtttcaccgtgttggccaggctgctcttgaactcctgacctcaggtgatccccacctcagcctcccaaagtgctgggattacagacatgagccaccgcacccag

SEQ ID NO: 20251 - DNA, 2536 bp, Homo sapiens
  misc_feature 1..2536: note = ENST00000395525
  source 1..2536: mol_type = unassigned DNA
cggacccgccggacgcaaccgcctcgccagccggagccagcgcgagctcggcacggtggacacccggtccgaggccggcaagccggctggtgcccgagtcggccaagcatgggcaaccactcaggacggcccgaggatccggaaccaggggcctttacaacaactaaacggacaggcattccagccccacgggaattttcagtaactgtctcaagagagaggtctgtgccacgtggtccctccaaccccaggaaatcagtgtccagtccaacttcttccaacactcccactcctacgaaacacctgaggaccccttccacaaagcccaagcaagagaatgaaggtggagaaaaggctgcgcttgagtcccaagttcgggaacttttggcagaagccaaagcaaaagatagtgaaattaacaggcttcgaagtgaactaaagaaatacaaagagaaaaggactctgaacgctgaggggactgatgctttgggcccaaatgtcgatggaacatcagtctccccaggtgacacggaacctatgataagagctcttgaggagaagaacaagaactttcagaaagagctttccgatctagaggaagaaaaccgggtcctgaaggagaaactgatctatcttgagcactccccaaattcagaaggggcagcaagtcacactggcgacagcagctgcccaacatccataactcaagagtcaagcttcggaagcccaactggaaatcagatgtccagtgacattgatgagtataaaaaaaacatacatggaaatgcattacggacatcaggctcctcaagtagcgatgttaccaaagcttctttgtcgccagatgcttccgactttgagcacattacagcagagacaccctcaaggcccctgtcctccaccagtaacccctttaagagttcaaagtgttctactgctgggagttccccaaacagcgtaagtgaattgtccctggcttccctcacagagaagatacaaaagatggaagaaaaccaccatagcactgcagaagaactacaggctactctacaagaattatcagaccagcaacaaatggtacaggaattgacagctgaaaatgagaagctggtggatgaaaagacgattttagagacatcctttcatcagcatcgagagagggcagagcagctaagtcaagaaaatgagaagctgatgaatcttttacaagagcgagtaaagaatgaagagcccaccactcaggaaggaaaaattattgaactggagcagaagtgcacaggtattcttgaacagggccgctttgaaagagagaagctactcaacattcagcagcagttgacctgtagcttgcggaaggttgaggaagaaaaccaaggagctttagaaatgattaaacgtctgaaggaagaaaatgaaaaactgaatgagtttctagaactggaacggcataataataacatgatggccaaaactttggaagagtgtagagttaccttggaagggctaaaaatggagaatggatctttgaagtctcatttgcagggtgagaagcagaaagccacagaggccagtgctgtggagcagacggcagagagctgcgaagttcaagaaatgttgaaagtagcccgagcagagaaagatctactggaactgtcttgcaatgagctcagacaagaattactaaaggcaaacggtgaaattaaacatgtttccagtctgctggccaaggtggaaaaggattattcatacctgaaggagatatgtgatcaccaagccgaacagctgagcagaaccagcctaaagctgcaagaaaaagcatcagagagtgatgcagagatcaaagacatgaaagaaaccatatttgaattggaagatcaggtggaacagcaccgggctgtcaagttacacaataatcaactcatcagtgagctagaaagtagtgtgatcaagctggaggaacagaagtcagacctggagaggcagctgaagactctgaccaagcagatgaaggaggagaccgaggaatggaggcggttccaggcggatctgcagaccgcagtggtggtggccaatgacatcaagtgtgaggcccagcaggagctgcgcaccgtgaagaggaaactgctggaggaggaggagaagaatgcccggttgcagaaggagctgggggatgtgcagggccacggcagggtggtcaccagcagagccgcccctccctccctgggctctgtcagctagcagagcatttggtggaagaaagacagcccagctcttgccatgattgggagccgcagccatctctagatgaaagggggaatgtgtagaggagaaattgcctctttataaagagcccagttgtctccttgtgacattctctgtttctcagagtcattgccgtcgagtctctgctttttgtccacattttgggatcagcttactgcatgatcaaagatgatgtttccctctttttacttttcctcagaagattgagctgtcttttatttggagaataaaatgaagttctgaaaaaaacaaa

SEQ ID NO: 20252 - DNA, 2249 bp, Homo sapiens
  misc_feature 1..2249: note = ENST00000581399
  source 1..2249: mol_type = unassigned DNA
ggaaggttgaggaagaaaaccaaggagctttagaaatgattaaacgtctgaaggaagaaaatgaaaaactgaatgagtttctagaactggaacggcataataataacatgatggccaaaactttggaagagtgtagagttaccttggaagggctaaaaatggagaatggatctttgaagtctcatttgcagggtgagaagcagaaagccacagaggccagtgctgtggagcagacggcagagagctgcgaagttcaagaaatgttgaaagtagcccgagcagagaaagatctactggaactgtcttgcaatgagctcagacaagaattactaaaggcaaacggtgaaattaaacatgtttccagtctgctggccaaggtggaaaaggattattcatacctgaaggagatatgtgatcaccaagccgaacagctgagcagaaccagcctaaagctgcaagaaaaagcatcagagagtgatgcagagatcaaagacatgaaagaaaccatatttgaattggaagatcaggtggaacagcaccgggctgtcaagttacacaataatcaactcatcagtgagctagaaagtagtgtgatcaagctggaggaacagaagtcagacctggagaggcagctgaagactctgaccaagcagatgaaggaggagaccgaggaatggaggcggttccaggcggatctgcagaccgcagtggtggtggccaatgacatcaagtgtgaggcccagcaggagctgcgcaccgtgaagaggaaactgctggaggaggaggagaagaatgcccggttgcagaaggagctgggggatgtgcagggccacggcagggtggtcaccagcagagccgcccctccacctgtggatgaagagccagagtcctctgaggtcgatgctgctggtcggtggcctggtgtctgtgttagcagaacatctccaacacccccagagtcggcaaccaccgttaagtcacttatcaagtcatttgacttgggacgcccaggtggagctggacagaatatttctgtccataagacccccagaagtcccctaagtgggataccagtgaggactgctccagcagctgctgtctctccaatgcagaggcattcgacttacagcagtgtgcggccagccagcagaggggtgactcaacgcttggaccttcctgaccttcccctctcagatattctaaagggaaggactgagaccctgaagccagacccccacctccgcaagagtccctcactagagtcactgagcagacccccgtctctgggctttggggacacaagactgctgagtgcttccacccgggcatggaaaccacaaagcaaactcagtgtggaaagaaaagaccctctggcagccttggcccgggaatacggtggttccaagcgcaatgctctactgaaatggtgccagaagaagacacaaggttatgcgaagaggaatctcttgttggcatttgaagcggctgaaagtgtaggcatcaaacccagcctggaactcagcgagatgctgtacacagaccggcccgactggcagagtgtgatgcagtacgtggcccaaatctacaagtactttgagacgtaaccctggagggcctggggcagccaccattgccacctactgcagcttttcctggaagcgcctgattactgtccactgaccctgctctgcccaccacccagctgcctagacttcaaagacaggctcaatccaagtggaccaacacccaaataagaaacagagtgggtcccacgatgtacctgtctgaaatgcaaatgcagctggactgtaaattggggactctttgatctcttgtgggatgcttctaaagagggcagcctccctccttccagaccaagaccccacacccaggcttgttttgctgattatattgggtggctgaacgaacacattatctgcagaaattcagacaaagaacatctccaaatcagtcttttggttgctgttgttaaaaatatcccggctttgcctttatgaaacctttgcccttggctgggtgtggtagctcgtggctgtaatcccagcactttaggaagccaaggcagtaggatcgtttgagcccaggagttcgaggctgcagtgagctatgagcataccactgcactccagcctgtgtgaaagagccagaccctgtctcaaaaaaatgataaaacccaaaactttgcccttgtgaaccctcccttcccccctccccccccaaaaaaaaac

SEQ ID NO: 20253 - DNA, 732 bp, Homo sapiens
  misc_feature 1..732: note = ENST00000582226
  source 1..732: mol_type = unassigned DNA
aagccacagaggccagtgctgtggagcagacggcagagagctgcgaagttcaagaaatgttgaaagtagcccgagcagagaaagatctactggaactgtcttgcaatgagctcagacaagaattactaaaggcaaacggtgaaattaaacatgtttccagtctgctggccaaggtggaaaaggattattcatacctgaaggagatatgtgatcaccaagccgaacagctgagcagaaccagcctaaagctgcaagaaaaagcatcagagagtgatgcagagatcaaagacatgaaagaaaccatatttgaattggaagatcaggtggaacagcaccgggctgtcaagttacacaataatcaactcatcagtgagctagaaagtagtgtgatcaagctggaggaacagaagtcagacctggagaggcagctgaagactctgaccaagcagatgaagaaagacagcccagctcttgccatgattgggagccgcagccatctctagatgaaagggggaatgtgtagaggagaaattgcctctttataaagagcccagttgtctccttgtgacattctctgtttctcagagtcattgccgtcgagtctctgctttttgtccacattttgggatcagcttactgcatgatcaaagatgatgtttccctctttttacttttcctcagaagattgagctgtcttttatttggagaataaaatgaagttctgaaaaaaac

SEQ ID NO: 20254 - DNA, 940 bp, Homo sapiens
  misc_feature 1..940: note = ENST00000584527
  source 1..940: mol_type = unassigned DNA
atgttgaaagtagcccgagcagagaaagatctactggaactgtcttgcaatgagctcagacaagaattactaaaggcaaacggtgaaattaaacatgtttccagtctgctggccaaggtggaaaaggattattcatacctgaaggagatatgtgatcaccaagccgaacagctgagcagaaccagcctaaagctgcaagaaaaagcatcagagagtgatgcagagatcaaagacatgaaagaaaccatatttgaattggaagatcaggtggaacagcaccgggctgtcaagttacacaataatcaactcatcagtgagctagaaagtagtgtgatcaagctggaggaacagaagtcagacctggagaggcagctgaagactctgaccaagcagatgaaggaggagaccgaggaatggaggcggttccaggcggatctgcagaccgcagtggtggtggccaatgacatcaagtgtgaggcccagcaggagctgcgcaccgtgaagaggaaactgctggaggaggaggagaagaatgcccggttgcagaaggagctgggggatgtgcagggccacggcagggtggtcaccagcagagccgcccctccgtgagtctggtgggcaccagggccgtgcttgcttctcaatcactatctccctgggctctgtcagctagcagagcatttggtggaagaaagacagcccagctcttgccatgattgggagccgcagccatctctagatgaaagggggaatgtgtagaggagaaattgcctctttataaagagcccagttgtctccttgtgacattctctgtttctcagagtcattgccgtcgagtctctgctttttgtccacattttgggatcagcttactgcatgatcaaagatgatgtttccctctttttacttttcctcagaagattgagctgtcttttatttg

SEQ ID NO: 20255 - DNA, 195 bp, Homo sapiens
  misc_feature 1..195: note = ENST00000578153
  source 1..195: mol_type = unassigned DNA
tgcctgcccacatcccctaccaggagctgaatagtcaggagaaaaagaggaatctcttgttggcatttgaagcggctgaaagtgtaggcatcaaacccagcctggtacgtatcctattttgtatccttgtgatactttaattgtatgagaaatgactttatgccatctgataaacagtttctcgtagaacattga

SEQ ID NO: 20256 - DNA, 1190 bp, Homo sapiens
  misc_feature 1..1190: note = ENST00000492188
  source 1..1190: mol_type = unassigned DNA
tatatatactataatatatgcatttattactttgataatttttttgatatagcatcatgattaagcaactttgttatgcaacagaatgtttatgccataaatcttgcaaagtatgaattacctaaatcttgacaaaggtaaacaaaaatttatctttgataggtgtcaatcagtaatgttagttttggtgcagttgcaacctgttgatttttttttttcttaaactgagatcaaatattgtacacttgacttactattcttcgctttataatagtgaataatctatatgggaatatcagttgatattctttcctggcaaaagctatatattttaaattactgattccagtctctttgtctttttaacttagaagaggaatctcttgttggcatttgaagcggctgaaagtgtaggcatcaaacccagcctggaactcagcgagatgctgtacacagaccggcccgactggcagagtgtgatgcagtacgtggcccaaatctacaagtactttgagacgtaaccctggagggcctggggcagccaccattgccacctactgcagcttttcctggaagcgcctgattactgtccactgaccctgctctgcccaccacccagctgcctagacttcaaagacaggctcaatccaagtggaccaacacccaaataagaaacagagtgggtcccacgatgtacctgtctgaaatgcaaatgcagctggactgtaaattggggactctttgatctcttgtgggatgcttctaaagagggcagcctccctccttccagaccaagaccccacacccaggcttgttttgctgattatattgggtggctgaacgaacacattatctgcagaaattcagacaaagaacatctccaaatcagtcttttggttgctgttgttaaaaatatcccggctttgcctttatgaaacctttgcccttggctgggtgtggtagctcgtggctgtaatcccagcactttaggaagccaaggcagtaggatcgtttgagcccaggagttcgaggctgcagtgagctatgagcataccactgcactccagcctgtgtgaaagagccagaccctgtctcaaaaaaatgataaaacccaaaactttgcccttgtgaaccctcccttcccccctccccccccaaaaaaaaacaacaaaacacaaaaaataaacatt

SEQ ID NO: 20257 - DNA, 10782 bp, Homo sapiens
  misc_feature 1..10782: note = ENST00000312358
  source 1..10782: mol_type = unassigned DNA
acaggccgaaggcgggcgggcagcaggaaggcaggccgccggccccccagacttgtctcctagggcaccgtcccgcgggtgcccccgtggccgcccagttccggcgtccccccagcccagctctcagtggccatgcagaaagcccggggcacgcgaggcgaggatgcgggcacgagggcaccccccagccccggagtgcccccgaaaagggccaaggtgggggccggcggcggggctcctgtggccgtggccggggcgccagtcttcctgcggcccctgaagaacgcggcggtgtgcgcgggcagcgacgtgcggctgcgggtggtggtgagcgggacgccccagcccagcctccgctggttccgggatgggcagctcctgcccgcgccggcccccgagcccagctgcctgtggctgcggcgctgcggggcgcaggacgccggcgtgtacagctgcatggcccagaacgagcggggccgggcctcctgcgaggcggtgctcacagtgctggaggtcggagactcagagacggctgaggatgacatcagcgatgtgcagggaacccagcgcctggagcttcgggatgacggggccttcagcacccccacggggggttctgacaccctggtgggcacctccctggacacacccccgacctccgtgacaggcacctcagaggagcaagtgagctggtggggcagcgggcagacggtcctggagcaggaagcgggcagtgggggtggcacccgccgcctcccgggcagcccaaggcaagcacaggcaaccggggccgggccacggcacctgggggtggagccgctggtgcgggcatctcgagctaatctggtgggcgcaagctgggggtcagaggatagcctttccgtggccagtgacctgtacggcagcgcattcagcctgtacagaggacgggcgctctctatccacgtcagcgtccctcagagcgggttgcgcagggaggagcccgaccttcagcctcaactggccagcgaagccccacgccgccctgcccagccgcctccttccaaatccgcgctgctccccccaccgtcccctcgggtcgggaagcggtccccgccgggacccccggcccagcccgcggccacccccacgtcgccccaccgtcgcactcaggagcctgtgctgcccgaggacaccaccaccgaagagaagcgagggaagaagtccaagtcgtccgggccctccctggcgggcaccgcggaatcccgaccccagacgccactgagcgaggcctcaggccgcctgtcggcgttgggccgatcgcctaggctggtgcgcgccggctcccgcatcctggacaagctgcagttcttcgaggagcgacggcgcagcctggagcgcagcgactcgccgccggcgcccctgcggccctgggtgcccctgcgcaaggcccgctctctggagcagcccaagtcggagcgcggcgcaccgtggggcacccccggggcctcgcaggaagaactgcgggcgccaggcagcgtggccgagcggcgccgcctgttccagcagaaagcggcctcgctggacgagcgcacgcgtcagcgcagcccggcctcagacctcgagctgcgcttcgcccaggagctgggccgcatccgccgctccacgtcgcgggaggagctggtgcgctcgcacgagtccctgcgcgccacgctgcagcgtgccccatcccctcgagagcccggcgagcccccgctcttctctcggccctccacccccaagacatcgcgggccgtgagccccgccgccgcccagccgccctctccgagcagcgcggagaagccgggggacgagcctgggaggcccaggagccgcgggccggcgggcaggacagagccgggggaaggcccgcagcaggaggttaggcgtcgggaccaattcccgctgacccggagcagagccatccaggagtgcaggagccctgtgccgccccccgccgccgatcccccagaggccaggacgaaagcaccccccggtcggaagcgggagcccccggcgcaggccgtgcgcttcctgccctgggccacgccgggcctggagggcgctgctgtaccccagaccttggagaagaacagggcggggcctgaggcagagaagaggcttcgcagagggccggaggaggacggtccctgggggccctgggaccgccgaggggcccgcagccagggcaaaggtcgccgggcccggcccacctcccctgagctcgagtcttcggatgactcctacgtgtccgctggagaagagcccctagaggcccctgtgtttgagatccccctgcagaatgtggtggtggcaccaggggcagatgtgctgctcaagtgtatcatcactgccaaccccccgccccaagtgtcctggcacaaggatgggtcagcgctgcgcagcgagggccgcctcctcctccgggctgagggtgagcggcacaccctgctgctcagggaggccagggcagcagatgccgggagctatatggccaccgccaccaacgagctgggccaggccacctgtgccgcctcactgaccgtgagacccggtgggtctacatcccctttcagcagccccatcacctccgacgaggaatacctgagccccccagaggagttcccagagcctggggagacctggccgcgaacccccaccatgaagcccagtcccagccagaaccgccgttcttctgacactggctccaaggcaccccccaccttcaaggtctcacttatggaccagtcagtaagagaaggccaagatgtcatcatgagcatccgcgtgcagggggagcccaagcctgtggtctcctggctgagaaaccgccagcccgtgcgcccagaccagcggcgctttgcggaggaggctgagggtgggctgtgccggctgcggatcctggctgcagagcgtggcgatgctggtttctacacttgcaaagcggtcaatgagtatggtgctcggcagtgcgaggcccgcttggaggtccgagcacaccctgaaagccggtccctggccgtgctggcccccctgcaggacgtggacgtgggggccggggagatggcgctgtttgagtgcctggtggcggggcccactgacgtggaggtggattggctgtgccgtggccgcctgctgcagcctgcactgctcaaatgcaagatgcatttcgatggccgcaaatgcaagctgctacttacatctgtacatgaggacgacagtggcgtctacacctgcaagctcagcacggccaaagatgagctgacctgcagtgcccggctgaccgtgcggccctcgttggcacccctgttcacacggctgctggaagatgtggaggtgttggagggccgagctgcccgtttcgactgcaagatcagtggcaccccgccccctgttgttacctggactcattttggctgccccatggaggagagtgagaacttgcggctgcggcaggacgggggtctgcactcactgcacattgcccatgtgggcagcgaggacgaggggctctatgcggtcagtgctgttaacacccatggccaggcccactgctcagcccagctgtatgtagaagagccccggacagccgcctcaggccccagctcgaagctggagaagatgccatccattcccgaggagccagagcagggtgagctggagcggctgtccattcctgacttcctgcggccactgcaggacctggaggtgggactggccaaggaggccatgctagagtgccaggtgaccggcctgccctaccccaccatcagctggttccacaatggccaccgcatccagagcagcgacgaccggcgcatgacacagtacagggatgtccatcgcttggtgttccctgccgtggggcctcagcacgccggtgtctacaagagcgtcattgccaacaagctgggcaaagctgcctgctatgcccacctgtatgtcacagatgtggtcccaggccctccagatggcgccccgcaggtggtggctgtgacggggaggatggtcacactcacatggaacccccccaggagtctggacatggccatcgacccggactccctgacgtacacagtgcagcaccaggtgctgggctcggaccagtggacggcactggtcacaggcctgcgggagccagggtgggcagccacagggctgcgtaagggggtccagcacatcttccgggtcctcagcaccactgtcaagagcagcagcaagccctcacccccttctgagcctgtgcagctgctggagcacggcccaaccctggaggaggcccctgccatgctggacaaaccagacatcgtgtatgtggtggagggacagcctgccagcgtcaccgtcacattcaaccatgtggaggcccaggtcgtctggaggagctgccgaggggccctcctagaggcacgggccggtgtgtacgagctgagccagccagatgatgaccagtactgtcttcggatctgccgggtgagccgccgggacatgggggccctcacctgcaccgcccgaaaccgtcacggcacacagacctgctcggtcacattggagctggcagaggcccctcggtttgagtccatcatggaggacgtggaggtgggggctggggaaactgctcgctttgcggtggtggtcgagggaaaaccactgccggacatcatgtggtacaaggacgaggtgctgctgaccgagagcagccatgtgagcttcgtgtacgaggagaatgagtgctccctggtggtgctcagcacgggggcccaggatggaggcgtctacacctgcaccgcccagaacctggcgggtgaggtctcctgcaaagcagagttggctgtgcattcagctcagacagctatggaggtcgagggggtcggggaggatgaggaccatcgaggaaggagactcagcgacttttatgacatccaccaggagatcggcaggggtgctttctcctacttgcggcgcatagtggagcgtagctccggcctggagtttgcggccaagttcatccccagccaggccaagccaaaggcatcagcgcgtcgggaggcccggctgctggccaggctccagcacgactgtgtcctctacttccatgaggccttcgagaggcgccggggactggtcattgtcaccgagctctgcacagaggagctgctggagcgaatcgccaggaaacccaccgtgtgtgagtctgagatccgggcctatatgcggcaggtgctagagggaatacactacctgcaccagagccacgtgctgcacctcgatgtcaagcctgagaacctgctggtgtgggatggtgctgcgggcgagcagcaggtgcggatctgtgactttgggaatgcccaggagctgactccaggagagccccagtactgccagtatggcacacctgagtttgtagcacccgagattgtcaatcagagccccgtgtctggagtcactgacatctggcctgtgggtgttgttgccttcctctgtctgacaggaatctccccgtttgttggggaaaatgaccggacaacattgatgaacatccgaaactacaacgtggccttcgaggagaccacattcctgagcctgagcagggaggcccggggcttcctcatcaaagtgttggtgcaggaccggctgagacctaccgcagaagagaccctagaacatccttggttcaaaactcaggcaaagggcgcagaggtgagcacggatcacctgaagctattcctctcccggcggaggtggcagcgctcccagatcagctacaaatgccacctggtgctgcgccccatccccgagctgctgcgggcccccccagagcgggtgtgggtgaccatgcccagaaggccaccccccagtggggggctctcatcctcctcggattctgaagaggaagagctggaagagctgccctcagtgccccgcccactgcagcccgagttctctggctcccgggtgtccctcacagacattcccactgaggatgaggccctggggaccccagagactggggctgccacccccatggactggcaggagcagggaagggctccctctcaggaccaggaggctcccagcccagaggccctcccctccccaggccaggagcccgcagctggggctagccccaggcggggagagctccgcaggggcagctcggctgagagcgccctgccccgggccgggccgcgggagctgggccggggcctgcacaaggcggcgtctgtggagctgccgcagcgccggagccccagcccgggagccacccgcctggcccggggaggcctgggtgagggcgagtatgcccagaggctgcaggccctgcgccagcggctgctgcggggaggccccgaggatggcaaggtcagcggcctcaggggtcccctgctggagagcctggggggccgtgctcgggacccccggatggcacgagctgcctccagcgaggcagcgccccaccaccagcccccactcgagaaccggggcctgcaaaagagcagcagcttctcccagggtgaggcggagccccggggccggcaccgccgagcgggggcgcccctcgagatccccgtggccaggcttggggcccgtaggctacaggagtctccttccctgtctgccctcagcgaggcccagccatccagccctgcacggcccagcgcccccaaacccagtacccctaagtctgcagaaccttctgccaccacacctagtgatgctccgcagccccccgcaccccagcctgcccaagacaaggctccagagcccaggccagaaccagtccgagcctccaagcctgcaccacccccccaggccctgcaaaccctagcgctgcccctcacaccctatgctcagatcattcagtccctccagctgtcaggccacgcccagggcccctcgcagggccctgccgcgccgccttcagagcccaagccccacgctgctgtctttgccagggtggcctccccacctccgggagcccccgagaagcgcgtgccctcagccgggggtcccccggtgctagccgagaaagcccgagttcccacggtgccccccaggccaggcagcagtctcagtagcagcatcgaaaacttggagtcggaggccgtgttcgaggccaagttcaagcgcagccgcgagtcgcccctgtcgctggggctgcggctgctgagccgttcgcgctcggaggagcgcggccccttccgtggggccgaggaggaggatggcatataccggcccagcccggcggggaccccgctggagctggtgcgacggcctgagcgctcacgctcggtgcaggacctcagggctgtcggagagcctggcctcgtccgccgcctctcgctgtcactgtcccagcggctgcggcggacccctcccgcgcagcgccacccggcctgggaggcccgcggcggggacggagagagctcggagggcgggagctcggcgcggggctccccggtgctggcgatgcgcaggcggctgagcttcaccctggagcggctgtccagccgattgcagcgcagtggcagcagcgaggactcggggggcgcgtcgggccgcagcacgccgctgttcggacggcttcgcagggccacgtccgagggcgagagtctgcggcgccttggccttccgcacaaccagttggccgcccaggccggcgccaccacgccttccgccgagtccctgggctccgaggccagcgccacgtcgggctcctcagccccaggggaaagccgaagccggctccgctggggcttctctcggccgcggaaggacaaggggttatcgccaccaaacctctctgccagcgtccaggaggagttgggtcaccagtacgtgcgcagtgagtcagacttccccccagtcttccacatcaaactcaaggaccaggtgctgctggagggggaggcagccaccctgctctgcctgccagcggcctgccctgcaccgcacatctcctggatgaaagacaagaagtccttgaggtcagagccctcagtgatcatcgtgtcctgcaaagatgggcggcagctgctcagcatcccccgggcgggcaagcggcacgccggtctctatgagtgctcggccaccaacgtactgggcagcatcaccagctcctgtaccgtggctgtggcccgagtcccaggaaagctagctcctccagaggtaccccagacctaccaggacacggcgctggtgctgtggaagccgggagacagccgggcaccttgcacgtatacgctggagcggcgagtggatggggagtctgtgtggcaccctgtgagctcaggcatccccgactgttactacaacgtgacccacctgccagttggcgtgactgtgaggttccgtgtggcctgtgccaaccgtgctgggcaggggcccttcagcaactcttctgagaaggtctttgtcaggggtactcaagattcttcagctgtgccatctgctgcccaccaagaggcccctgtcacctcaaggccagccagggcccggcctcctgactctcctacctcactggccccacccctagctcctgctgcccccacacccccgtcagtcactgtcagcccctcatctccccccacacctcctagccaggccttgtcctcgctcaaggctgtgggtccaccaccccaaacccctccacgaagacacaggggcctgcaggctgcccggccagcggagcccaccctacccagtacccacgtcaccccaagtgagcccaagcctttcgtccttgacactgggaccccgatcccagcctccactcctcaaggggttaaaccagtgtcttcctctactcctgtgtatgtggtgacttcctttgtgtctgcaccaccagcccctgagcccccagcccctgagccccctcctgagcctaccaaggtgactgtgcagagcctcagcccggccaaggaggtggtcagctcccctgggagcagtccccgaagctctcccaggcctgagggtaccactcttcgacagggtccccctcagaaaccctacaccttcctggaggagaaagccaggggccgctttggtgttgtgcgagcgtgccgggagaatgccacggggcgaacgttcgtggccaagatcgtgccctatgctgccgagggcaagcggcgggtcctgcaggagtacgaggtgctgcggaccctgcaccacgagcggatcatgtccctgcacgaggcctacatcacccctcggtacctcgtgctcattgctgagagctgtggcaaccgggaactcctctgtgggctcagtgacaggttccggtattctgaggatgacgtggccacttacatggtgcagctgctacaaggcctggactacctccacggccaccacgtgctccacctagacatcaagccagacaacctgctgctggcccctgacaatgccctcaagattgtggactttggcagtgcccagccctacaacccccaggcccttaggccccttggccaccgcacgggcacgctggagttcatggctccggagatggtgaagggagaacccatcggctctgccacggacatctggggagcgggtgtgctcacttacattatgctcagtggacgctccccgttctatgagccagacccccaggaaacggaggctcggattgtggggggccgctttgatgccttccagctgtaccccaatacatcccagagcgccaccctcttcttgcgaaaggttctctctgtacatccctggagccggccctccctgcaggactgcctggcccacccatggttgcaggacgcctacctgatgaagctgcgccgccagacgctcaccttcaccaccaaccggctcaaggagttcctgggcgagcagcggcggcgccgggctgaggctgccacccgccacaaggtgctgctgcgctcctaccctggcggcccctagaggcacggaccacagccaggcctcgggcttcaactggggttcccaccaatgccacgggacattccagggcccacgctgagccaggcgggcctggggcttcggttaccaccagcagcaacatctggctgggctcttacctcatagaccttcaaggacagagaccccagggcctggacctgatgccaccccaggccaaagccagagtgggagacccattggtcaggctcagcagggtgggaacaggcagagggacaagaggggaatggagaagtggagaggaaaaggaatcgagggacaggaagggggaggctctaggaaggttctgggttgggggtcagtgcatctcagggagaaccaaggaaggtgggcatggctggagaggaggaaaaggaaggagccccaggtgtcagggcagtaggctgggagtcagtgtggcaaagcgggggcaggacacagatacagtggcaggggcccagggctgggacatgagagaaggcagcgaggcggcagagggagaagagaggactcaggtggaggtggggtgggtcagctgtcagcatccctcagaggagaaatgtggagagctggaggccagcagtcactcacactcgctctgtcctcctgtccagtggatacagccctgggcgctctgctggcccaaggatgtccccactgcccctccatggcctctggccttcttcccattcatatttatttatttattgacttttatgaagtttccccttccatccgatccctactgcccatgttgtcctgaccatccctcccagccatccagctgtctgtctgtctgccacaaggaaataaaaatggcaagcagcataa

SEQ ID NO: 20258 - DNA, 3874 bp, Homo sapiens
  misc_feature 1..3874: note = ENST00000498378
  source 1..3874: mol_type = unassigned DNA
tttctcaagatggatgtctcctggcctgccttggtccctcaaagtgaaaaccggccattcccgccgggcctttggccgactcacccatggtgcgtggaccgtgggcgtccttgctctagcccatgcctactcctcctcttggtccctgtccctctgtgaggcatcgagttcctgaagacagcccatgagatgtggaaccctcccactcacccccacacttatctaccacccacccgaccaggccccctgtgccctacagctgagagaggacccagcagaagggagggcggctcactagcacacccctgcatggactgggtgccctgttctccatgtgaggcctaatgggaaggagttcattgccatgctttggcaaccagtacgtggctcctgcttgtcatggcagccagagggaaactgaggcacagaacctgctagaatctgggaaagttgaaaatactcccaggaaccttttctcctaacctaaccactgggcatttttgaggacgattcaacagtagaagggagggaccttgaggaaggtgcctgtcacatcatgatgcagacagataagggactcagagacggctgaggatgacatcagcgatgtgcagggaacccagcgcctggagcttcgggatgacggggccttcagcacccccacggggggttctgacaccctggtgggcacctccctggacacacccccgacctccgtgacaggcacctcagaggagcaagtgagctggtggggcagcgggcagacggtcctggagcaggaagcgggcagtgggggtggcacccgccgcctcccgggcagcccaaggcaagcacaggcaaccggggccgggccacggcacctgggggtggagccgctggtgcgggcatctcgagctaatctggtgggcgcaagctgggggtcagaggatagcctttccgtggccagtgacctgtacggcagcgcattcagcctgtacagaggacgggcgctctctatccacgtcagcgtccctcagagcgggttgcgcagggaggagcccgaccttcagcctcaactggccagcgaagccccacgccgccctgcccagccgcctccttccaaatccgcgctgctccccccaccgtcccctcgggtcgggaagcggtccccgccgggacccccggcccagcccgcggccacccccacgtcgccccaccgtcgcactcaggagcctgtgctgcccgaggacaccaccaccgaagagaagcgagggaagaagtccaagtcgtccgggccctccctggcgggcaccgcggaatcccgaccccagacgccactgagcgaggcctcaggccgcctgtcggcgttgggccgatcgcctaggctggtgcgcgccggctcccgcatcctggacaagctgcagttcttcgaggagcgacggcgcagcctggagcgcagcgactcgccgccggcgcccctgcggccctgggtgcccctgcgcaaggcccgctctctggagcagcccaagtcggagcgcggcgcaccgtggggcacccccggggcctcgcaggaagaactgcgggcgccaggcagcgtggccgagcggcgccgcctgttccagcagaaagcggcctcgctggacgagcgcacgcgtcagcgcagcccggcctcagacctcgagctgcgcttcgcccaggagctgggccgcatccgccgctccacgtcgcgggaggagctggtgcgctcgcacgagtccctgcgcgccacgctgcagcgtgccccatcccctcgagagcccggcgagcccccgctcttctctcggccctccacccccaagacatcgcgggccgtgagccccgccgccgcccagccgccctctccgagcagcgcggagaagccgggggacgagcctgggaggcccaggagccgcgggccggcgggcaggacagagccgggggaaggcccgcagcaggaggttaggcgtcgggaccaattcccgctgacccggagcagagccatccaggagtgcaggagccctgtgccgccccccgccgccgatcccccagaggccaggacgaaagcaccccccggtcggaagcgggagcccccggcgcaggccgtgcgcttcctgccctgggccacgccgggcctggagggcgctgctgtaccccagaccttggagaagaacagggcggggcctgaggcagagaagaggcttcgcagagggccggaggaggacggtccctgggggccctgggaccgccgaggggcccgcagccagggcaaaggtcgccgggcccggcccacctcccctgagctcgagtcttcggatgactcctacgtgtccgctggagaagagcccctagaggcccctgtgtttgagatccccctgcagaatgtggtggtggcaccaggggcagatgtgctgctcaagtgtatcatcactgccaaccccccgccccaagtgtcctggcacaaggatgggtcagcgctgcgcagcgagggccgcctcctcctccgggctgagggtgagcggcacaccctgctgctcagggaggccagggcagcagatgccgggagctatatggccaccgccaccaacgagctgggccaggccacctgtgccgcctcactgaccgtgagacccggtgggtctacatcccctttcagcagccccatcacctccgacgaggaatacctgagccccccagaggagttcccagagcctggggagacctggccgcgaacccccaccatgaagcccagtcccagccagaaccgccgttcttctgacactggctccaaggcaccccccaccttcaaggtctcacttatggaccagtcagtaagagaaggccaagatgtcatcatgagcatccgcgtgcagggggagcccaagcctgtggtctcctggctgagaaaccgccagcccgtgcgcccagaccagcggcgctttgcggaggaggctgagggtgggctgtgccggctgcggatcctggctgcagagcgtggcgatgctggtttctacacttgcaaagcggtcaatgagtatggtgctcggcagtgcgaggcccgcttggaggtccgaggcgagtgagctcagggggccacctgtgctccccccgctaccctccgagccgcgcccctgtctcaggcacctctcggacctcgctgtgtttcactgcctcctgcccacagacccaggcctgccggcccggacccgtcccagcctcccctccccaccccatgcagcccccagggggatagcccatgggcccctgtggaccctccctccccaagtggacacatggctgtgcaggccaggaggcccacagatggactgagtgctgggaaggggcggctgcgaggggtatcaaccccccgagtctctccctgaaggggagcaccgggcgagtgcatgtgctactgctgctacaggcctgtctatctgtttgtctgtctgtgtgtctgtgacagtcagggaaggatgcctcggagctgaggtggggtgagacagagtgggagagattacggcatggcatggaggggcccaaggagcaggggctgttgacaaaggccttaccaggaagggttaggacactgaccattctagaaatgggtttcgaatggcacaacactttctatttcacaaaagaccaaaagccagaggccccaggctctgtgctgatgaacagcctggctgagccctggccctggcaggtttagggcccatttggggccccctccttctctgtcagggctggggtgctctgtctgggaatgagggagttaaccaagtttggtgcaggagcaggggcagggggccactgtagtgagcgtggagaaatttggaaacacctatttcttaactcaaataaagtccagtttgtacct

SEQ ID NO: 20259 - DNA, 605 bp, Homo sapiens
  misc_feature 1..605: note = ENST00000435853
  source 1..605: mol_type = unassigned DNA
acagtgtgtgtgcgcgcatgtttgtggaatgagcaagtcgagatgctgctgaccttccagagaggccccgcgggaggagaaaaccggccattcccgccgggcctttggccgactcacccatgcgaagttttccgctcctgcagaaagcaaagttacgactcagagacggctgaggatgacatcagcgatgtgcagggaacccagcgcctggagcttcgggatgacggggccttcagcacccccacggggggttctgacaccctggtgggcacctccctggacacacccccgacctccgtgacaggcacctcagaggagcaagtgagctggtggggcagcgggcagacggtcctggagcaggaagcgggcagtgggggtggcacccgccgcctcccgggcagcccaagcagcgtccctcagagcgggttgcgcagggaggagcccgaccttcagcctcaactggccagcgaagccccacgccgccctgcccagccgcctccttccaaatccgcgctgctccccccaccgtcccctcgggtcgggaagcggtccccgccgggacccccggcccagcccgcggccacccccacgtcgccccaccgtcg

SEQ ID NO: 20260 - DNA, 546 bp, Homo sapiens
  misc_feature 1..546: note = ENST00000403148
  source 1..546: mol_type = unassigned DNA
ctcgcccggccgccggcccggccccctcccccgccatgaagaagctgtgggtgaagaagcgtttccagaaaaccggccattcccgccgggcctttggccgactcacccatggtgcgtggaccgtgggcgtccttgctctagcccatgcctactcctcctcttggtccctgtccctctgtgaggcatcgagttcctgaagacagcccatgagatgtggaaccctcccactcacccccacacttatctaccacccacccgaccaggccccctgtgccctacagctgagagaggacccagcagaagggagggcggctcactagcacacccctgcatggactgggtgccctgttctccatgtgaggcctaatgggaaggagttcattgccatgctttggcaaccacgaagttttccgctcctgcagaaagcaaagttacgactcagagacggctgaggatgacatcagcgatgtgcagggaacccagcgcctggagcttcgggatgacggggccttcagcacccccacggggggttctgacaccctggtg

SEQ ID NO: 20261 - DNA, 926 bp, Homo sapiens
  misc_feature 1..926: note = ENST00000431523
  source 1..926: mol_type = unassigned DNA
ggccgccggcccggccccctcccccgccatgaagaagctgtgggtgaagaagcgtttccagaaaaccggccattcccgccgggcctttggccgactcacccatgttttccgctcctgcagaaagcaaagttacgactcagagacggctgaggatgacatcagcgatgtgcagggaacccagcgcctggagcttcgggatgacggggccttcagcacccccacggggggttctgacaccctggtgggcacctccctggacacacccccgacctccgtgacaggcacctcagaggagcaagtgagctggtggggcagcgggcagacggtcctggagcaggaagcgggcagtgggggtggcacccgccgcctcccgggcagcccaagcagcgtccctcagagcgggttgcgcagggaggagcccgaccttcagcctcaactggccagcgaagccccacgccgccctgcccagccgcctccttccaaatccgcgctgctccccccaccgtcccctcgggtcgggaagcggtccccgccgggacccccggcccagcccgcggccacccccacgtcgccccaccgtcgcactcaggagcctgtgctgcccgaggacaccaccaccgaagagaagcgagggaagaagtccaagtcgtccgggccctccctggcgggcaccgcggaatcccgaccccagacgccactgagcgaggcctcaggccgcctgtcggcgttgggccgatcgcctaggctggtgcgcgccggctcccgcatcctggacaagctgcagttcttcgaggagcgacggcgcagcctggagcgcagcgactcgccgccggcgcccctgcggccctgggtgcccctgcgcaaggcccgctctctggagcagcccaagtcggagcgcggcgcaccgtggggcacccccggggcct

SEQ ID NO: 20262 - DNA, 3379 bp, Homo sapiens
  misc_feature 1..3379: note = ENST00000396698
  source 1..3379: mol_type = unassigned DNA
cccgccatgaagaagctgtgggtgaagaagcgtttccagaaaaccggccattcccgccgggcctttggccgactcacccatgactcagagacggctgaggatgacatcagcgatgtgcagggaacccagcgcctggagcttcgggatgacggggccttcagcacccccacggggggttctgacaccctggtgggcacctccctggacacacccccgacctccgtgacaggcacctcagaggagcaagtgagctggtggggcagcgggcagacggtcctggagcaggaagcgggcagtgggggtggcacccgccgcctcccgggcagcccaaggcaagcacaggcaaccggggccgggccacggcacctgggggtggagccgctggtgcgggcatctcgagctaatctggtgggcgcaagctgggggtcagaggatagcctttccgtggccagtgacctgtacggcagcgcattcagcctgtacagaggacgggcgctctctatccacgtcagcgtccctcagagcgggttgcgcagggaggagcccgaccttcagcctcaactggccagcgaagccccacgccgccctgcccagccgcctccttccaaatccgcgctgctccccccaccgtcccctcgggtcgggaagcggtccccgccgggacccccggcccagcccgcggccacccccacgtcgccccaccgtcgcactcaggagcctgtgctgcccgaggacaccaccaccgaagagaagcgagggaagaagtccaagtcgtccgggccctccctggcgggcaccgcggaatcccgaccccagacgccactgagcgaggcctcaggccgcctgtcggcgttgggccgatcgcctaggctggtgcgcgccggctcccgcatcctggacaagctgcagttcttcgaggagcgacggcgcagcctggagcgcagcgactcgccgccggcgcccctgcggccctgggtgcccctgcgcaaggcccgctctctggagcagcccaagtcggagcgcggcgcaccgtggggcacccccggggcctcgcaggaagaactgcgggcgccaggcagcgtggccgagcggcgccgcctgttccagcagaaagcggcctcgctggacgagcgcacgcgtcagcgcagcccggcctcagacctcgagctgcgcttcgcccaggagctgggccgcatccgccgctccacgtcgcgggaggagctggtgcgctcgcacgagtccctgcgcgccacgctgcagcgtgccccatcccctcgagagcccggcgagcccccgctcttctctcggccctccacccccaagacatcgcgggccgtgagccccgccgccgcccagccgccctctccgagcagcgcggagaagccgggggacgagcctgggaggcccaggagccgcgggccggcgggcaggacagagccgggggaaggcccgcagcaggaggttaggcgtcgggaccaattcccgctgacccggagcagagccatccaggagtgcaggagccctgtgccgccccccgccgccgatcccccagaggccaggacgaaagcaccccccggtcggaagcgggagcccccggcgcaggccgtgcgcttcctgccctgggccacgccgggcctggagggcgctgctgtaccccagaccttggagaagaacagggcggggcctgaggcagagaagaggcttcgcagagggccggaggaggacggtccctgggggccctgggaccgccgaggggcccgcagccagggcaaaggtcgccgggcccggcccacctcccctgagctcgagtcttcggatgactcctacgtgtccgctggagaagagcccctagaggcccctgtgtttgagatccccctgcagaatgtggtggtggcaccaggggcagatgtgctgctcaagtgtatcatcactgccaaccccccgccccaagtgtcctggcacaaggatgggtcagcgctgcgcagcgagggccgcctcctcctccgggctgagggtgagcggcacaccctgctgctcagggaggccagggcagcagatgccgggagctatatggccaccgccaccaacgagctgggccaggccacctgtgccgcctcactgaccgtgagacccggtgggtctacatcccctttcagcagccccatcacctccgacgaggaatacctgagccccccagaggagttcccagagcctggggagacctggccgcgaacccccaccatgaagcccagtcccagccagaaccgccgttcttctgacactggctccaaggcaccccccaccttcaaggtctcacttatggaccagtcagtaagagaaggccaagatgtcatcatgagcatccgcgtgcagggggagcccaagcctgtggtctcctggctgagaaaccgccagcccgtgcgcccagaccagcggcgctttgcggaggaggctgagggtgggctgtgccggctgcggatcctggctgcagagcgtggcgatgctggtttctacacttgcaaagcggtcaatgagtatggtgctcggcagtgcgaggcccgcttggaggtccgaggcgagtgagctcagggggccacctgtgctccccccgctaccctccgagccgcgcccctgtctcaggcacctctcggacctcgctgtgtttcactgcctcctgcccacagacccaggcctgccggcccggacccgtcccagcctcccctccccaccccatgcagcccccagggggatagcccatgggcccctgtggaccctccctccccaagtggacacatggctgtgcaggccaggaggcccacagatggactgagtgctgggaaggggcggctgcgaggggtatcaaccccccgagtctctccctgaaggggagcaccgggcgagtgcatgtgctactgctgctacaggcctgtctatctgtttgtctgtctgtgtgtctgtgacagtcagggaaggatgcctcggagctgaggtggggtgagacagagtgggagagattacggcatggcatggaggggcccaaggagcaggggctgttgacaaaggccttaccaggaagggttaggacactgaccattctagaaatgggtttcgaatggcacaacactttctatttcacaaaagaccaaaagccagaggccccaggctctgtgctgatgaacagcctggctgagccctggccctggcaggtttagggcccatttggggccccctccttctctgtcagggctggggtgctctgtctgggaatgagggagttaaccaagtttggtgcaggagcaggggcagggggccactgtagtgagcgtggagaaatttggaaacacctatttcttaactcaaataaagtccagtttgtacc

SEQ ID NO: 20263 - DNA, 583 bp, Homo sapiens
  misc_feature 1..583: note = ENST00000452101
  source 1..583: mol_type = unassigned DNA
cgccatgaagaagctgtgggtgaagaagcgtttccagaaaaccggccattcccgccgggcctttggccgactcacccatgcgaagttttccgctcctgcagaaagcaaagttacgactcagagacggctgaggatgacatcagcgatgtgcagggaacccagcgcctggagcttcgggatgacggggccttcagcacccccacggggggttctgacaccctggtgggcacctccctggacacacccccgacctccgtgacaggcacctcagaggagcaagtgagctggtggggcagcgggcagacggtcctggagcaggaagcgggcagtgggggtggcacccgccgcctcccgggcagcccaagcagcgtccctcagagcgggttgcgcagggaggagcccgaccttcagcctcaactggccagcgaagccccacgccgccctgcccagccgcctccttccaaatccgcgctgctccccccaccgtcccctcgggtcgggaagcggtccccgccgggacccccggcccagcccgcggccacccccacgtcgccccaccgtcgcactcaggagcctgtgctgc

SEQ ID NO: 20264 - DNA, 579 bp, Homo sapiens
  misc_feature 1..579: note = ENST00000420132
  source 1..579: mol_type = unassigned DNA
ccatgaagaagctgtgggtgaagaagcgtttccagaaaaccggccattcccgccgggcctttggccgactcacccatggtgcgtggaccgtgggcgtccttgctctagcccatgcctactcctcctcttggtccctgtccctctgtgaggcatcgagttcctgaagacagcccatgagatgtggaaccctcccactcacccccacacttatctaccacccacccgaccaggccccctgtgccctacagctgagagaggacccagcagaagggagggcggctcactagcacacccctgcatggactgggtgccctgttctccatgtgaggcctaatgggaaggagttcattgccatgctttggcaaccattttccgctcctgcagaaagcaaagttacgactcagagacggctgaggatgacatcagcgatgtgcagggaacccagcgcctggagcttcgggatgacggggccttcagcacccccacggggggttctgacaccctggtgggcacctccctggacacacccccgacctccgtgacaggcacctcagaggagcaagtgagctggtggggcag

SEQ ID NO: 20265 - DNA, 5132 bp, Homo sapiens
  misc_feature 1..5132: note = ENST00000464989
  source 1..5132: mol_type = unassigned DNA
tattgtaatagagggtgggcctgactcctaatgggaggcccaggtctgcggctggactggacacaagcaggtgtgtgtgtgtgtgtgtgcatgtgtgtgtgtggccagtggcagcaccagtaagtgccaaggataccagaaccactggggcagctggaataacaagcccaagtatgggggtccccagtgctgggcacatcccaggtatctccctccccacccattgccacaggacacctctggggactgggtgcctcacgccccttctgtcttgactgccctccatgccctgccccacaaacgctctgataacagtctgtccctgtctctctcctgctgctcctatggaagcgaagttttccgctcctgcagaaagcaaagttacgactcagagacggctgaggatgacatcagcgatgtgcagggaacccagcgcctggagcttcgggatgacggggccttcagcacccccacggggggttctgacaccctggtgggcacctccctggacacacccccgacctccgtgacaggcacctcagaggagcaagtgagctggtggggcagcgggcagacggtcctggagcaggaagcgggcagtgggggtggcacccgccgcctcccgggcagcccaaggcaagcacaggcaaccggggccgggccacggcacctgggggtggagccgctggtgcgggcatctcgagctaatctggtgggcgcaagctgggggtcagaggatagcctttccgtggccagtgacctgtacggcagcgcattcagcctgtacagaggacgggcgctctctatccacgtcagcgtccctcagagcgggttgcgcagggaggagcccgaccttcagcctcaactggccagcgaagccccacgccgccctgcccagccgcctccttccaaatccgcgctgctccccccaccgtcccctcgggtcgggaagcggtccccgccgggacccccggcccagcccgcggccacccccacgtcgccccaccgtcgcactcaggagcctgtgctgcccgaggacaccaccaccgaagagaagcgagggaagaagtccaagtcgtccgggccctccctggcgggcaccgcggaatcccgaccccagacgccactgagcgaggcctcaggccgcctgtcggcgttgggccgatcgcctaggctggtgcgcgccggctcccgcatcctggacaagctgcagttcttcgaggagcgacggcgcagcctggagcgcagcgactcgccgccggcgcccctgcggccctgggtgcccctgcgcaaggcccgctctctggagcagcccaagtcggagcgcggcgcaccgtggggcacccccggggcctcgcaggaagaactgcgggcgccaggcagcgtggccgagcggcgccgcctgttccagcagaaagcggcctcgctggacgagcgcacgcgtcagcgcagcccggcctcagacctcgagctgcgcttcgcccaggagctgggccgcatccgccgctccacgtcgcgggaggagctggtgcgctcgcacgagtccctgcgcgccacgctgcagcgtgccccatcccctcgagagcccggcgagcccccgctcttctctcggccctccacccccaagacatcgcgggccgtgagccccgccgccgcccagccgccctctccgagcagcgcggagaagccgggggacgagcctgggaggcccaggagccgcgggccggcgggcaggacagagccgggggaaggcccgcagcaggaggttaggcgtcgggaccaattcccgctgacccggagcagagccatccaggagtgcaggagccctgtgccgccccccgccgccgatcccccagaggccaggacgaaagcaccccccggtcggaagcgggagcccccggcgcaggccgtgcgcttcctgccctgggccacgccgggcctggagggcgctgctgtaccccagaccttggagaagaacagggcggggcctgaggcagagaagaggcttcgcagagggccggaggaggacggtccctgggggccctgggaccgccgaggggcccgcagccagggcaaaggtcgccgggcccggcccacctcccctgagctcgagtcttcggatgactcctacgtgtccgctggagaagagcccctagaggcccctgtgtttgagatccccctgcagaatgtggtggtggcaccaggggcagatgtgctgctcaagtgtatcatcactgccaaccccccgccccaagtgtcctggcacaaggatgggtcagcgctgcgcagcgagggccgcctcctcctccgggctgagggtgagcggcacaccctgctgctcagggaggccagggcagcagatgccgggagctatatggccaccgccaccaacgagctgggccaggccacctgtgccgcctcactgaccgtgagacccggtgggtctacatcccctttcagcagccccatcacctccgacgaggaatacctgagccccccagaggagttcccagagcctggggagacctggccgcgaacccccaccatgaagcccagtcccagccagaaccgccgttcttctgacactggctccaaggcaccccccaccttcaaggtctcacttatggaccagtcagtaagagaaggccaagatgtcatcatgagcatccgcgtgcagggggagcccaagcctgtggtctcctggctgagaaaccgccagcccgtgcgcccagaccagcggcgctttgcggaggaggctgagggtgggctgtgccggctgcggatcctggctgcagagcgtggcgatgctggtttctacacttgcaaagcggtcaatgagtatggtgctcggcagtgcgaggcccgcttggaggtccgaggtgagtacctgatttctccatgaatgcccacctggccctggccccttccttcccccactgtctgctctcacacagcctcagttagaggatgccaccactgaaagggccttaaggggcccctagtccagctgcttatattattgttgagtgaaccaaagcccagagacaggaagtgacctgcccaaagctgcacagcacattgttccgtgctcagcttactacacaacaccaccttccctgttgctccatcacggagccctggcggcagccagagaccctgcacctgccactggccaagctctctctacactcttctgagcctttgtcaccctgctctgcccaggaccctccctcatccccctccccctctcctctcgcccctttgcccaccctcccatcccattgctgtgcagaagctactgtgaggtagcggtggggagagtctggtggctggacccgttcggaggggcccttggggtggcttaggcttggagcatcacagggaccctagggtgccagggtgagcacagctgtgacgtgtgaagaggcctgggcccccagagcctggggcatatgtgcaggggccctctcaggcagcagaaatgccaggccctggctagggggccctcgagggccatgggttttcctccccaaaggccacaaccgtttatcttgccttccacctcacccttcgcctcaatggctcctcgcttcctctcctcgcttctcactcagcccccagcccctgaccttccccaaggctcagagctcagaccctgacagtcatggtccctctgctggcccccctgcctcagttcccctcctctgtgcctgccgttcctgtagttgccacttccttggtctccagattcttcagccctcctccccggcctgctttctctccagggcctggctctgcctcgcttctctgtattaacccatgtcttggtgcttctttctcttggggattccttccgacacccccaggctttggggtgctcctgatcccatgaatgcctggttgcccggggtctctgcctgcccaggaaccccgaggaaccagtctctggctagctgccggccctcgcagcccagagctgtccttgggggagccaagagtggcagtgctgccctgacggtgtgagaggcagccctctatgcagaagggccctagccaggtctgcgtgcctgtgcgtgcatgtgtgcgtgtgcgtgcgcatgcgtgcgtgtatgtgcatgcatgtgtgtgcatgtgtgtgcgtgtgtgcgtgcgtgtgcatgtgtgcgtatgggtgtgtgcatgcgtgtgtgtgtgcgcgcgtgtgcgtgcacgtgtgcgtgcatgtgtgcgtgtgcatgcgtgtgtgtgcatgtgtgtgtgtgcgcgtgcgtgcgcgtatgctgcactaacctgccgcttgctgactgaggtttttgtctgtacacaggcgagtgagctcagggggccacctgtgctccccccgctaccctccgagccgcgcccctgtctcaggcacctctcggacctcgctgtgtttcactgcctcctgcccacagacccaggcctgccggcccggacccgtcccagcctcccctccccaccccatgcagcccccagggggatagcccatgggcccctgtggaccctccctccccaagtggacacatggctgtgcaggccaggaggcccacagatggactgagtgctgggaaggggcggctgcgaggggtatcaaccccccgagtctctccctgaaggggagcaccgggcgagtgcatgtgctactgctgctacaggcctgtctatctgtttgtctgtctgtgtgtctgtgacagtcagggaaggatgcctcggagctgaggtggggtgagacagagtgggagagattacggcatggcatggaggggcccaaggagcaggggctgttgacaaaggccttaccaggaagggttaggacactgaccattctagaaatgggtttcgaatggcacaacactttctatttcacaaaagaccaaaagccagaggccccaggctctgtgctgatgaacagcctggctgagccctggccctggcaggtttagggcccatttggggccccctccttctctgtcagggctggggtgctctgtctgggaatgagggagttaaccaagtttggtgcaggagcaggggcagggggccactgtagtgagcgtggagaaatttggaaacacctatttcttaactcaaataaagtccagtttgtacct

SEQ ID NO: 20266 - DNA, 551 bp, Homo sapiens
  misc_feature 1..551: note = ENST00000451076
  source 1..551: mol_type = unassigned DNA
agagacggctgaggatgacatcagcgatgtgcagggaacccagcgcctggagcttcgggatgacggggccttcagcacccccacgggcacctcagaggagcaagtgagctggtggggcagcgggcagacggtcctggagcaggaagcgggcagtgggggtggcacccgccgcctcccgggcagcccaaggcaagcacaggcaaccggggccgggccacggcacctgggggtggagccgctggtgcgggcatctcgagctaatctggtgggcgcaagctgggggtcagaggatagcctttccgtggccagtgacctgtacggcagcgcattcagcctgtacagaggacgggcgctctctatccacgtcagcgtccctcagagcgggttgcgcagggaggagcccgaccttcagcctcaactggccagcgaagccccacgccgccctgcccagccgcctccttccaaatccgcgctgctccccccaccgtcccctcgggtcgggaagcggtccccgccgggacccccggcccagcccgcggccacccccacgt

SEQ ID NO: 20267 - DNA, 420 bp, Homo sapiens
  misc_feature 1..420: note = ENST00000409595
  source 1..420: mol_type = unassigned DNA
atctcgagctaatctggtgggcgcaagctgggggtcagaggatagcctttccgtggccagtgacctgtacggcagcgcattcagcctgtacagaggacgggcgctctctatccacgtagtcttcggatgactcctacgtgtccgctggagaagagcccctagaggcccctgtgtttgagatccccctgcagaatgtggtggtggcaccaggggcagatgtgctgctcaagtgtatcatcactgccaaccccccgccccaagtgtcctggcacaaggatgggtcagcgctgcgcagcgagggccgcctcctcctccgggctgagggtgagcggcacaccctgctgctcagggaggccagggcagcagatgccgggagctatatggccaccgccaccaacgagctgggccaggccacctgtg

SEQ ID NO: 20268 - DNA, 554 bp, Homo sapiens
  misc_feature 1..554: note = ENST00000497065
  source 1..554: mol_type = unassigned DNA
ttttcatctctctgcacattcctgttcccatgtgggcctttttctgggaggaacagaacctttccacacggcagctcccgggagagcaggagagagcaggggaacaagccagcaagcaggagagagaagagacagcgtccctcagagcgggttgcgcagggaggagcccgaccttcagcctcaactggccagcgaagccccacgccgccctgcccagccgcctccttccaaatccgcgctgctccccccaccgtcccctcgggtcgggaagcggtccccgccgggacccccggcccagcccgcggccacccccacgtcgccccaccgtcgcactcaggagcctgtgctgcccgaggacaccaccaccgaagagaagcgagggaagaagtccaagtcgtccgggccctccctggcgggcaccgcggaatcccgaccccagacgccactgagcgaggcctcaggccgcctgtcggcgttgggccgatcgcctaggctggtgcgcgccggctcccgcatcctggacaagctgcagttcttcgaggagcgacggcgca

SEQ ID NO: 20269 - DNA, 590 bp, Homo sapiens
  misc_feature 1..590: note = ENST00000491248
  source 1..590: mol_type = unassigned DNA
atgtgggcctttttctgggaggaacagaacctttccacacggcagctcccgggagagcaggagagagcaggggaacaagccagcaagcaggagagagaagagagtgagcagcgtccctcagagcgggttgcgcagggaggagcccgaccttcagcctcaactggccagcgaagccccacgccgccctgcccagccgcctccttccaaatccgcgctgctccccccaccgtcccctcgggtcgggaagcggtccccgccgggacccccggcccagcccgcggccacccccacgtcgccccaccgtcgcactcaggagcctgtgctgcccgaggacaccaccaccgaagagaagcgagggaagaagtccaagtcgtccgggccctccctggcgggcaccgcggaatcccgaccccagacgccactgagcgaggcctcaggccgcctgtcggcgttgggccgatcgcctaggctggtgcgcgccggctcccgcatcctggacaagctgcagttcttcgaggagcgacggcgcagcctggagcgcagcgactcgccgccggcgcccctgcggccctgggtgcccctgcgcaagg

SEQ ID NO: 20270 - DNA, 9854 bp, Homo sapiens
  misc_feature 1..9854: note = ENST00000485813
  source 1..9854: mol_type = unassigned DNA
cccgggagagcaggagagagcaggggaacaagccagcaagcaggagagagaagagagtgagcgtccctcagagcgggttgcgcagggaggagcccgaccttcagcctcaactggccagcgaagccccacgccgccctgcccagccgcctccttccaaatccgcgctgctccccccaccgtcccctcgggtcgggaagcggtccccgccgggacccccggcccagcccgcggccacccccacgtcgccccaccgtcgcactcaggagcctgtgctgcccgaggacaccaccaccgaagagaagcgagggaagaagtccaagtcgtccgggccctccctggcgggcaccgcggaatcccgaccccagacgccactgagcgaggcctcaggccgcctgtcggcgttgggccgatcgcctaggctggtgcgcgccggctcccgcatcctggacaagctgcagttcttcgaggagcgacggcgcagcctggagcgcagcgactcgccgccggcgcccctgcggccctgggtgcccctgcgcaaggcccgctctctggagcagcccaagtcggagcgcggcgcaccgtggggcacccccggggcctcgcaggaagaactgcgggcgccaggcagcgtggccgagcggcgccgcctgttccagcagaaagcggcctcgctggacgagcgcacgcgtcagcgcagcccggcctcagacctcgagctgcgcttcgcccaggagctgggccgcatccgccgctccacgtcgcgggaggagctggtgcgctcgcacgagtccctgcgcgccacgctgcagcgtgccccatcccctcgagagcccggcgagcccccgctcttctctcggccctccacccccaagacatcgcgggccgtgagccccgccgccgcccagccgccctctccgagcagcgcggagaagccgggggacgagcctgggaggcccaggagccgcgggccggcgggcaggacagagccgggggaaggcccgcagcaggaggttaggcgtcgggaccaattcccgctgacccggagcagagccatccaggagtgcaggagccctgtgccgccccccgccgccgatcccccagaggccaggacgaaagcaccccccggtcggaagcgggagcccccggcgcaggccgtgcgcttcctgccctgggccacgccgggcctggagggcgctgctgtaccccagaccttggagaagaacagggcggggcctgaggcagagaagaggcttcgcagagggccggaggaggacggtccctgggggccctgggaccgccgaggggcccgcagccagggcaaaggtcgccgggcccggcccacctcccctgagctcgagtcttcggatgactcctacgtgtccgctggagaagagcccctagaggcccctgtgtttgagatccccctgcagaatgtggtggtggcaccaggggcagatgtgctgctcaagtgtatcatcactgccaaccccccgccccaagtgtcctggcacaaggatgggtcagcgctgcgcagcgagggccgcctcctcctccgggctgagggtgagcggcacaccctgctgctcagggaggccagggcagcagatgccgggagctatatggccaccgccaccaacgagctgggccaggccacctgtgccgcctcactgaccgtgagacccggtgggtctacatcccctttcagcagccccatcacctccgacgaggaatacctgagccccccagaggagttcccagagcctggggagacctggccgcgaacccccaccatgaagcccagtcccagccagaaccgccgttcttctgacactggctccaaggcaccccccaccttcaaggtctcacttatggaccagtcagtaagagaaggccaagatgtcatcatgagcatccgcgtgcagggggagcccaagcctgtggtctcctggctgagaaaccgccagcccgtgcgcccagaccagcggcgctttgcggaggaggctgagggtgggctgtgccggctgcggatcctggctgcagagcgtggcgatgctggtttctacacttgcaaagcggtcaatgagtatggtgctcggcagtgcgaggcccgcttggaggtccgagcacaccctgaaagccggtccctggccgtgctggcccccctgcaggacgtggacgtgggggccggggagatggcgctgtttgagtgcctggtggcggggcccactgacgtggaggtggattggctgtgccgtggccgcctgctgcagcctgcactgctcaaatgcaagatgcatttcgatggccgcaaatgcaagctgctacttacatctgtacatgaggacgacagtggcgtctacacctgcaagctcagcacggccaaagatgagctgacctgcagtgcccggctgaccgtgcggccctcgttggcacccctgttcacacggctgctggaagatgtggaggtgttggagggccgagctgcccgtttcgactgcaagatcagtggcaccccgccccctgttgttacctggactcattttggctgccccatggaggagagtgagaacttgcggctgcggcaggacgggggtctgcactcactgcacattgcccatgtgggcagcgaggacgaggggctctatgcggtcagtgctgttaacacccatggccaggcccactgctcagcccagctgtatgtagaagagccccggacagccgcctcaggccccagctcgaagctggagaagatgccatccattcccgaggagccagagcagggtgagctggagcggctgtccattcctgacttcctgcggccactgcaggacctggaggtgggactggccaaggaggccatgctagagtgccaggtgaccggcctgccctaccccaccatcagctggttccacaatggccaccgcatccagagcagcgacgaccggcgcatgacacagtacagggatgtccatcgcttggtgttccctgccgtggggcctcagcacgccggtgtctacaagagcgtcattgccaacaagctgggcaaagctgcctgctatgcccacctgtatgtcacagatgtggtcccaggccctccagatggcgccccgcaggtggtggctgtgacggggaggatggtcacactcacatggaacccccccaggagtctggacatggccatcgacccggactccctgacgtacacagtgcagcaccaggtgctgggctcggaccagtggacggcactggtcacaggcctgcgggagccagggtgggcagccacagggctgcgtaagggggtccagcacatcttccgggtcctcagcaccactgtcaagagcagcagcaagccctcacccccttctgagcctgtgcagctgctggagcacggcccaaccctggaggaggcccctgccatgctggacaaaccagacatcgtgtatgtggtggagggacagcctgccagcgtcaccgtcacattcaaccatgtggaggcccaggtcgtctggaggagctgccgaggggccctcctagaggcacgggccggtgtgtacgagctgagccagccagatgatgaccagtactgtcttcggatctgccgggtgagccgccgggacatgggggccctcacctgcaccgcccgaaaccgtcacggcacacagacctgctcggtcacattggagctggcagaggcccctcggtttgagtccatcatggaggacgtggaggtgggggctggggaaactgctcgctttgcggtggtggtcgagggaaaaccactgccggacatcatgtggtacaaggacgaggtgctgctgaccgagagcagccatgtgagcttcgtgtacgaggagaatgagtgctccctggtggtgctcagcacgggggcccaggatggaggcgtctacacctgcaccgcccagaacctggcgggtgaggtctcctgcaaagcagagttggctgtgcattcagctcagacagctatggaggtcgagggggtcggggaggatgaggaccatcgaggaaggagactcagcgacttttatgacatccaccaggagatcggcaggggtgctttctcctacttgcggcgcatagtggagcgtagctccggcctggagtttgcggccaagttcatccccagccaggccaagccaaaggcatcagcgcgtcgggaggcccggctgctggccaggctccagcacgactgtgtcctctacttccatgaggccttcgagaggcgccggggactggtcattgtcaccgagctctgcacagaggagctgctggagcgaatcgccaggaaacccaccgtgtgtgagtctgagatccgggcctatatgcggcaggtgctagagggaatacactacctgcaccagagccacgtgctgcacctcgatgtcaagcctgagaacctgctggtgtgggatggtgctgcgggcgagcagcaggtgcggatctgtgactttgggaatgcccaggagctgactccaggagagccccagtactgccagtatggcacacctgagtttgtagcacccgagattgtcaatcagagccccgtgtctggagtcactgacatctggcctgtgggtgttgttgccttcctctgtctgacaggaatctccccgtttgttggggaaaatgaccggacaacattgatgaacatccgaaactacaacgtggccttcgaggagaccacattcctgagcctgagcagggaggcccggggcttcctcatcaaagtgttggtgcaggaccggctgagacctaccgcagaagagaccctagaacatccttggttcaaaactcaggcaaagggcgcagaggtgagcacggatcacctgaagctattcctctcccggcggaggtggcagcgctcccagatcagctacaaatgccacctggtgctgcgccccatccccgagctgctgcgggcccccccagagcgggtgtgggtgaccatgcccagaaggccaccccccagtggggggctctcatcctcctcggattctgaagaggaagagctggaagagctgccctcagtgccccgcccactgcagcccgagttctctggctcccgggtgtccctcacagacattcccactgaggatgaggccctggggaccccagagactggggctgccacccccatggactggcaggagcagggaagggctccctctcaggaccaggaggctcccagcccagaggccctcccctccccaggccaggagcccgcagctggggctagccccaggcggggagagctccgcaggggcagctcggctgagagcgccctgccccgggccgggccgcgggagctgggccggggcctgcacaaggcggcgtctgtggagctgccgcagcgccggagccccagcccgggagccacccgcctggcccggggaggcctgggtgagggcgagtatgcccagaggctgcaggccctgcgccagcggctgctgcggggaggccccgaggatggcaaggtcagcggcctcaggggtcccctgctggagagcctggggggccgtgctcgggacccccggatggcacgagctgcctccagcgaggcagcgccccaccaccagcccccactcgagaaccggggcctgcaaaagagcagcagcttctcccagggtgaggcggagccccggggccggcaccgccgagcgggggcgcccctcgagatccccgtggccaggcttggggcccgtaggctacaggagtctccttccctgtctgccctcagcgaggcccagccatccagccctgcacggcccagcgcccccaaacccagtacccctaagtctgcagaaccttctgccaccacacctagtgatgctccgcagccccccgcaccccagcctgcccaagacaaggctccagagcccaggccagaaccagtccgagcctccaagcctgcaccacccccccaggccctgcaaaccctagcgctgcccctcacaccctatgctcagatcattcagtccctccagctgtcaggccacgcccagggcccctcgcagggccctgccgcgccgccttcagagcccaagccccacgctgctgtctttgccagggtggcctccccacctccgggagcccccgagaagcgcgtgccctcagccgggggtcccccggtgctagccgagaaagcccgagttcccacggtgccccccaggccaggcagcagtctcagtagcagcatcgaaaacttggagtcggaggccgtgttcgaggccaagttcaagcgcagccgcgagtcgcccctgtcgctggggctgcggctgctgagccgttcgcgctcggaggagcgcggccccttccgtggggccgaggaggaggatggcatataccggcccagcccggcggggaccccgctggagctggtgcgacggcctgagcgctcacgctcggtgcaggacctcagggctgtcggagagcctggcctcgtccgccgcctctcgctgtcactgtcccagcggctgcggcggacccctcccgcgcagcgccacccggcctgggaggcccgcggcggggacggagagagctcggagggcgggagctcggcgcggggctccccggtgctggcgatgcgcaggcggctgagcttcaccctggagcggctgtccagccgattgcagcgcagtggcagcagcgaggactcggggggcgcgtcgggccgcagcacgccgctgttcggacggcttcgcagggccacgtccgagggcgagagtctgcggcgccttggccttccgcacaaccagttggccgcccaggccggcgccaccacgccttccgccgagtccctgggctccgaggccagcgccacgtcgggctcctcagccccaggggaaagccgaagccggctccgctggggcttctctcggccgcggaaggacaaggggttatcgccaccaaacctctctgccagcgtccaggaggagttgggtcaccagtacgtgcgcagtgagtcagacttccccccagtcttccacatcaaactcaaggaccaggtgctgctggagggggaggcagccaccctgctctgcctgccagcggcctgccctgcaccgcacatctcctggatgaaagacaagaagtccttgaggtcagagccctcagtgatcatcgtgtcctgcaaagatgggcggcagctgctcagcatcccccgggcgggcaagcggcacgccggtctctatgagtgctcggccaccaacgtactgggcagcatcaccagctcctgtaccgtggctgtggcccgagtcccaggaaagctagctcctccagaggtaccccagacctaccaggacacggcgctggtgctgtggaagccgggagacagccgggcaccttgcacgtatacgctggagcggcgagtggatggggagtctgtgtggcaccctgtgagctcaggcatccccgactgttactacaacgtgacccacctgccagttggcgtgactgtgaggttccgtgtggcctgtgccaaccgtgctgggcaggggcccttcagcaactcttctgagaaggtctttgtcaggggtactcaagattcttcagctgtgccatctgctgcccaccaagaggcccctgtcacctcaaggccagccagggcccggcctcctgactctcctacctcactggccccacccctagctcctgctgcccccacacccccgtcagtcactgtcagcccctcatctccccccacacctcctagccaggccttgtcctcgctcaaggctgtgggtccaccaccccaaacccctccacgaagacacaggggcctgcaggctgcccggccagcggagcccaccctacccagtacccacgtcaccccaagtgagcccaagcctttcgtccttgacactgggaccccgatcccagcctccactcctcaaggggttaaaccagtgtcttcctctactcctgtgtatgtggtgacttcctttgtgtctgcaccaccagcccctgagcccccagcccctgagccccctcctgagcctaccaaggtgactgtgcagagcctcagcccggccaaggaggtggtcagctcccctgggagcagtccccgaagctctcccaggcctgagggtaccactcttcgacagggtccccctcagaaaccctacaccttcctggaggagaaagccaggggccgctttggtgttgtgcgagcgtgccgggagaatgccacggggcgaacgttcgtggccaagatcgtgccctatgctgccgagggcaagcggcgggtcctgcaggagtacgaggtgctgcggaccctgcaccacgagcggatcatgtccctgcacgaggcctacatcacccctcggtacctcgtgctcattgctgagagctgtggcaaccgggaactcctctgtgggctcagtgacaggttccggtattctgaggatgacgtggccacttacatggtgcagctgctacaaggcctggactacctccacggccaccacgtgctccacctagacatcaagccagacaacctgctgctggcccctgacaatgccctcaagattgtggactttggcagtgcccagccctacaacccccaggcccttaggccccttggccaccgcacgggcacgctggagttcatggctccggagatggtgaagggagaacccatcggctctgccacggacatctggggagcgggtgtgctcacttacattatgctcagtggacgctccccgttctatgagccagacccccaggaaacggaggctcggattgtggggggccgctttgatgccttccagctgtaccccaatacatcccagagcgccaccctcttcttgcgaaaggttctctctgtacatccctggagccggccctccctgcaggactgcctggcccacccatggttgcaggacgcctacctgatgaagctgcgccgccagacgctcaccttcaccaccaaccggctcaaggagttcctgggcgagcagcggcggcgccgggctgaggctgccacccgccacaaggtgctgctgcgctcctaccctggcggcccctagaggcacggaccacagccaggcctcgggcttcaactggggttcccaccaatgccacgggacattccagggcccacgctgagccaggcgggcctggggcttcggttaccaccagcagcaacatctggctgggctcttacctcatagaccttcaaggacagagaccccagggcctggacctgatgccaccccaggccaaagccagagtgggagacccattggtcaggctcagcagggtgggaacaggcagagggacaagaggggaatggagaagtggagaggaaaaggaatcgagggacaggaagggggaggctctaggaaggttctgggttgggggtcagtgcatctcagggagaaccaaggaaggtgggcatggctggagaggaggaaaaggaaggagccccaggtgtcagggcagtaggctgggagtcagtgtggcaaagcgggggcaggacacagatacagtggcaggggcccagggctgggacatgagagaaggcagcgaggcggcagagggagaagagaggactcaggtggaggtggggtgggtcagctgtcagcatccctcagaggagaaatgtggagagctggaggccagcagtcactcacactcgctctgtcctcctgtccagtggatacagccctgggcgctctgctggcccaaggatgtccccactgcccctccatggcctctggccttcttcccattcatatttatttatttattgacttttatgaagtttccccttccatccgatccctactgcccatgttgtcctgaccatccctcccagccatccagctgtctgt

SEQ ID NO: 20271 - DNA, 3487 bp, Homo sapiens
  misc_feature 1..3487: note = ENST00000462545
  source 1..3487: mol_type = unassigned DNA
cacacatttgacaattcacctcgtgttgctctgtgacaccgctgttattgcttaagtcttgggttgcttttagcttgttctttgtctgtttgaaagcttgtgcccctccaggtgccttgcatggggcctggtacgccatacatgatggctgacgtgttaaagacatacacagtgcagtcctgtctttctccagaagccaacgctctaattgtggatgaagttgaggaacggccacactaacatggagtcaaggctgccctgacctgtttcgagaatgctccttctgacttccttttttccctaaggacattcaggaggcagaccctcttctccccaagtccctgctttctagaagcccctctgtctgggtttggctttctaggatgcaggccaccaggactctctctcccgctgtcatccctgcagggatcatggccccttaccccgttattcctgtgtccggcagagtcttcggatgactcctacgtgtccgctggagaagagcccctagaggcccctgtgtttgagatccccctgcagaatgtggtggtggcaccaggggcagatgtgctgctcaagtgtatcatcactgccaaccccccgccccaagtgtcctggcacaaggatgggtcagcgctgcgcagcgagggccgcctcctcctccgggctgagggtgagcggcacaccctgctgctcagggaggccagggcagcagatgccgggagctatatggccaccgccaccaacgagctgggccaggccacctgtgccgcctcactgaccgtgagacccggtgggtctacatcccctttcagcagccccatcacctccgacgaggaatacctgagccccccagaggagttcccagagcctggggagacctggccgcgaacccccaccatgaagcccagtcccagccagaaccgccgttcttctgacactggctccaaggcaccccccaccttcaaggtctcacttatggaccagtcagtaagagaaggccaagatgtcatcatgagcatccgcgtgcagggggagcccaagcctgtggtctcctggctgagaaaccgccagcccgtgcgcccagaccagcggcgctttgcggaggaggctgagggtgggctgtgccggctgcggatcctggctgcagagcgtggcgatgctggtttctacacttgcaaagcggtcaatgagtatggtgctcggcagtgcgaggcccgcttggaggtccgaggtgagtacctgatttctccatgaatgcccacctggccctggccccttccttcccccactgtctgctctcacacagcctcagttagaggatgccaccactgaaagggccttaaggggcccctagtccagctgcttatattattgttgagtgaaccaaagcccagagacaggaagtgacctgcccaaagctgcacagcacattgttccgtgctcagcttactacacaacaccaccttccctgttgctccatcacggagccctggcggcagccagagaccctgcacctgccactggccaagctctctctacactcttctgagcctttgtcaccctgctctgcccaggaccctccctcatccccctccccctctcctctcgcccctttgcccaccctcccatcccattgctgtgcagaagctactgtgaggtagcggtggggagagtctggtggctggacccgttcggaggggcccttggggtggcttaggcttggagcatcacagggaccctagggtgccagggtgagcacagctgtgacgtgtgaagaggcctgggcccccagagcctggggcatatgtgcaggggccctctcaggcagcagaaatgccaggccctggctagggggccctcgagggccatgggttttcctccccaaaggccacaaccgtttatcttgccttccacctcacccttcgcctcaatggctcctcgcttcctctcctcgcttctcactcagcccccagcccctgaccttccccaaggctcagagctcagaccctgacagtcatggtccctctgctggcccccctgcctcagttcccctcctctgtgcctgccgttcctgtagttgccacttccttggtctccagattcttcagccctcctccccggcctgctttctctccagggcctggctctgcctcgcttctctgtattaacccatgtcttggtgcttctttctcttggggattccttccgacacccccaggctttggggtgctcctgatcccatgaatgcctggttgcccggggtctctgcctgcccaggaaccccgaggaaccagtctctggctagctgccggccctcgcagcccagagctgtccttgggggagccaagagtggcagtgctgccctgacggtgtgagaggcagccctctatgcagaagggccctagccaggtctgcgtgcctgtgcgtgcatgtgtgcgtgtgcgtgcgcatgcgtgcgtgtatgtgcatgcatgtgtgtgcatgtgtgtgcgtgtgtgcgtgcgtgtgcatgtgtgcgtatgggtgtgtgcatgcgtgtgtgtgtgcgcgcgtgtgcgtgcacgtgtgcgtgcatgtgtgcgtgtgcatgcgtgtgtgtgcatgtgtgtgtgtgcgcgtgcgtgcgcgtatgctgcactaacctgccgcttgctgactgaggtttttgtctgtacacaggcgagtgagctcagggggccacctgtgctccccccgctaccctccgagccgcgcccctgtctcaggcacctctcggacctcgctgtgtttcactgcctcctgcccacagacccaggcctgccggcccggacccgtcccagcctcccctccccaccccatgcagcccccagggggatagcccatgggcccctgtggaccctccctccccaagtggacacatggctgtgcaggccaggaggcccacagatggactgagtgctgggaaggggcggctgcgaggggtatcaaccccccgagtctctccctgaaggggagcaccgggcgagtgcatgtgctactgctgctacaggcctgtctatctgtttgtctgtctgtgtgtctgtgacagtcagggaaggatgcctcggagctgaggtggggtgagacagagtgggagagattacggcatggcatggaggggcccaaggagcaggggctgttgacaaaggccttaccaggaagggttaggacactgaccattctagaaatgggtttcgaatggcacaacactttctatttcacaaaagaccaaaagccagaggccccaggctctgtgctgatgaacagcctggctgagccctggccctggcaggtttagggcccatttggggccccctccttctctgtcagggctggggtgctctgtctgggaatgagggagttaaccaagtttggtgcaggagcaggggcagggggccactgtagtgagcgtggagaaatttggaaacacctatttcttaactcaaataaagtccagtttgtacct

SEQ ID NO: 20272 - DNA, 567 bp, Homo sapiens
  misc_feature 1..567: note = ENST00000463218
  source 1..567: mol_type = unassigned DNA
tatatggccaccgccaccaacgagctgggccaggccacctgtgccgcctcactgaccgtgagacccggtgggtctacatcccctttcagcagccccatcacctccgacgaggaatacctgagccccccagaggagttcccagagcctggggagacctggccgcgaacccccaccatgaagcccagtcccagccagaaccgccgttcttctgacactggctccaaggcaccccccaccttcaaggtctcacttatggaccagtcagtaagagaaggccaagatgtcatcatgagcatccgcgtgcagggggagcccaagcctgtggtctcctggctgagaaaccgccagcccgtgcgcccagaccagcggcgctttgcggaggaggctgagggtgggctgtgccggctgcggatcctggctgcagagcgtggcgatgctggtttctacacttgcaaagcggtcaatgagtatggtgctcggcagtgcgaggcccgcttggaggtccgaggtgagtacctgatttctccatgaatgcccacctggccctggccccttccttcccccact

SEQ ID NO: 20273 - DNA, 1457 bp, Homo sapiens
  misc_feature 1..1457: note = ENST00000396688
  source 1..1457: mol_type = unassigned DNA
caacctcctccttcccctcctcaggcgccttcccctcccccagggccttctccgtgcagggcctcagctgggtcagccgagtgagtggggctgggcaggctggacaggctgggctcctgctccctggggagccacgctggggtgggcagtgggcaggcagcaggagggcctggtgccagggcagagccttcaggacaggcacaggctggggtctgtgtgcagagcctcggggtgggtctacatcccctttcagcagccccatcacctccgacgaggaatacctgagccccccagaggagttcccagagcctggggagacctggccgcgaacccccaccatgaagcccagtcccagccagaaccgccgttcttctgacactggctccaaggcaccccccaccttcaaggtctcacttatggaccagtcagtaagagaaggccaagatgtcatcatgagcatccgcgtgcagggggagcccaagcctgtggtctcctggctgagaaaccgccagcccgtgcgcccagaccagcggcgctttgcggaggaggctgagggtgggctgtgccggctgcggatcctggctgcagagcgtggcgatgctggtttctacacttgcaaagcggtcaatgagtatggtgctcggcagtgcgaggcccgcttggaggtccgaggcgagtgagctcagggggccacctgtgctccccccgctaccctccgagccgcgcccctgtctcaggcacctctcggacctcgctgtgtttcactgcctcctgcccacagacccaggcctgccggcccggacccgtcccagcctcccctccccaccccatgcagcccccagggggatagcccatgggcccctgtggaccctccctccccaagtggacacatggctgtgcaggccaggaggcccacagatggactgagtgctgggaaggggcggctgcgaggggtatcaaccccccgagtctctccctgaaggggagcaccgggcgagtgcatgtgctactgctgctacaggcctgtctatctgtttgtctgtctgtgtgtctgtgacagtcagggaaggatgcctcggagctgaggtggggtgagacagagtgggagagattacggcatggcatggaggggcccaaggagcaggggctgttgacaaaggccttaccaggaagggttaggacactgaccattctagaaatgggtttcgaatggcacaacactttctatttcacaaaagaccaaaagccagaggccccaggctctgtgctgatgaacagcctggctgagccctggccctggcaggtttagggcccatttggggccccctccttctctgtcagggctggggtgctctgtctgggaatgagggagttaaccaagtttggtgcaggagcaggggcagggggccactgtagtgagcgtggagaaatttggaaacacctatttcttaactcaa

SEQ ID NO: 20274 - DNA, 566 bp, Homo sapiens
  misc_feature 1..566: note = ENST00000496786
  source 1..566: mol_type = unassigned DNA
tttttggtggatgactccagctctgctttcctatccctcgagcgtttgggggtgcaagctgtagggctgtggccaacaggtgggtctacatcccctttcagcagccccatcacctccgacgaggaatacctgagccccccagaggagttcccagagcctggggagacctggccgcgaacccccaccatgaagcccagtcccagccagaaccgccgttcttctgacactggctccaaggcaccccccaccttcaaggtctcacttatggaccagtcagtaagagaaggccaagatgtcatcatgagcatccgcgtgcagggggagcccaagcctgtggtctcctggctgagaaaccgccagcccgtgcgcccagaccagcggcgctttgcggaggaggctgagggtgggctgtgccggctgcggatcctggctgcagagcgtggcgatgctggtttctacacttgcaaagcggtcaatgagtatggtgctcggcagtgcgaggcccgcttggaggtccgaggtgagtacctgatttctccatgaatgcccacctggccctggcccct

SEQ ID NO: 20275 - DNA, 1888 bp, Homo sapiens
  misc_feature 1..1888: note = ENST00000475921
  source 1..1888: mol_type = unassigned DNA
agctctgctttcctatccctcgagcgtttgggggtgcaagctgtagggctgtggccaacaggtgcccctggggtttgcacggcaggaagctgagaagggaaagggggaggggcaggctagatagtgccgcctcattggccctggaccgaggtcgggatgtgacttgtctgcggtgtgtgttcctctgcaccaggcccagctcacccaagaaatgggcgtcctagccatgctgctccagggttccatagacctgcttcccctgcttttggagcctgcagttggtagtttaggtctctagtccatgtcaggaatgtgggtgccctgctccagtggaattctcccaccaggcccaggagtggcccctctgctgcccgaaccctttgccccaggcctttccctatggtgtcccctcctgggaggatcagcagggtcggtgttggcagagccagtggcagaggaggttccaggggctcagggaggggaagaagctgggcgaggtcgcaggagcctgggggtgaagtcagggcagggccggcctgcggggagctgccgcaactcctgggctctgggcgacattccagccagctctcccaggctctctgctcgccttcctccctggtagctatctctgtctctctccaggtgggtctacatcccctttcagcagccccatcacctccgacgaggaatacctgagccccccagaggagttcccagagcctggggagacctggccgcgaacccccaccatgaagcccagtcccagccagaaccgccgttcttctgacactggctccaaggcaccccccaccttcaaggtctcacttatggaccagtcagtaagagaaggccaagatgtcatcatgagcatccgcgtgcagggggagcccaagcctgtggtctcctggctgagaaaccgccagcccgtgcgcccagaccagcggcgctttgcggaggaggctgagggtgggctgtgccggctgcggatcctggctgcagagcgtggcgatgctggtttctacacttgcaaagcggtcaatgagtatggtgctcggcagtgcgaggcccgcttggaggtccgaggcgagtgagctcagggggccacctgtgctccccccgctaccctccgagccgcgcccctgtctcaggcacctctcggacctcgctgtgtttcactgcctcctgcccacagacccaggcctgccggcccggacccgtcccagcctcccctccccaccccatgcagcccccagggggatagcccatgggcccctgtggaccctccctccccaagtggacacatggctgtgcaggccaggaggcccacagatggactgagtgctgggaaggggcggctgcgaggggtatcaaccccccgagtctctccctgaaggggagcaccgggcgagtgcatgtgctactgctgctacaggcctgtctatctgtttgtctgtctgtgtgtctgtgacagtcagggaaggatgcctcggagctgaggtggggtgagacagagtgggagagattacggcatggcatggaggggcccaaggagcaggggctgttgacaaaggccttaccaggaagggttaggacactgaccattctagaaatgggtttcgaatggcacaacactttctatttcacaaaagaccaaaagccagaggccccaggctctgtgctgatgaacagcctggctgagccctggccctggcaggtttagggcccatttggggccccctccttctctgtcagggctggggtgctctgtctgggaatgagggagttaaccaagtttggtgcaggagcaggggcagggggccactgtagtgagcgtggagaaatttggaaacacctatttcttaactcaaataaagtccagtttgtacct

SEQ ID NO: 20276 - DNA, 1086 bp, Homo sapiens
  misc_feature 1..1086: note = ENST00000396686
  source 1..1086: mol_type = unassigned DNA
tccctcgagcgtttgggggtgcaagctgtagggctgtggccaacaggtgggtctacatcccctttcagcagccccatcacctccgacgaggaatacctgagccccccagaggagttcccagagcctggggagacctggccgcgaacccccaccatgaagcccagtcccagccagaaccgccgttcttctgacactggctccaaggcaccccccaccttcaaggtctcacttatggaccagtcagtaagagaaggccaagatgtcatcatgagcatccgcgtgcagggggagcccaagcctgtggtctcctggctgagaaaccgccagcccgtgcgcccagaccagcggcgctttgcggaggaggctgagggtgggctgtgccggctgcggatcctggctgcagagcgtggcgatgctggtttctacacttgcaaagcggtcaatgagtatggtgctcggcagtgcgaggcccgcttggaggtccgaggcgagtgagctcagggggccacctgtgctccccccgctaccctccgagccgcgcccctgtctcaggcacctctcggacctcgctgtgtttcactgcctcctgcccacagacccaggcctgccggcccggacccgtcccagcctcccctccccaccccatgcagcccccagggggatagcccatgggcccctgtggaccctccctccccaagtggacacatggctgtgcaggccaggaggcccacagatggactgagtgctgggaaggggcggctgcgaggggtatcaaccccccgagtctctccctgaaggggagcaccgggcgagtgcatgtgctactgctgctacaggcctgtctatctgtttgtctgtctgtgtgtctgtgacagtcagggaaggatgcctcggagctgaggtggggtgagacagagtgggagagattacggcatggcatggaggggcccaaggagcaggggctgttgacaaaggccttaccaggaagggttaggacactgaccattctagaaatgggtttcgaatggcacaacactttctatttcacaaaagaccaaaagccagaggccccaggctctgtgctga

SEQ ID NO: 20277 - DNA, 1274 bp, Homo sapiens
  misc_feature 1..1274: note = ENST00000396689
  source 1..1274: mol_type = unassigned DNA
ccgaggtcgggatgtgacttgtctgcggtgggtctacatcccctttcagcagccccatcacctccgacgaggaatacctgagccccccagaggagttcccagagcctggggagacctggccgcgaacccccaccatgaagcccagtcccagccagaaccgccgttcttctgacactggctccaaggcaccccccaccttcaaggtctcacttatggaccagtcagtaagagaaggccaagatgtcatcatgagcatccgcgtgcagggggagcccaagcctgtggtctcctggctgagaaaccgccagcccgtgcgcccagaccagcggcgctttgcggaggaggctgagggtgggctgtgccggctgcggatcctggctgcagagcgtggcgatgctggtttctacacttgcaaagcggtcaatgagtatggtgctcggcagtgcgaggcccgcttggaggtccgaggcgagtgagctcagggggccacctgtgctccccccgctaccctccgagccgcgcccctgtctcaggcacctctcggacctcgctgtgtttcactgcctcctgcccacagacccaggcctgccggcccggacccgtcccagcctcccctccccaccccatgcagcccccagggggatagcccatgggcccctgtggaccctccctccccaagtggacacatggctgtgcaggccaggaggcccacagatggactgagtgctgggaaggggcggctgcgaggggtatcaaccccccgagtctctccctgaaggggagcaccgggcgagtgcatgtgctactgctgctacaggcctgtctatctgtttgtctgtctgtgtgtctgtgacagtcagggaaggatgcctcggagctgaggtggggtgagacagagtgggagagattacggcatggcatggaggggcccaaggagcaggggctgttgacaaaggccttaccaggaagggttaggacactgaccattctagaaatgggtttcgaatggcacaacactttctatttcacaaaagaccaaaagccagaggccccaggctctgtgctgatgaacagcctggctgagccctggccctggcaggtttagggcccatttggggccccctccttctctgtcagggctggggtgctctgtctgggaatgagggagttaaccaagtttggtgcaggagcaggggcagggggccactgtagtgagcgtggagaaatttggaaacacctatttcttaactcaaataaagtccagtttgtaccta

SEQ ID NO: 20278 - DNA, 2159 bp, Homo sapiens
  misc_feature 1..2159: note = ENST00000485069
  source 1..2159: mol_type = unassigned DNA
cttggaagccagcccgggcccagacccagactttgctgcaccatggatgcacttcttgctgcctgccccatccttgccccatccttgcccactcgcctcctccctgcagtggatgggggtgagggaccaggcccgggatggcatgggcctacccctcaaggtatcctccgggctcaggcccagtgtcactgtccctcccctcccagacagggatgtccatcgcttggtgttccctgccgtggggcctcagcacgccggtgtctacaagagcgtcattgccaacaagctgggcaaagctgcctgctatgcccacctgtatgtcacaggtgaggcaggcaccctcgtggtcagctgcacgcacagcctggcctctggcactacgtgggggctcagggaaaggggcctccacccagctcccttcccctccatcccctggggaccctcttgccttgcccctgcccctgcggctgagcccccaggccctagcctcctgccctgaggctcggtgatcctgtggggctgttgggcccttggacccagcagacattcgaactgcggctttcagatgtggtcccaggccctccagatggcgccccgcaggtggtggctgtgacggggaggatggtcacactcacatggaacccccccaggagtctggacatggccatcgacccggactccctgacgtacacagtgcagcaccaggtgctgggctcggaccagtggacggcactggtcacaggcctgcgggagccagggtgggcagccacagggctgcgtaagggggtccagcacatcttccgggtcctcagcaccactgtcaagagcagcagcaagccctcacccccttctgagcctgtgcagctgctggagcacggtgagcctgggtgctcctgtcgggtgggggtgggagctgctgggatggggaatgggggccctgtggtggaggctcaagggatggcctggacatggtaactggcaggagcagcctagccgggcgggaccttggcccatctgtacacttccttctccctcctgaaagcagcagggcacggtggctgaagctcaggctttgggatcgggcctgctggggtccaaccccacaacctcagctttgctgctctctggctgtgttcccctgacaaatcgctaaacctctctgagcttcagctttcccatctgtaaaaacggaactcaagtgttgatgaggggtgttagaggagtggtgggtgctgaggacctgatgtcaagcccagcacagagcctgcgctctcctcctcccaggcccaaccctggaggaggcccctgccatgctggacaaaccagacatcgtgtatgtggtggagggacagcctgccagcgtcaccgtcacattcaaccatgtggaggcccaggtcgtctggaggaggtgggcccctttcccacatgtggcagcccaggtctggcccagcctggccggaatgccctggggcaagatctgggtgacctccctgtcatgtgtcccctagctgccgaggggccctcctagaggcacgggccggtgtgtacgagctgagccagccagatgatgaccagtactgtcttcggatctgccgggtgagccgccgggacatgggggccctcacctgcaccgcccgaaaccgtcacggcacacagacctgctcggtcacattggagctggcaggtgggtgacagcgggccttcttcctagcctccctccaaggcccaaagctctctactcacacccccaggtacacaacctgcctgacactgctgcagatccaaacccatgtcctctggtcaggcctgtccatgtcatggctatacaaataccatattagtaataatgacaacaatcatactaacaagatttattggccagacgcggtggctcacacctgtaatctcagcactttgggaggccgacacaggtggattacctgaggtcaggagttcgtgaccagcctcgccaacatggtgaaaccccatctctactaaaaatacaaaaattagctgggtgtggcggcaggtgcctgtagtcccagctacttgggaggctgaggcaggagaatcacttgaacctgggaggcagaggttgcagtgagccgagattgctccattgcacgctagcctgggcaacaagagcaaaactctgtctc

SEQ ID NO: 20279 - DNA, 1085 bp, Homo sapiens
  misc_feature 1..1085: note = ENST00000412982
  source 1..1085: mol_type = unassigned DNA
tatgctcagtggacgctccccgttctatgagccagacccccaggaaacggaggctcggattgtggggggccgctttgatgccttccagctgtaccccaatacatcccagagcgccaccctcttcttgcgaaaggttctctctgtacatccctggagccggccctccctgcaggactgcctggcccacccatggttgcaggacgcctacctgatgaagctgcgccgccagacgctcaccttcaccaccaaccggctcaaggagttcctgggcgagcagcggcggcgccgggctgaggctgccacccgccacaagatgtctaaagcagctcctgccaaaaagccagtggctgtggccccagctcctggatgtaccctggacatcaatgacccacaggtccagagtgcggccattcgtatccaggcctcttaccggggccacaggtcccggaaggagctgcgcgagaaggggccgccgcgggtgctggagccgctgaaggacgtggtgctgatcgaaggcagcgcggccaagctcacttgccgcatttcggctttcccggacccattcatccgctggagtaaggacggcaaggagctacgtgacggtcccaagtaccgctacgtcttcgaggaccctgacgtggtggcactggtggtgcgcgacggcgagctggcagacctgggccagtacagcatcaacgtcaccaaccccttcggccagtgctccgactcggcgcgcatcctcgtggaagtcccgacgaagattcaaaagggacccgacaacactaaggcgcgcaaaggcaccaccgtgacgctgactgcggagatcctgggagagcctgcgcccgacgtaggctggaccaaggacggggaggacatcgaggaggatgacagggtgttcttcgagatcggcagcaccaccacgacgctgaccattcgccgggccacgcctcaggacagcggcaagtacgaggtgtacgtggagaacagcctgggcatggaccagagcttcgctcgcgtcgacgtggcctgaacggcacccccggaccttccgccctggcgccgagcccgggggtggtgggacccac

SEQ ID NO: 20280 - DNA, 408 bp, Homo sapiens
  misc_feature 1..408: note = ENST00000475104
  source 1..408: mol_type = unassigned DNA
ggggtttcgctcccctttccttccgctagtcccgacgaagattcaaaagggacccgacaacactaaggcgcgcaaaggcaccaccgtgacgctgactgcggagatcctgggagagcctgcgcccgacgtaggctggaccaaggacggggaggacatcgaggaggatgacagggtgttcttcgagatcggcagcaccaccacgacgctgaccattcgccgggccacgcctcaggacagcggcaagtacgaggtgtacgtggagaacagcctgggcatggaccagagcttcgctcgcgtcgacgtggcctgaacggcacccccggaccttccgccctggcgccgagcccgggggtggtgggacccacagccctccaccagcttgcttaataaagctgctctctgaccctc

SEQ ID NO: 20281 - DNA, 815 bp, Homo sapiens
  misc_feature 1..815: note = ENST00000617028
  source 1..815: mol_type = unassigned DNA
atgtctaaagcagctcctgccaaaaagccagtggctgtggccccagctcctggatgtaccctggacatcaatgacccacaggtccagagtgcggccattcgtatccaggcctcttaccggggccacaggtcccggaaggagctgcgcgagaaggggccgccgcgggtgctggagccgctgaaggacgtggtgctgatcgaaggcagcgcggccaagctcacttgccgcatttcggctttcccggacccattcatccgctggagtaaggacggcaaggagctacgtgacggtcccaagtaccgctacgtcttcgaggaccctgacgtggtggcactggtggtgcgcgacggcgagctggcagacctgggccagtacagcatcaacgtcaccaaccccttcggccagtgctccgactcggcgcgcatcctcgtggaagtcccgacgaagattcaaaagggacccgacaacactaaggcgcgcaaaggcaccaccgtgacgctgactgcggagatcctgggagagcctgcgcccgacgtaggctggaccaaggacggggaggacatcgaggaggatgacagggtgttcttcgagatcggcagcaccaccacgacgctgaccattcgccgggccacgcctcaggacagcggcaagtacgaggtgtacgtggagaacagcctgggcatggaccagagcttcgctcgcgtcgacgtggcctgaacggcacccccggaccttccgccctggcgccgagcccgggggtggtgggacccacagccctccaccagcttgcttaataaagctgctctctgaccctc

SEQ ID NO: 20282 - DNA, 2963 bp, Homo sapiens
  misc_feature 1..2963: note = ENST00000245222
  source 1..2963: mol_type = unassigned DNA
cgactgactagccgggcgataacggcagagagcatagagcgcaggaacaagcgcaacgtccaagagggaagggccagcacgtcgggggcctctctggccctacccaggccgtgttctcgatagctttccggaagaaagggatctgggagcgagatgcgtgtagctagcacgatgcgtcgcgcggtgacgctctggcccgacgccgacggcctctcagtggctcccggaggacccggcgggcccagtgttggagagctgaaggtcaggccaggacagtgagacctgactccttgctcctaccagcctactatggcttaagacccagggccagggtcccgttgatgtaacagagcagaggaccagcagatgaatggacaccttgaagcagaggagcagcaggaccagaggccagaccaggagctgaccgggagctggggccacgggcctaggagcaccctggtcagggctaaggccatggccccgcccccaccgccactggctgccagcaccccgctcctccatggcgagtttggctcctacccagcccgaggcccacgctttgccctcacccttacatcgcaggccctgcacatacagcggctgcgccccaaacctgaagccaggccccggggtggcctggtcccgttggccgaggtctcaggctgctgcaccctgcgaagccgcagcccctcagactcagcggcctacttctgcatctacacctaccctcggggccggcgcggggcccggcgcagagccactcgcaccttccgggcagatggggccgccacctacgaagagaaccgtgccgaggcccagcgctgggccactgccctcacctgtctgctccgaggactgccactgcccggggatggggagatcacccctgacctgctacctcggccgccccggttgcttctattggtcaatccctttgggggtcggggcctggcctggcagtggtgtaagaaccacgtgcttcccatgatctctgaagctgggctgtccttcaacctcatccagacagaacgacagaaccacgcccgggagctggtccaggggctgagcctgagtgagtgggatggcatcgtcacggtctcgggagacgggctgctccatgaggtgctgaacgggctcctagatcgccctgactgggaggaagctgtgaagatgcctgtgggcatcctcccctgcggctcgggcaacgcgctggccggagcagtgaaccagcacgggggatttgagccagccctgggcctcgacctgttgctcaactgctcactgttgctgtgccggggtggtggccacccactggacctgctctccgtgacgctggcctcgggctcccgctgtttctccttcctgtctgtggcctggggcttcgtgtcagatgtggatatccagagcgagcgcttcagggccttgggcagtgcccgcttcacactgggcacggtgctgggcctcgccacactgcacacctaccgcggacgcctctcctacctccccgccactgtggaacctgcctcgcccacccctgcccatagcctgcctcgtgccaagtcggagctgaccctaaccccagacccagccccgcccatggcccactcacccctgcatcgttctgtgtctgacctgcctcttcccctgccccagcctgccctggcctctcctggctcgccagaacccctgcccatcctgtccctcaacggtgggggcccagagctggctggggactggggtggggctggggatgctccgctgtccccggacccactgctgtcttcacctcctggctctcccaaggcagctctacactcacccgtctccgaaggggcccccgtaattcccccatcctctgggctcccacttcccacccctgatgcccgggtaggggcctccacctgcggcccgcccgaccacctgctgcctccgctgggcaccccgctgcccccagactgggtgacgctggagggggactttgtgctcatgttggccatctcgcccagccacctaggcgctgacctggtggcagctccgcatgcgcgcttcgacgacggcctggtgcacctgtgctgggtgcgtagcggcatctcgcgggctgcgctgctgcgccttttcttggccatggagcgtggtagccacttcagcctgggctgtccgcagctgggctacgccgcggcccgtgccttccgcctagagccgctcacaccacgcggcgtgctcacagtggacggggagcaggtggagtatgggccgctacaggcacagatgcaccctggcatcggtacactgctcactgggcctcctggctgcccggggcgggagccctgaaactaaacaagcttggtacccgccgggggcggggcctacattccaatggggcggagcctgagctagggggtgtggcctggctgctagagttgtggtggcaggggccctggccccgtctcaggattgcgctcgctttcatgggaccagacgtgatgctggaaggtgggcgtcgtcacggttaaagagaaatgggctcgtcccgagggtagtgcctgatcaatgagggcggggcctggcgtctgatctggggccgcccttacggggcagggctcagtcctgacgcttgccacctgctcctacccggccaggatggctgagggcggagtctattttacgcgtcgcccaatgacaggacctggaatgtactggctggggtaggcctcagtgagtcggccggtcagggcccgcagcctcgccccatccactccggtgcctccatttagctggccaatcagcccaggaggggcaggttccccggggccggcgctaggatttgcactaatgttcctctccccgcgggtgggggcggggaaattcatatcccctgttcgtctcatgcgcgtcctccgtccccaatctaaaaagcaattgaaaaggtctatgcaataaaggcagtcgcttcattcctctca

SEQ ID NO: 20283 - DNA, 1394 bp, Homo sapiens
  misc_feature 1..1394: note = ENST00000601712
  source 1..1394: mol_type = unassigned DNA
gtagctagcacgatgcgtcgcgcggtgacgctctggcccgacgccgacggcctctcagtggctcccggaggacccggcgggcccagtgttggagagctgaaggtcaggccaggacagtgagacctgactccttgctcctaccagcctactatggcttaagacccagggccagggtcccgttgatgtaacagagcagaggaccagcagatgaatggacaccttgaagcagaggagcagcaggaccagggctaaggccatggccccgcccccaccgccactggctgccagcaccccgctcctccatggcgagtttggctcctacccagcccgaggcccacgctttgccctcacccttacatcgcaggccctgcacatacagcggctgcgccccaaacctgaagccaggccccggggtggcctggtcccgttggccgaggtctcaggctgctgcaccctgcgaagccgcagcccctcagactcagcggcctacttctgcatctacacctaccctcggggccggcgcggggcccggcgcagagccactcgcaccttccgggcagatggggccgccacctacgaagagaaccgtgccgaggcccagcgctgggccactgccctcacctgtctgctccgaggactgccactgcccggggatggggagatcacccctgacctgctacctcggccgccccggttgcttctattggtcaatccctttgggggtcggggcctggcctggcagtggtgtaagaaccacgtgcttcccatgatctctgaagctgggctgtccttcaacctcatccagacagaacgacagaaccacgcccgggagctggtccaggggctgagcctgagtgagtgggatggcatcgtcacggtctcgggagacgggctgctccatgaggtgctgaacgggctcctagatcgccctgactgggaggaagctgtgaagatgcctgtgggcatcctcccctgcggctcgggcaacgcgctggccggagcagtgaaccagcacggggggtaggttgaggataccacgaagggagggatgagcccctcctggggtgatagggacccctatatctcccactcagccaaacccacagtcagtcaagtaaatcagcctgcctgtgggatgctcacccccagctcctggacatttttgcctgcctgcttcccagctgtatcccgagcgcccagaactctgcctggcatgggaggcactcagtgaattgtagggagcaaatgaaagatgaccaggaacctggccccgtaaggagtcgcctggaggtggccccacggctgtggtgggcctgggccatggccttcgtggtctcattgccagctgctttcctacctgtctctttccccaacccctgtttgctccttccttc

SEQ ID NO: 20284 - DNA, 2136 bp, Homo sapiens
  misc_feature 1..2136: note = ENST00000600537
  source 1..2136: mol_type = unassigned DNA
agctagcacgatgcgtcgcgcggtgacgctctggcccgacgccgacggcctctcagtggctcccggaggacccggcgggcccagtgttggagagctgaaggtcaggccaggacagtgagacctgactccttgctcctaccagcctactatggcttaagacccagggccagggtcccgttgatgtaacagagcagaggaccagcagatgaatggacaccttgaagcagaggagcagcaggaccaggccctgcacatacagcggctgcgccccaaacctgaagccaggccccggggtggcctggtcccgttggccgaggtctcaggctgctgcaccctgcgaagccgcagcccctcagactcagcggcctacttctgcatctacacctaccctcggggccggcgcggggcccggcgcagagccactcgcaccttccgggcagatggggccgccacctacgaagagaaccgtgccgaggcccagcgctgggccactgccctcacctgtctgctccgaggactgccactgcccggggatggggagatcacccctgacctgctacctcggccgccccggttgcttctattggtcaatccctttgggggtcggggcctggcctggcagtggtgtaagaaccacgtgcttcccatgatctctgaagctgggctgtccttcaacctcatccagacagaacgacagaaccacgcccgggagctggtccaggggctgagcctgagtgagtgggatggcatcgtcacggtctcgggagacgggctgctccatgaggtgctgaacgggctcctagatcgccctgactgggaggaagctgtgaagatgcctgtgggcatcctcccctgcggctcgggcaacgcgctggccggagcagtgaaccagcacgggggatttgagccagccctgggcctcgacctgttgctcaactgctcactgttgctgtgccggggtggtggccacccactggacctgctctccgtgacgctggcctcgggctcccgctgtttctccttcctgtctgtggcctggggcttcgtgtcagatgtggatatccagagcgagcgcttcagggccttgggcagtgcccgcttcacactgggcacggtgctgggcctcgccacactgcacacctaccgcggacgcctctcctacctccccgccactgtggaacctgcctcgcccacccctgcccatagcctgcctcgtgccaagtcggagctgaccctaaccccagacccagccccgcccatggcccactcacccctgcatcgttctgtgtctgacctgcctcttcccctgccccagcctgccctggcctctcctggctcgccagaacccctgcccatcctgtccctcaacggtgggggcccagagctggctggggactggggtggggctggggatgctccgctgtccccggacccactgctgtcttcacctcctggctctcccaaggcagctctacactcacccgtctccgaaggggcccccgtaattcccccatcctctgggctcccacttcccacccctgatgcccgggtaggggcctccacctgcggcccgcccgaccacctgctgcctccgctgggcaccccgctgcccccagactgggtgacgctggagggggactttgtgctcatgttggccatctcgcccagccacctaggcgctgacctggtggcagctccgcatgcgcgcttcgacgacggcctggtgcacctgtgctgggtgcgtagcggcatctcgcgggctgcgctgctgcgccttttcttggccatggagcgtggtagccacttcagcctgggctgtccgcagctgggctacgccgcggcccgtgccttccgcctagagccgctcacaccacgcggcgtgctcacagtggacggggagcaggtggagtatgggccgctacaggcacagatgcaccctggcatcggtacactgctcactgggcctcctggctgcccggggcgggagccctgaaactaaacaagcttggtacccgccgggggcggggcctacattccaatggggcggagcctgagctagggggtgtggcctggctgctagagttgtggtggcaggggccctggccccgtctcaggattgcgctcgctttcatggga

SEQ ID NO: 20285 - DNA, 2866 bp, Homo sapiens
  misc_feature 1..2866: note = ENST00000598088
  source 1..2866: mol_type = unassigned DNA
agtgttggaggtgaggaggcggggctggcagggctagtcggggcatctggaaatttccgaccccacgcttcgggcgtttccttatcaggttcaccgctccctgatctcgcgctgcacttcgtaggcgcagccgctgcttgggaagtcctacttaagagctgaaggtcaggccaggacagtgagacctgactccttgctcctaccagcctactatggcttaagacccagggccagggtcccgttgatgtaacagagcagaggaccagcagatgaatggacaccttgaagcagaggagcagcaggaccagaggccagaccaggagctgaccgggagctggggccacgggcctaggagcaccctggtcagggctaaggccatggccccgcccccaccgccactggctgccagcaccccgctcctccatggcgagtttggctcctacccagcccgaggcccacgctttgccctcacccttacatcgcaggccctgcacatacagcggctgcgccccaaacctgaagccaggccccggggtggcctggtcccgttggccgaggtctcaggctgctgcaccctgcgaagccgcagcccctcagactcagcggcctacttctgcatctacacctaccctcggggccggcgcggggcccggcgcagagccactcgcaccttccgggcagatggggccgccacctacgaagagaaccgtgccgaggcccagcgctgggccactgccctcacctgtctgctccgaggactgccactgcccggggatggggagatcacccctgacctgctacctcggccgccccggttgcttctattggtcaatccctttgggggtcggggcctggcctggcagtggtgtaagaaccacgtgcttcccatgatctctgaagctgggctgtccttcaacctcatccagacagaacgacagaaccacgcccgggagctggtccaggggctgagcctgagtgagtgggatggcatcgtcacggtctcgggagacgggctgctccatgaggtgctgaacgggctcctagatcgccctgactgggaggaagctgtgaagatgcctgtgggcatcctcccctgcggctcgggcaacgcgctggccggagcagtgaaccagcacgggggatttgagccagccctgggcctcgacctgttgctcaactgctcactgttgctgtgccggggtggtggccacccactggacctgctctccgtgacgctggcctcgggctcccgctgtttctccttcctgtctgtggcctggggcttcgtgtcagatgtggatatccagagcgagcgcttcagggccttgggcagtgcccgcttcacactgggcacggtgctgggcctcgccacactgcacacctaccgcggacgcctctcctacctccccgccactgtggaacctgcctcgcccacccctgcccatagcctgcctcgtgccaagtcggagctgaccctaaccccagacccagccccgcccatggcccactcacccctgcatcgttctgtgtctgacctgcctcttcccctgccccagcctgccctggcctctcctggctcgccagaacccctgcccatcctgtccctcaacggtgggggcccagagctggctggggactggggtggggctggggatgctccgctgtccccggacccactgctgtcttcacctcctggctctcccaaggcagctctacactcacccgtctccgaaggggcccccgtaattcccccatcctctgggctcccacttcccacccctgatgcccgggtaggggcctccacctgcggcccgcccgaccacctgctgcctccgctgggcaccccgctgcccccagactgggtgacgctggagggggactttgtgctcatgttggccatctcgcccagccacctaggcgctgacctggtggcagctccgcatgcgcgcttcgacgacggcctggtgcacctgtgctgggtgcgtagcggcatctcgcgggctgcgctgctgcgccttttcttggccatggagcgtggtagccacttcagcctgggctgtccgcagctgggctacgccgcggcccgtgccttccgcctagagccgctcacaccacgcggcgtgctcacagtggacggggagcaggtggagtatgggccgctacaggcacagatgcaccctggcatcggtacactgctcactgggcctcctggctgcccggggcgggagccctgaaactaaacaagcttggtacccgccgggggcggggcctacattccaatggggcggagcctgagctagggggtgtggcctggctgctagagttgtggtggcaggggccctggccccgtctcaggattgcgctcgctttcatgggaccagacgtgatgctggaaggtgggcgtcgtcacggttaaagagaaatgggctcgtcccgagggtagtgcctgatcaatgagggcggggcctggcgtctgatctggggccgcccttacggggcagggctcagtcctgacgcttgccacctgctcctacccggccaggatggctgagggcggagtctattttacgcgtcgcccaatgacaggacctggaatgtactggctggggtaggcctcagtgagtcggccggtcagggcccgcagcctcgccccatccactccggtgcctccatttagctggccaatcagcccaggaggggcaggttccccggggccggcgctaggatttgcactaatgttcctctccccgcgggtgggggcggggaaattcatatcccctgttcgtctcatgcgcgtcctccgtccccaatctaaaaagcaattgaaaaggtctatgcaataaaggcagtcgcttcattcctctca

SEQ ID NO: 20286 - DNA, 1493 bp, Homo sapiens
  misc_feature 1..1493: note = ENST00000426514
  source 1..1493: mol_type = unassigned DNA
atgaatggacaccttgaagcagaggagcagcaggaccagagatcacccctgacctgctacctcggccgccccggttgcttctattggtcaatccctttgggggtcggggcctggcctggcagtggtgtaagaaccacgtgcttcccatgatctctgaagctgggctgtccttcaacctcatccagacagaacgacagaaccacgcccgggagctggtccaggggctgagcctgagtgagtgggatggcatcgtcacggtctcgggagacgggctgctccatgaggtgctgaacgggctcctagatcgccctgactgggaggaagctgtgaagatgcctgtgggcatcctcccctgcggctcgggcaacgcgctggccggagcagtgaaccagcacgggggatttgagccagccctgggcctcgacctgttgctcaactgctcactgttgctgtgccggggtggtggccacccactggacctgctctccgtgacgctggcctcgggctcccgctgtttctccttcctgtctgtggcctggggcttcgtgtcagatgtggatatccagagcgagcgcttcagggccttgggcagtgcccgcttcacactgggcacggtgctgggcctcgccacactgcacacctaccgcggacgcctctcctacctccccgccactgtggaacctgcctcgcccacccctgcccatagcctgcctcgtgccaagtcggagctgaccctaaccccagacccagccccgcccatggcccactcacccctgcatcgttctgtgtctgacctgcctcttcccctgccccagcctgccctggcctctcctggctcgccagaacccctgcccatcctgtccctcaacggtgggggcccagagctggctggggactggggtggggctggggatgctccgctgtccccggacccactgctgtcttcacctcctggctctcccaaggcagctctacactcacccgtctccgaaggggcccccgtaattcccccatcctctgggctcccacttcccacccctgatgcccgggtaggggcctccacctgcggcccgcccgaccacctgctgcctccgctgggcaccccgctgcccccagactgggtgacgctggagggggactttgtgctcatgttggccatctcgcccagccacctaggcgctgacctggtggcagctccgcatgcgcgcttcgacgacggcctggtgcacctgtgctgggtgcgtagcggcatctcgcgggctgcgctgctgcgccttttcttggccatggagcgtggtagccacttcagcctgggctgtccgcagctgggctacgccgcggcccgtgccttccgcctagagccgctcacaccacgcggcgtgctcacagtggacggggagcaggtggagtatgggccgctacaggcacagatgcaccctggcatcggtacactgctcactgggcctcctggctgcccggggcgggagccctga

SEQ ID NO: 20287 - DNA, 1542 bp, Homo sapiens
  misc_feature 1..1542: note = ENST00000597434
  source 1..1542: mol_type = unassigned DNA
atctctgggcctttgttacgcgtgttagagtctctgtctttgcagctaaagacctcctccctcacgccccttttcttttgtgaattcaatggatgagacaggcccactctcccttaacaaagatggcgacaacggcgctgtctatggggccgcgacgtcgtctccgctgcgcgtcggccctcacccacgatggcggccagtctcccgaagcgcgaggccccgcccagctctcggcctctcccgcggccggtccctgcaccaagctcgcgagctgactggctccaccccccgcgccctcgtattggtgcggcccaggccggctgcacggccattggctgagcggatgcacaccctccccccacccctaggtctgatgggggctgttggtgctgacttgcgggaccgcctggaggaggacccggcgtaggccagaccaggagctgaccgggagctggggccacgggcctaggagcaccctggtcagggctaaggccatggccccgcccccaccgccactggctgccagcaccccgctcctccatggcgagtttggctcctacccagcccgaggcccacgctttgccctcacccttacatcgcaggccctgcacatacagcggctgcgccccaaacctgaagccaggccccggggtggcctggtcccgttggccgaggtctcaggctgctgcaccctgcgaagccgcagcccctcagactcagcggcctacttctgcatctacacctaccctcggggccggcgcggggcccggcgcagagccactcgcaccttccgggcagatggggccgccacctacgaagagaaccgtgccgaggcccagcgctgggccactgccctcacctgtctgctccgaggactgccactgcccggggatggggagatcacccctgacctgctacctcggccgccccggttgcttctattggtcaatccctttgggggtcggggcctggcctggcagtggtgtaagaaccacgtgcttcccatgatctctgaagctgggctgtccttcaacctcatccagacagaacgacagaaccacgcccgggagctggtccaggggctgagcctgagtgagtgggatggcatcgtcacggtctcgggagacgggctgctccatgaggtgctgaacgggctcctagatcgccctgactgggaggaagctgtgaagatgcctgtgggcatcctcccctgcggctcgggcaacgcgctggccggagcagtgaaccagcacgggggcccgcgggaggactcagactccagcacttccagcagcgcctgccctctatggacgacagcccggagctgcccacgggctgcagccagtatgccagggagctgccctcttcttccacaacagctggctctggggttctcaagatttattcaggatcgtgttaacggaggcggtgggaggatagggtccctgacgtgccggggacacacacagagaaccctccccgcccccgcaagggaggggggaggctcgctttttcttaaaaatataaatgtatttatctgca

SEQ ID NO: 20288 - DNA, 565 bp, Homo sapiens
  misc_feature 1..565: note = ENST00000601704
  source 1..565: mol_type = unassigned DNA
gagcggatgcacaccctccccccacccctaggtctgatgggggctgttggtgctgacttgcgggaccgcctggaggaggacccggcgtgtgaggaggaggccagaccaggagctgaccgggagctggggccacgggcctaggagcaccctggtcagggctaaggccatggccccgcccccaccgccactggctgccagcaccccgctcctccatggcgagtttggctcctacccagcccgaggcccacgctttgccctcacccttacatcgcaggccctgcacatacagcggctgcgccccaaacctgaagccaggccccggggtggcctggtcccgttggccgaggtctcaggctgctgcaccctgcgaagccgcagcccctcagactcagcggcctacttctgcatctacacctaccctcggggccggcgcggggcccggcgcagagccactcgcaccttccgggcagatggggccgccacctacgaagagaaccgtgccgaggcccagcgctgggccactgccctcacctgtctgctccgaggactgccactgcccggggat

SEQ ID NO: 20289 - DNA, 713 bp, Homo sapiens
  misc_feature 1..713: note = ENST00000593308
  source 1..713: mol_type = unassigned DNA
cgtgtgaggagggtgcgggggtcggggcagggaccggagtctaggggactgagggaccaagaggaacagagactcaggcccgggactggggcaccggggtgggagatggaaatggaaaacctgggccaggactgaacccagccaggcctgggactgggttctggaaataagagtgcggatggcggtttgggggcccagggccagacacgcaggcctatggattggggaccaatggatggagacccaggtccaggtctcggggacccagggacagagacccaggcccaagactggaggacatctagggctctgtgcttgaacctgatttgaggttcccataatggggccagggcaggtttgggggtgaagcagacgtcctggacccgagagagccgctggggataggggggcagatgtagttcctaaggaggccagaccaggagctgaccgggagctggggccacgggcctaggagcaccctggtcagggctaaggccatggccccgcccccaccgccactggctgccagcaccccgctcctccatggcgagtttggctcctacccagcccgaggcccacgctttgccctcacccttacatcgcaggccctgcacatacagcggctgcgccccaaacctgaagccaggccccggggtggcctggtcccgttggccgaggtctcaggctgctgcaccctgcgaagccgcagcccc

SEQ ID NO: 20290 - DNA, 618 bp, Homo sapiens
  misc_feature 1..618: note = ENST00000599033
  source 1..618: mol_type = unassigned DNA
gggactgagggaccaagaggaacagagactcaggcccgggactggggcaccggggtgggagatggaaatggaaaacctgggccaggactgaacccagccaggcctgggactgggttctggaaataagagtgcggatggcggtttgggggcccagggccagacacgcaggcctatggattggggaccaatggatggagacccaggtccaggtctcggggacccagggacagagacccaggcccaagactggaggacatctagggctctgtgcttgaacctgatttgaggttcccataatggggccagggcaggtttgggggtgaagcagacgtcctggacccgagagagccgctggggataggggggcagatgtagttcctaagggccctgcacatacagcggctgcgccccaaacctgaagccaggccccggggtggcctggtcccgttggccgaggtctcaggctgctgcaccctgcgaagccgcagcccctcagactcagcggcctacttctgcatctacacctaccctcggggccggcgcggggcccggcgcagagccactcgcaccttccgggcagatggggccgccacctacgaagagaaccgtgccgaggcc

SEQ ID NO: 20291 - DNA, 2683 bp, Homo sapiens
  misc_feature 1..2683: note = ENST00000599748
  source 1..2683: mol_type = unassigned DNA
ggggaacaaaggtgagcgaaaggaggaggcagaatccgggcagagggcagggagagggcctgtggggaagggacctcagtcctgctcccacccgctccctggagagcaggcggccagacacccagaggccagaccaggagctgaccgggagctggggccacgggcctaggagcaccctggtcagggctaaggccatggccccgcccccaccgccactggctgccagcaccccgctcctccatggcgagtttggctcctacccagcccgaggcccacgctttgccctcacccttacatcgcaggccctgcacatacagcggctgcgccccaaacctgaagccaggccccggggtggcctggtcccgttggccgaggtctcaggctgctgcaccctgcgaagccgcagcccctcagactcagcggcctacttctgcatctacacctaccctcggggccggcgcggggcccggcgcagagccactcgcaccttccgggcagatggggccgccacctacgaagagaaccgtgccgaggcccagcgctgggccactgccctcacctgtctgctccgaggactgccactgcccggggatggggagatcacccctgacctgctacctcggccgccccggttgcttctattggtcaatccctttgggggtcggggcctggcctggcagtggtgtaagaaccacgtgcttcccatgatctctgaagctgggctgtccttcaacctcatccagacagaacgacagaaccacgcccgggagctggtccaggggctgagcctgagtgagtgggatggcatcgtcacggtctcgggagacgggctgctccatgaggtgctgaacgggctcctagatcgccctgactgggaggaagctgtgaagatgcctgtgggcatcctcccctgcggctcgggcaacgcgctggccggagcagtgaaccagcacgggggatttgagccagccctgggcctcgacctgttgctcaactgctcactgttgctgtgccggggtggtggccacccactggacctgctctccgtgacgctggcctcgggctcccgctgtttctccttcctgtctgtggcctggggcttcgtgtcagatgtggatatccagagcgagcgcttcagggccttgggcagtgcccgcttcacactgggcacggtgctgggcctcgccacactgcacacctaccgcggacgcctctcctacctccccgccactgtggaacctgcctcgcccacccctgcccatagcctgcctcgtgccaagtcggagctgaccctaaccccagacccagccccgcccatggcccactcacccctgcatcgttctgtgtctgacctgcctcttcccctgccccagcctgccctggcctctcctggctcgccagaacccctgcccatcctgtccctcaacggtgggggcccagagctggctggggactggggtggggctggggatgctccgctgtccccggacccactgctgtcttcacctcctggctctcccaaggcagctctacactcacccgtctccgaaggggcccccgtaattcccccatcctctgggctcccacttcccacccctgatgcccgggtaggggcctccacctgcggcccgcccgaccacctgctgcctccgctgggcaccccgctgcccccagactgggtgacgctggagggggactttgtgctcatgttggccatctcgcccagccacctaggcgctgacctggtggcagctccgcatgcgcgcttcgacgacggcctggtgcacctgtgctgggtgcgtagcggcatctcgcgggctgcgctgctgcgccttttcttggccatggagcgtggtagccacttcagcctgggctgtccgcagctgggctacgccgcggcccgtgccttccgcctagagccgctcacaccacgcggcgtgctcacagtggacggggagcaggtggagtatgggccgctacaggcacagatgcaccctggcatcggtacactgctcactgggcctcctggctgcccggggcgggagccctgaaactaaacaagcttggtacccgccgggggcggggcctacattccaatggggcggagcctgagctagggggtgtggcctggctgctagagttgtggtggcaggggccctggccccgtctcaggattgcgctcgctttcatgggaccagacgtgatgctggaaggtgggcgtcgtcacggttaaagagaaatgggctcgtcccgagggtagtgcctgatcaatgagggcggggcctggcgtctgatctggggccgcccttacggggcagggctcagtcctgacgcttgccacctgctcctacccggccaggatggctgagggcggagtctattttacgcgtcgcccaatgacaggacctggaatgtactggctggggtaggcctcagtgagtcggccggtcagggcccgcagcctcgccccatccactccggtgcctccatttagctggccaatcagcccaggaggggcaggttccccggggccggcgctaggatttgcactaatgttcctctccccgcgggtgggggcggggaaattcatatcccctgttcgtctcatgcgcgtcctccgtccccaatctaaaaagcaattgaaaaggtctatgcaataaaggcagtcgcttcattcctctca

SEQ ID NO: 20292 - DNA, 3085 bp, Homo sapiens
  misc_feature 1..3085: note = ENST00000599029
  source 1..3085: mol_type = unassigned DNA
gaaaggaggaggcagaatccgggcagagggcagggagagggcctgtggggaagggacctcagtcctgctcccacccgctccctggagagcaggcggccagacacccaggtcagtgctcagggaccagctcttggcccctgccccttgcaggcgctcgcatgtggctcctctcggaccccgtagtccctgtcatatcccttctctccagctgtctccatgcctgcctcgtacccctcctatttgctctcccttccactctgtcttgcctttctcgttggggtgaaaaagtcttactctcttaagtatctttcatcgcctgagtttcacctcattgaccctgtttgtctcctctcagtgtttctctggctctcagaccctatctctattgcgtttgtgattgttttgctgttttacccactgcaccgtatggggggtgggggtgtcggggaggtgtgtctttcagtctttgcatgtctgtttctgcatatccaatcccactatccattccccttcctgtgccttcttttcccccaaagcccgttatcatcacccaaccacctgtatatttcaatcctttctcttgtttatctattcctatgaaggcaaggatttggggctattttgtctcctgctgtgtttgctaggcctagcaccgtgattggcacataaagggtactgaatacttactggggaataaatgattggatgtttgcatgcccgggtctccggccccctctgggatgctggcctctgtcccgcatcctcaaggtctgcccacacctgtctgagcctgtctgtctctgatgctcctgtctcacctgccactgcccctcattgtctcctcctgtccacagcccctgcccctccctgcccctgccatggggtcctgaattctcaccccttctctcctcccttcccacagaggccagaccaggagctgaccgggagctggggccacgggcctaggagcaccctggtcagggctaaggccatggccccgcccccaccgccactggctgccagcaccccgctcctccatggcgagtttggctcctacccagcccgaggcccacgctttgccctcacccttacatcgcaggccctgcacatacagcggctgcgccccaaacctgaagccaggccccggggtggcctggtcccgttggccgaggtctcaggctgctgcaccctgcgaagccgcagcccctcagactcagcggcctacttctgcatctacacctaccctcggggccggcgcggggcccggcgcagagccactcgcaccttccgggcagatggggccgccacctacgaagagaaccgtgccgaggcccagcgctgggccactgccctcacctgtctgctccgaggactgccactgcccggggatggggagatcacccctgacctgctacctcggccgccccggttgcttctattggtcaatccctttgggggtcggggcctggcctggcagtggtgtaagaaccacgtgcttcccatgatctctgaagctgggctgtccttcaacctcatccagacagaacgacagaaccacgcccgggagctggtccaggggctgagcctgagtgagtgggatggcatcgtcacggtctcgggagacgggctgctccatgaggtgctgaacgggctcctagatcgccctgactgggaggaagctgtgaagatgcctgtgggcatcctcccctgcggctcgggcaacgcgctggccggagcagtgaaccagcacgggggatttgagccagccctgggcctcgacctgttgctcaactgctcactgttgctgtgccggggtggtggccacccactggacctgctctccgtgacgctggcctcgggctcccgctgtttctccttcctgtctgtggcctggggcttcgtgtcagatgtggatatccagagcgagcgcttcagggccttgggcagtgcccgcttcacactgggcacggtgctgggcctcgccacactgcacacctaccgcggacgcctctcctacctccccgccactgtggaacctgcctcgcccacccctgcccatagcctgcctcgtgccaagtcggagctgaccctaaccccagacccagccccgcccatggcccactcacccctgcatcgttctgtgtctgacctgcctcttcccctgccccagcctgccctggcctctcctggctcgccagaacccctgcccatcctgtccctcaacggtgggggcccagagctggctggggactggggtggggctggggatgctccgctgtccccggacccactgctgtcttcacctcctggctctcccaaggcagctctacactcacccgtctccgaaggggcccccgtaattcccccatcctctgggctcccacttcccacccctgatgcccgggtaggggcctccacctgcggcccgcccgaccacctgctgcctccgctgggcaccccgctgcccccagactgggtgacgctggagggggactttgtgctcatgttggccatctcgcccagccacctaggcgctgacctggtggcagctccgcatgcgcgcttcgacgacggcctggtgcacctgtgctgggtgcgtagcggcatctcgcgggctgcgctgctgcgccttttcttggccatggagcgtggtagccacttcagcctgggctgtccgcagctgggctacgccgcggcccgtgccttccgcctagagccgctcacaccacgcggcgtgctcacagtggacggggagcaggtggagtatgggccgctacaggcacagatgcaccctggcatcgcccgcgggaggactcagactccagcacttccagcagcgcctgccctctatggacgacagcccggagctgcccacgggctgcagccagtatgccagggagctgccctcttcttccacaacagctggctctggggttctcaagatttattcaggatcgtgttaacggaggcggtgggaggatagggtccctgacgtgccggggacacacacagagaaccctccccgcccccgcaagggaggggggaggctcgctttttcttaaaaatataaatgtatttatctgca

SEQ ID NO: 20293 - DNA, 1786 bp, Homo sapiens
  misc_feature 1..1786: note = ENST00000598574
  source 1..1786: mol_type = unassigned DNA
agtcctgctcccacccgctccctggagagcaggcggccagacacccaggtcagtgctcagggaccagctcttggcccctgccccttgcaggcgctcgcatgtggctcctctcggaccccgtagtccctgtcatatcccttctctccagctgtctccatgcctgcctcgtacccctcctatttgctctcccttccactctgtcttgcctttctcgttggggtgaaaaagtcttactctcttaagtatctttcatcgcctgagtttcacctcattgaccctgtttgtctcctctcagtgtttctctggctctcagaccctatctctattgcgtttgtgattgttttgctgttttacccactgcaccgtatggggggtgggggtgtcggggaggtgtgtctttcagtctttgcatgtctgtttctgcatatccaatcccactatccattccccttcctgtgccttcttttcccccaaagcccgttatcatcacccaaccacctgtatatttcaatcctttctcttgtttatctattcctatgaaggcaaggatttggggctattttgtctcctgctgtgtttgctaggcctagcaccgtgattggcacataaagggtactgaatacttactggggaataaatgattggatgtttgcatgcccgggtctccggccccctctgggatgctggcctctgtcccgcatcctcaaggtctgcccacacctgtctgagcctgtctgtctctgatgctcctgtctcacctgccactgcccctcattgtctcctcctgtccacagcccctgcccctccctgcccctgccatggggtcctgaattctcaccccttctctcctcccttcccacagaggccagaccaggagctgaccgggagctggggccacgggcctaggagcaccctggtcagggctaaggccatggccccgcccccaccgccactggctgccagcaccccgctcctccatggcgagtttggctcctacccagcccgaggcccacgctttgccctcacccttacatcgcaggccctgcacatacagcggctgcgccccaaacctgaagccaggccccggggtggcctggtcccgttggccgaggtctcaggctgctgcaccctgcgaagccgcagcccctcagactcagcggcctacttctgcatctacacctaccctcggggccggcgcggggcccggcgcagagccactcgcaccttccgggcagatggggccgccacctacgaagagaaccgtgccgaggcccagcgctgggccactgccctcacctgtctgctccgaggactgccactgcccggggatgggggtgaggtgctgggcagctgctctatcctggagccaccttggtgtctctgcagaatttcctccataggcagctgtgtctttatttttctgtgtgtctgggtgatgtatctctctggatccgttaggagtgatacacagggatgggctacagaaggaacaaaaagacaagaggaccggatgtggtggctcatgtctgtaatcctagcaatttgggaggctgaggcgggtggatcacctgaggtcaggagttcgagaccagcctggctaacatggtgaaaccccatgtctactaaaaatacaaaaaattagccgggtgtggtgctgcgcacctgtaatcccagctacaggagggtgaggcaggagaatcgcttgaacccaggaggcagaggttgcagtgagctgagatcgtgccattgcactccagcttgggcaacaagagcaaaactctgtctc

SEQ ID NO: 20294 - DNA, 2492 bp, Homo sapiens
  misc_feature 1..2492: note = ENST00000340932
  source 1..2492: mol_type = unassigned DNA
cgactgactagccgggcgataacggcagagagcatagagcgcaggaacaagcgcaacgtccaagagggaagggccagcacgtcgggggcctctctggccctacccaggccgtgttctcgatagctttccggaagaaagggatctgggagcgagatgcgtgtagctagcacgatgcgtcgcgcggtgacgctctggcccgacgccgacggcctctcagtggctcccggaggacccggcgggcccagtgttggagagctgaaggtcaggccaggacagtgagacctgactccttgctcctaccagcctactatggcttaagacccagggccagggtcccgttgatgtaacagagcagaggaccagcagatgaatggacaccttgaagcagaggagcagcaggaccagagatcacccctgacctgctacctcggccgccccggttgcttctattggtcaatccctttgggggtcggggcctggcctggcagtggtgtaagaaccacgtgcttcccatgatctctgaagctgggctgtccttcaacctcatccagacagaacgacagaaccacgcccgggagctggtccaggggctgagcctgagtgagtgggatggcatcgtcacggtctcgggagacgggctgctccatgaggtgctgaacgggctcctagatcgccctgactgggaggaagctgtgaagatgcctgtgggcatcctcccctgcggctcgggcaacgcgctggccggagcagtgaaccagcacgggggatttgagccagccctgggcctcgacctgttgctcaactgctcactgttgctgtgccggggtggtggccacccactggacctgctctccgtgacgctggcctcgggctcccgctgtttctccttcctgtctgtggcctggggcttcgtgtcagatgtggatatccagagcgagcgcttcagggccttgggcagtgcccgcttcacactgggcacggtgctgggcctcgccacactgcacacctaccgcggacgcctctcctacctccccgccactgtggaacctgcctcgcccacccctgcccatagcctgcctcgtgccaagtcggagctgaccctaaccccagacccagccccgcccatggcccactcacccctgcatcgttctgtgtctgacctgcctcttcccctgccccagcctgccctggcctctcctggctcgccagaacccctgcccatcctgtccctcaacggtgggggcccagagctggctggggactggggtggggctggggatgctccgctgtccccggacccactgctgtcttcacctcctggctctcccaaggcagctctacactcacccgtctccgaaggggcccccgtaattcccccatcctctgggctcccacttcccacccctgatgcccgggtaggggcctccacctgcggcccgcccgaccacctgctgcctccgctgggcaccccgctgcccccagactgggtgacgctggagggggactttgtgctcatgttggccatctcgcccagccacctaggcgctgacctggtggcagctccgcatgcgcgcttcgacgacggcctggtgcacctgtgctgggtgcgtagcggcatctcgcgggctgcgctgctgcgccttttcttggccatggagcgtggtagccacttcagcctgggctgtccgcagctgggctacgccgcggcccgtgccttccgcctagagccgctcacaccacgcggcgtgctcacagtggacggggagcaggtggagtatgggccgctacaggcacagatgcaccctggcatcggtacactgctcactgggcctcctggctgcccggggcgggagccctgaaactaaacaagcttggtacccgccgggggcggggcctacattccaatggggcggagcctgagctagggggtgtggcctggctgctagagttgtggtggcaggggccctggccccgtctcaggattgcgctcgctttcatgggaccagacgtgatgctggaaggtgggcgtcgtcacggttaaagagaaatgggctcgtcccgagggtagtgcctgatcaatgagggcggggcctggcgtctgatctggggccgcccttacggggcagggctcagtcctgacgcttgccacctgctcctacccggccaggatggctgagggcggagtctattttacgcgtcgcccaatgacaggacctggaatgtactggctggggtaggcctcagtgagtcggccggtcagggcccgcagcctcgccccatccactccggtgcctccatttagctggccaatcagcccaggaggggcaggttccccggggccggcgctaggatttgcactaatgttcctctccccgcgggtgggggcggggaaattcatatcccctgttcgtctcatgcgcgtcctccgtccccaatctaaaaagcaattgaaaaggtctatgcaataaaggcagtcgcttcattcctctcag

SEQ ID NO: 20295 - DNA, 6917 bp, Homo sapiens
  misc_feature 1..6917: note = ENST00000392056
  source 1..6917: mol_type = unassigned DNA
tccttcgcctgcactttccgtctttcttctctgggcgcccaccaacaatggatggcaactccctgctctcggtaccaagcaacttggagtcatcacggatgtatgacgttttggaaccgcagcagggcagaggctgtggcagctcaggaagcggcccggggaactccatcacagcctgtaagaaggttcttcgcagcaatagcctgctggagtcaacagactactggttgcagaatcagaggatgccctgccaaattggttttgtagaagacaagtctgaaaactgtgcttctgtctgctttgtgaatcttgatgtgaacaaggatgaatgcagcacagagcacctgcaacagaaactggtcaacgtttcaccagatcttccaaaacttatcagttccatgaatgtccaacaaccaaaagaaaatgaaattgttgtcctaagtgggttagcctctggaaatctccaggcagattttgaagtttcacagtgcccttggctgccagatatctgcttggtccaatgtgcaagagggaacagaccaaacagtaccaactgcatcatctttgaaatcaacaaatttctgattggtctggaactggtgcaggagcgacagctccacctggaaacaaacatcttgaaactggaggatgacacgaactgttccttatcttcaatcgaggaagactttctcaccgcttctgagcacttggaggaggaaagcgaggtggatgaatctaggaacgattatgaaaatataaatgtctcagccaatgttttggaaagtaaacagctaaagggagccacccaggtggaatggaattgcaacaaggaaaagtggctttatgctttggaagacaaatacatcaacaaatatcccacaccattgattaaaacagaacgatctccagaaaacctaacaaagaacacagccttgcagagtctagatccctcagccaagccatcacagtggaaaagagaagctgtggggaatgggagacaagccacacattattatcattcagaagcttttaaaggtcaaatggaaaaatcacaggcactgtatattccaaaagatgcttatttctccatgatggataaagatgtaccttctgcatgtgctgtggcagagcagagaagcaacctaaacccaggagaccatgaagacacaagaaacgctctccctcctagacaagatggagaagtcaccactggcaagtatgctacaaatttagcagaatccgtgctgcaggatgcatttattagattatctcaatctcagtccacattaccccaggaatctgcagtcagtgtttctgtaggaagttctctgcttcccagttgctattccacaaaagatacagtggtttctcggtcatggaatgagctccccaaaatcgtcgttgttcagagtccagatggcagtgatgctgccccacagccaggcatctcctcctggcctgagatggaagtctctgttgaaacctcaagcatcctctctggagagaactccagcagacaaccccagagtgctctagaagtggcgttagcttgtgcagccactgtgattggaactatttccagtccacaggccacagaaagactcaaaatggagcaagtggtctcgaactttcccccagggagcagtggtgcactgcaaactcaagcaccccaaggactcaaggaaccttccatcaatgagtactcctttccatctgctttgtgtggcatgactcaggtggccagtgccgtggctgtctgtggtctgggtgaaagagaagaggtgacatgctcagtggctccaagtggtagcctcccgcctgcagctgaggcttctgaagccatgcccccactttgtggtttagcaagcatggagcttggcaaggaagccattgccaagggattgctcaaggaggctgctctggttttaacaaggcctaatacctacagcagcattggagactttctggactccatgaacaggagaatcatggaaactgcttcaaagtctcagaccctgtgctcagaaaatgtcgtcaggaatgaactggcacataccctgtccaatgttatcctgaggcattccattgatgaagttcaccacaaaaatatgataatcgaccccaatgacaacaggcattcatctgaaattctggacaccttaatggaaagtacaaatcaactgcttttagatgtgatatgcttcacgttcaagaagatgagtcatattgtacggcttggtgaatgtcctgctgtcctttctaaggagaccatcagaaggagggagacagaaccaagctgccagccatctgatccgggtgctagtcaagcttggacaaaagccactgaatcctccagcagctctccacttagcaattcacacaacacgagtcttgtcatcaacaatcttgtggatggcatgtattcaaaacaagacaagggtggagtgaggccaggcctcttcaagaaccccacgctgcagtcacaattatcacgtagtcacagagtgcccgattcttcaactgctacaacatcctccaaggaaatatatctgaaaggaatagcaggagaggatacaaaaagccctcatcacagtgagaatgaatgcagagcctcttccgaaggacaaaggtccccaacggtcagccagtccagaagtggttcccaggaggctgaggagagtatccacccaaacacccaagaaaagtacaactgtgccacatctcgcatcaacgaagttcaagtcaacctgtccttgttaggggatgacctgctgcttcctgctcaatccacgcttcaaacaaagcatccagacatctactgcattacagactttgcggaagaattagcagacacggtcgtctccatggcaactgaaattgcagcgatttgccttgacaactccagtggaaaacaaccctggttttgtgcatggaaaagagggagtgagtttctgatgacacccaacgtaccctgccgatccttgaagaggaagaaagagagccaggggagcgggaccgctgtgaggaaacacaagcctccccggctcagtgagatcaagaggaagacggacgagcaccctgagcttaaagaaaagctgatgaacagggttgtggatgagtccatgaaccttgaagatgtcccagattctgtcaatctttttgccaatgaagtggcagccaagatcatgaacctaacggagttctctatggtggacggcatgtggcaggcgcagggctatccccggaatcggttactgagtggcgacaggtggagccggctgaaggcctccagctgcgaaagcattcctgaggaagactccgaggccagggcctatgtcaacagcctgggcttaatgagcacgctgagccagccggtcagcagggccagctctgtctccaagcagtcgagctgtgagagcatcaccgatgagttttccaggttcatggtgaaccagatggaaaatgaagggagaggatttgagttactgctggattactatgctggcaagaacgccagcagcattctgaactcagccatgcaacaggcgtgccggaaaagtgaccacctcagtgtgaggcctagctgtccctctaagcagtccagcacagagagcatcactgaggagttctacaggtacatgctgagggacatcgaaagagacagcagagaaagtgcctcctccagacggagcagccaggattggacagccggcctgctgtctccttctctgcgatccccagtgtgccacagacagtcgtccatgccagacagcagatccccatgctccaggctgacagtgaatgtgcccatcaaagccaactctttagatggctttgctcagaactgcccacaagatttcctaagcgtgcagccggtcagtagcgcgtcctcatccggtctctgcaaatctgactcttgcttgtatcggagaggtgggactgaccacatcaccaacatgttaattcatgaaacgtgggctagctccattgaggctctcatgcgcaagaacaaaatcattgtggatgatgcagaggaagctgacactgagcctgtttctggtggctctccctcgcaagcagagaagtgtgcaaatagattagctgcgagcaggatgtgcagtgggccaactctgcttgttcaggagtctctcgattgcccgaggaaagactctgttaccgaatgtaaacagcccccagtgtcatctttgagcaaaactgcttctcttacaaaccacagccctttagattctaaaaaagaaacttcctcgtgccaggaccctgtaccaataaaccacaaaaggcgatcactttgctcgagggaagtgcctttgattcagattgaaacagatcagagagaagcctgtgctggggaacctgaacccttcctttccaaaagcagcctcctagaggaagcagaagggcattcgaatgacaaaaacatcccagatgtggtgagaggtggagacacagccgtgagcgcttgtcaaatccatagtgacagccttgataccagagatgtaccagaggctgaagcctccacagaagccagagcccccgatgaggcccccaaccctccaagcagcagcgaggagagcacaggcagctggacccagcttgccaatgaggaagacaacccagatgacacaagtagctttctccagctcagtgagcgatccatgagcaatggcaacagtagtgccactagcagtcttggcattatggatctggacatttatcaggaaagcatgccatcttctcccatgattaatgaattagtagaagaaaagaagattcttaaaggacagtcagaaagcacagaggcacctgcatctggaccgcctacgggaacagccagcccccagaggagcctgctggtgatcaactttgacctggagccagagtgtccagatgccgagctccgagccactctgcagtggatagctgcctctgaactggggattcccaccatctactttaagaaatctcaggaaaacagaattgaaaagtttctagatgtcgtgcagctggttcatcggaagtcctggaaagtgggtgatatcttccatgcagttgtccagtactgcaaaatgcatgaggagcagaaggatgggagactgagtctctttgactggctcttggaactgggataataaggcagtctgccgtatagatcattccttccctttattccaacttagattacagtggtttgttctaaatgctctaaacattctcaaaacatcacatcacattagcagaactataaaaaaaaatctgctactcagatccactgcatacagaataagtcagaggaaaagcaaaatataggtctgtccaaattcatacaacttgtgggtgagttccaaagagcttggattagaagggctggacaaagagagaattcaatggggcccaaattagaatgcttataatgagacccaatctccaggaaaacaacactcacataagtttaatcatataaaatgatttgtaatgtctctaattagatgaatcaactagaaacaaactcagtggtcaaaataatttttaagagtattccgtaacctatattttacttttctgattatattaaggggctgccagcccggagaaatacttaagatatgggtgagaaatccccagacttttatacaaaagatttccactttcaaatcaatgtcagtagacattgataaaagtatagcagcatcctctactgaggtgatttcatttattccctgcagcccactgataaatatctcacttctcccaaatagtatgtggactcccagctaagcagaaaactattgtcattcaactgaagaagaggaagataaaagattgtcttgtttccatcactgtattacttgtgtaacatgattacataattcttatcctaagagaaagctttcatatttaaaaaaaagtcttttcagataaaatctgcttgtgtcttgaataatatgaaatacaaactttcactttattttattgtaaattataaagagattattgtcttaaataatatattgagttagcttcaagcttcctaaaatatgaagagattgttgtctaaagtcacatattgacattgagctcagtggcctgtttcatcacgtatgtgctgctacctgtacagcagacatgccgctccagtgacatttataatgacagaagcagggtaatggtcttgtgtttgacatgatcagttaggatcatagactttccctgactcgtagatattagccttgaattgggggaaaagaagactttgacacattttagttattttaataacagagatttactcttttgaaaaataaaggtatctaatgtctccctaataagtcttctttccttccaactaaatgacctacacggacttttattttcttgatcaaagaggtgtttattaaggacttctggataactatacttttactctatttttaaagatcacaaagtaattttaaatgtgaacaggttcccataccatgaatgctggcctcaccttctctatcatccacattttgaaatgcaaagaaagctcccttgtaagccatacttccttccccactcccatcctaggatacttgcccagtgctcattaggcatttcttattcagatagtccaaatttaggttattatgcttaatttgacacattaactaaatgcccagttttaaaatatatccatcaattcacgctgaaatgtgcttctttgtgctatcaaatggaatagaatacacttattttttaaacaatcccagaatactgtgtgtagacttttgttgtgctcaaataaatgtttacttatcttacaaagctcaaatactggattgtaaccatgtgatgaagttatctatgttgtacctaacattgcaaattaatcaataaatctctgttgtcagattgtt

SEQ ID NO: 20296 - DNA, 6804 bp, Homo sapiens
  misc_feature 1..6804: note = ENST00000344657
  source 1..6804: mol_type = unassigned DNA
gtctttcttctctgggcgcccaccaacaatggatggcaactccctgctctcggtaccaagcaacttggagtcatcacggatgtatgacgttttggaaccgcagcagggcagaggctgtggcagctcaggaagcggcccggggaactccatcacagcctgtaagaaggttcttcgcagcaatagcctgctggagtcaacagactactggttgcagaatcagaggatgccctgccaaattggttttgtagaagacaagtctgaaaactgtgcttctgtctgctttgtgaatcttgatgtgaacaaggatgaatgcagcacagagcacctgcaacagaaactggtcaacgtttcaccagatcttccaaaacttatcagttccatgaatgtccaacaaccaaaagaaaatgaaattgttgtcctaagtgggttagcctctggaaatctccaggcagattttgaagtttcacagtgcccttggctgccagatatctgcttggtccaatgtgcaagagggaacagaccaaacagtaccaactgcatcatctttgaaatcaacaaatttctgattggtctggaactggtgcaggagcgacagctccacctggaaacaaacatcttgaaactggaggatgacacgaactgttccttatcttcaatcgaggaagactttctcaccgcttctgagcacttggaggaggaaagcgaggtggatgaatctaggaacgattatgaaaatataaatgtctcagccaatgttttggaaagtaaacagctaaagggagccacccaggtggaatggaattgcaacaaggaaaagtggctttatgctttggaagacaaatacatcaacaaatatcccacaccattgattaaaacagaacgatctccagaaaacctaacaaagaacacagccttgcagagtctagatccctcagccaagccatcacagtggaaaagagaagctgtggggaatgggagacaagccacacattattatcattcagaagcttttaaaggtcaaatggaaaaatcacaggcactgtatattccaaaagatgcttatttctccatgatggataaagatgtaccttctgcatgtgctgtggcagagcagagaagcaacctaaacccaggagaccatgaagacacaagaaacgctctccctcctagacaagatggagaagtcaccactggcaagtatgctacaaatttagcagaatccgtgctgcaggatgcatttattagattatctcaatctcagtccacattaccccaggaatctgcagtcagtgtttctgtaggaagttctctgcttcccagttgctattccacaaaagatacagtggtttctcggtcatggaatgagctccccaaaatcgtcgttgttcagagtccagatggcagtgatgctgccccacagccaggcatctcctcctggcctgagatggaagtctctgttgaaacctcaagcatcctctctggagagaactccagcagacaaccccagagtgctctagaagtggcgttagcttgtgcagccactgtgattggaactatttccagtccacaggccacagaaagactcaaaatggagcaagtggtctcgaactttcccccagggagcagtggtgcactgcaaactcaagcaccccaaggactcaaggaaccttccatcaatgagtactcctttccatctgctttgtgtggcatgactcaggtggccagtgccgtggctgtctgtggtctgggtgaaagagaagaggtgacatgctcagtggctccaagtggtagcctcccgcctgcagctgaggcttctgaagccatgcccccactttgtggtttagcaagcatggagcttggcaaggaagccattgccaagggattgctcaaggaggctgctctggttttaacaaggcctaatacctacagcagcattggagactttctggactccatgaacaggagaatcatggaaactgcttcaaagtctcagaccctgtgctcagaaaatgtcgtcaggaatgaactggcacataccctgtccaatgttatcctgaggcattccattgatgaagttcaccacaaaaatatgataatcgaccccaatgacaacaggcattcatctgaaattctggacaccttaatggaaagtacaaatcaactgcttttagatgtgatatgcttcacgttcaagaagatgagtcatattgtacggcttggtgaatgtcctgctgtcctttctaaggagaccatcagaaggagggagacagaaccaagctgccagccatctgatccgggtgctagtcaagcttggacaaaagccactgaatcctccagcagctctccacttagcaattcacacaacacgagtcttgtcatcaacaatcttgtggatggcatgtattcaaaacaagacaagggtggagtgaggccaggcctcttcaagaaccccacgctgcagtcacaattatcacgtagtcacagagtgcccgattcttcaactgctacaacatcctccaaggaaatatatctgaaaggaatagcaggagaggatacaaaaagccctcatcacagtgagaatgaatgcagagcctcttccgaaggacaaaggtccccaacggtcagccagtccagaagtggttcccaggaggctgaggagagtatccacccaaacacccaagaaaagtacaactgtgccacatctcgcatcaacgaagttcaagtcaacctgtccttgttaggggatgacctgctgcttcctgctcaatccacgcttcaaacaaagcatccagacatctactgcattacagactttgcggaagaattagcagacacggtcgtctccatggcaactgaaattgcagcgatttgccttgacaactccagtggaaaacaaccctggttttgtgcatggaaaagagggagtgagtttctgatgacacccaacgtaccctgccgatccttgaagaggaagaaagagagccaggggagcgggaccgctgtgaggaaacacaagcctccccggctcagtgagatcaagaggaagacggacgagcaccctgagcttaaagaaaagctgatgaacagggttgtggatgagtccatgaaccttgaagatgtcccagattctgtcaatctttttgccaatgaagtggcagccaagatcatgaacctaacggagttctctatggtggacggcatgtggcaggcgcagggctatccccggaatcggttactgagtggcgacaggtggagccggctgaaggcctccagctgcgaaagcattcctgaggaagactccgaggccagggcctatgtcaacagcctgggcttaatgagcacgctgagccagccggtcagcagggccagctctgtctccaagcagtcgagctgtgagagcatcaccgatgagttttccaggttcatggtgaaccagatggaaaatgaagggagaggatttgagttactgctggattactatgctggcaagaacgccagcagcattctgaactcagccatgcaacaggcgtgccggaaaagtgaccacctcagtgtgaggcctagctgtccctctaagcagtccagcacagagagcatcactgaggagttctacaggtacatgctgagggacatcgaaagagacagcagagaaagtgcctcctccagacggagcagccaggattggacagccggcctgctgtctccttctctgcgatccccagtgtgccacagacagtcgtccatgccagacagcagatccccatgctccaggctgacagtgaatgtgcccatcaaagccaactctttagatggctttgctcagaactgcccacaagatttcctaagcgtgcagccggtcagtagcgcgtcctcatccggtctctgcaaatctgactcttgcttgtatcggagaggtgggactgaccacatcaccaacatgttaattcatgaaacgtgggctagctccattgaggctctcatgcgcaagaacaaaatcattgtggatgatgcagaggaagctgacactgagcctgtttctggtggctctccctcgcaagcagagaagtgtgcaaatagattagctgcgagcaggatgtgcagtgggccaactctgcttgttcaggagtctctcgattgcccgaggaaagactctgttaccgaatgtaaacagcccccagtgtcatctttgagcaaaactgcttctcttacaaaccacagccctttagattctaaaaaagaaacttcctcgtgccaggaccctgtaccaataaaccacaaaaggcgatcactttgctcgagggaagtgcctttgattcagattgaaacagatcagagagaagcctgtgctggggaacctgaacccttcctttccaaaagcagcctcctagaggaagcagaagggcattcgaatgacaaaaacatcccagatgtggtgagaggtggagacacagccgtgagcgcttgtcaaatccatagtgacagccttgataccagagatgtaccagaggctgaagcctccacagaagccagagcccccgatgaggcccccaaccctccaagcagcagcgaggagagcacaggcagctggacccagcttgccaatgaggaagacaacccagatgacacaagtagctttctccagctcagtgagcgatccatgagtgaattagtagaagaaaagaagattcttaaaggacagtcagaaagcacagaggcacctgcatctggaccgcctacgggaacagccagcccccagaggagcctgctggtgatcaactttgacctggagccagagtgtccagatgccgagctccgagccactctgcagtggatagctgcctctgaactggggattcccaccatctactttaagaaatctcaggaaaacagaattgaaaagtttctagatgtcgtgcagctggttcatcggaagtcctggaaagtgggtgatatcttccatgcagttgtccagtactgcaaaatgcatgaggagcagaaggatgggagactgagtctctttgactggctcttggaactgggataataaggcagtctgccgtatagatcattccttccctttattccaacttagattacagtggtttgttctaaatgctctaaacattctcaaaacatcacatcacattagcagaactataaaaaaaaatctgctactcagatccactgcatacagaataagtcagaggaaaagcaaaatataggtctgtccaaattcatacaacttgtgggtgagttccaaagagcttggattagaagggctggacaaagagagaattcaatggggcccaaattagaatgcttataatgagacccaatctccaggaaaacaacactcacataagtttaatcatataaaatgatttgtaatgtctctaattagatgaatcaactagaaacaaactcagtggtcaaaataatttttaagagtattccgtaacctatattttacttttctgattatattaaggggctgccagcccggagaaatacttaagatatgggtgagaaatccccagacttttatacaaaagatttccactttcaaatcaatgtcagtagacattgataaaagtatagcagcatcctctactgaggtgatttcatttattccctgcagcccactgataaatatctcacttctcccaaatagtatgtggactcccagctaagcagaaaactattgtcattcaactgaagaagaggaagataaaagattgtcttgtttccatcactgtattacttgtgtaacatgattacataattcttatcctaagagaaagctttcatatttaaaaaaaagtcttttcagataaaatctgcttgtgtcttgaataatatgaaatacaaactttcactttattttattgtaaattataaagagattattgtcttaaataatatattgagttagcttcaagcttcctaaaatatgaagagattgttgtctaaagtcacatattgacattgagctcagtggcctgtttcatcacgtatgtgctgctacctgtacagcagacatgccgctccagtgacatttataatgacagaagcagggtaatggtcttgtgtttgacatgatcagttaggatcatagactttccctgactcgtagatattagccttgaattgggggaaaagaagactttgacacattttagttattttaataacagagatttactcttttgaaaaataaaggtatctaatgtctccctaataagtcttctttccttccaactaaatgacctacacggacttttattttcttgatcaaagaggtgtttattaaggacttctggataactatacttttactctatttttaaagatcacaaagtaattttaaatgtgaacaggttcccataccatgaatgctggcctcaccttctctatcatccacattttgaaatgcaaagaaagctcccttgtaagccatacttccttccccactcccatcctaggatacttgcccagtgctcattaggcatttcttattcagatagtccaaatttaggttattatgcttaatttgacacattaactaaatgcccagttttaaaatatatccatcaattcacgctgaaatgtgcttctttgtgctatcaaatggaatagaatacacttattttttaaacaatcccagaatactgtgtgtagacttttgttgtgctcaaataaatgtttacttatcttacaaagctcaaatactggattgtaaccatgtgatgaagttatctatgttgtacctaacattgcaaattaatcaataaatctctgttgtca

SEQ ID NO: 20297 - DNA, 544 bp, Homo sapiens
  misc_feature 1..544: note = ENST00000490603
  source 1..544: mol_type = unassigned DNA
ccgatgaggcccccaaccctccaagcagcagcgaggagagcacaggcagctggacccagcttgccaatgaggaagacaacccagatgacacaagtagctttctccagctcagtgagcgatccatgagcaatggcaacagtagtgccactagcagtcttggcattatggatctggacatttatcaggaaagcatgccatcttctcccatgattaatgaattagtagaagaaaagaagattcttaaaggacagtcagaaagcacagaggcacctgcatctggaccgcctacgggaacagccagcccccagaggagcctgctggtgatcaactttgacctggagccagagtgtccagatgccgagctccgagccactctgcagtggatagctgcctctgaactggggattcccaccatctactttaagaaatctcaggaaaacagaattgaaaaggtatcatgtaccaggtttggaaaacaagaaagctttgtgttttcatcaccactggaaactcagtaaatgctcagtaaacccctgtccatttg

SEQ ID NO: 20298 - DNA, 2986 bp, Homo sapiens
  misc_feature 1..2986: note = ENST00000357154
  source 1..2986: mol_type = unassigned DNA
gggagcgcgccgggcgcagggagctgagtggacggctcgagacggcggcgcgtgcagcagctccagaaagcagcgagttggcagagcagggctgcatttccagcaggagctgcgagcacagtgctggctcacaacaagatgctcaaggtgtcagccgtactgtgtgtgtgtgcagccgcttggtgcagtcagtctctcgcagctgccgcggcggtggctgcagccggggggcggtcggacggcggtaattttctggatgataaacaatggctcaccacaatctctcagtatgacaaggaagtcggacagtggaacaaattccgagacgaagtagaggatgattatttccgcacttggagtccaggaaaacccttcgatcaggctttagatccagctaaggatccatgcttaaagatgaaatgtagtcgccataaagtatgcattgctcaagattctcagactgcagtctgcattagtcaccggaggcttacacacaggatgaaagaagcaggagtagaccataggcagtggaggggtcccatattatccacctgcaagcagtgcccagtggtctatcccagccctgtttgtggttcagatggtcatacctactcttttcagtgcaaactagaatatcaggcatgtgtcttaggaaaacagatctcagtcaaatgtgaaggacattgcccatgtccttcagataagcccaccagtacaagcagaaatgttaagagagcatgcagtgacctggagttcagggaagtggcaaacagattgcgggactggttcaaggcccttcatgaaagtggaagtcaaaacaagaagacaaaaacattgctgaggcctgagagaagcagattcgataccagcatcttgccaatttgcaaggactcacttggctggatgtttaacagacttgatacaaactatgacctgctattggaccagtcagagctcagaagcatttaccttgataagaatgaacagtgtaccaaggcattcttcaattcttgtgacacatacaaggacagtttaatatctaataatgagtggtgctactgcttccagagacagcaagacccaccttgccagactgagctcagcaatattcagaagcggcaaggggtaaagaagctcctaggacagtatatccccctgtgtgatgaagatggttactacaagccaacacaatgtcatggcagtgttggacagtgctggtgtgttgacagatatggaaatgaagtcatgggatccagaataaatggtgttgcagattgtgctatagattttgagatctccggagattttgctagtggcgattttcatgaatggactgatgatgaggatgatgaagacgatattatgaatgatgaagatgaaattgaagatgatgatgaagatgaaggggatgatgatgatggtggtgatgaccatgatgtatacatttgattgatgacagttgaaatcaataaattctacatttctaatatttacaaaaatgatagcctatttaaaattatcttcttccccaataacaaaatgattctaaacctcacatatattttgtataattatttgaaaaattgcagctaaagttatagaactttatgtttaaataagaatcatttgctttgagtttttatattccttacacaaaaagaaaatacatatgcagtctagtcagacaaaataaagttttgaagtgctactataataagtttttcacgagaacaaactttgtaaatcttccataagcaaaatgacagctagtgcttgggatcgtacatgttaattttctgaaagataattctaagtgaaatttaaaataaataaatttttaatgacctgggtcttaaggatttaggaaaaatatgcatgctttaattgcatttccaaagtagcatcttgctagacctagttgagtcaggataacagagagataccacatggcaagaaaaacaaagtgacaattgtagagtcctcaattgtgtttacattaatagtggtgtttttacctatgaaattattctggatctaataggacattttacaaaatggcaagtatggaaaaccatggattctgaaagttaaaaatttagttgttctccccaatgtgtattttaatttggatggcagtctcatgcagattttttaaaagattctttaataacatgatttgtttgcctttctagatttctttatctttctgaccagcaacttagggagcagaatttaaattaggaagacaaagggaaagattcatttaaaccatatttttacaaagtttgtcatttgccccaaggtcaaattttaaattcttaattttcattttatttcccattttaggtaaaagtttgcatttaatcttagaattatgttatttttgttagtagtgtggaaacttagagaacttattgtatggtgccttgcaaaaatagagatagaaagattttagcatgcataccaatatagtatattacgcaatatataagcacacctaattaacagattaatatcagtaaaggtattgctgctggaatgaagaaaatgggatacgtttgtttctttttttctattgttacataattgccatgtggacttgtttatgattattgtgtagagtagcatttaagatttaactgtagcaaaaattactttaaccgctgtatttaagttagcatgttaattaattgtgtagacattttggcacaccatcacttttaactatatcataccaatggttttgtgcccataataaaaatggaaaaacctgttgaatgttacgtattggtatctttaatttcaacagtgggtaaactggtttcccagtatacaattcattgaaagcaaaattgattaattatttccatttaatttatacacactcaatacaaaatttaatgttgactttacgtaataaagtataatgcattttcttttttactgtttatgtatagtttacaaaataaagaatcttgtaaccaaa

SEQ ID NO: 20299 - DNA, 2936 bp, Homo sapiens
  misc_feature 1..2936: note = ENST00000357545
  source 1..2936: mol_type = unassigned DNA
gagacggcggcgcgtgcagcagctccagaaagcagcgagttggcagagcagggctgcatttccagcaggagctgcgagcacagtgctggctcacaacaagatgctcaaggtgtcagccgtactgtgtgtgtgtgcagccgcttggtgcagtcagtctctcgcagctgccgcggcggtggctgcagccggggggcggtcggacggcggtaattttctggatgataaacaatggctcaccacaatctctcagtatgacaaggaagtcggacagtggaacaaattccgagacgatgattatttccgcacttggagtccaggaaaacccttcgatcaggctttagatccagctaaggatccatgcttaaagatgaaatgtagtcgccataaagtatgcattgctcaagattctcagactgcagtctgcattagtcaccggaggcttacacacaggatgaaagaagcaggagtagaccataggcagtggaggggtcccatattatccacctgcaagcagtgcccagtggtctatcccagccctgtttgtggttcagatggtcatacctactcttttcagtgcaaactagaatatcaggcatgtgtcttaggaaaacagatctcagtcaaatgtgaaggacattgcccatgtccttcagataagcccaccagtacaagcagaaatgttaagagagcatgcagtgacctggagttcagggaagtggcaaacagattgcgggactggttcaaggcccttcatgaaagtggaagtcaaaacaagaagacaaaaacattgctgaggcctgagagaagcagattcgataccagcatcttgccaatttgcaaggactcacttggctggatgtttaacagacttgatacaaactatgacctgctattggaccagtcagagctcagaagcatttaccttgataagaatgaacagtgtaccaaggcattcttcaattcttgtgacacatacaaggacagtttaatatctaataatgagtggtgctactgcttccagagacagcaagacccaccttgccagactgagctcagcaatattcagaagcggcaaggggtaaagaagctcctaggacagtatatccccctgtgtgatgaagatggttactacaagccaacacaatgtcatggcagtgttggacagtgctggtgtgttgacagatatggaaatgaagtcatgggatccagaataaatggtgttgcagattgtgctatagattttgagatctccggagattttgctagtggcgattttcatgaatggactgatgatgaggatgatgaagacgatattatgaatgatgaagatgaaattgaagatgatgatgaagatgaaggggatgatgatgatggtggtgatgaccatgatgtatacatttgattgatgacagttgaaatcaataaattctacatttctaatatttacaaaaatgatagcctatttaaaattatcttcttccccaataacaaaatgattctaaacctcacatatattttgtataattatttgaaaaattgcagctaaagttatagaactttatgtttaaataagaatcatttgctttgagtttttatattccttacacaaaaagaaaatacatatgcagtctagtcagacaaaataaagttttgaagtgctactataataagtttttcacgagaacaaactttgtaaatcttccataagcaaaatgacagctagtgcttgggatcgtacatgttaattttctgaaagataattctaagtgaaatttaaaataaataaatttttaatgacctgggtcttaaggatttaggaaaaatatgcatgctttaattgcatttccaaagtagcatcttgctagacctagttgagtcaggataacagagagataccacatggcaagaaaaacaaagtgacaattgtagagtcctcaattgtgtttacattaatagtggtgtttttacctatgaaattattctggatctaataggacattttacaaaatggcaagtatggaaaaccatggattctgaaagttaaaaatttagttgttctccccaatgtgtattttaatttggatggcagtctcatgcagattttttaaaagattctttaataacatgatttgtttgcctttctagatttctttatctttctgaccagcaacttagggagcagaatttaaattaggaagacaaagggaaagattcatttaaaccatatttttacaaagtttgtcatttgccccaaggtcaaattttaaattcttaattttcattttatttcccattttaggtaaaagtttgcatttaatcttagaattatgttatttttgttagtagtgtggaaacttagagaacttattgtatggtgccttgcaaaaatagagatagaaagattttagcatgcataccaatatagtatattacgcaatatataagcacacctaattaacagattaatatcagtaaaggtattgctgctggaatgaagaaaatgggatacgtttgtttctttttttctattgttacataattgccatgtggacttgtttatgattattgtgtagagtagcatttaagatttaactgtagcaaaaattactttaaccgctgtatttaagttagcatgttaattaattgtgtagacattttggcacaccatcacttttaactatatcataccaatggttttgtgcccataataaaaatggaaaaacctgttgaatgttacgtattggtatctttaatttcaacagtgggtaaactggtttcccagtatacaattcattgaaagcaaaattgattaattatttccatttaatttatacacactcaatacaaaatttaatgttgactttacgtaataaagtataatgcattttcttttttactgtttatgtatagtttacaaaataaagaatcttgtaacc

SEQ ID NO: 20300 - DNA, 2900 bp, Homo sapiens
  misc_feature 1..2900: note = ENST00000504953
  source 1..2900: mol_type = unassigned DNA
tcctctggctccagccaagcgtcctatccggagccaactgtagctgggatccagcgagaggaagatgctcaaggtgtcagccgtactgtgtgtgtgtgcagccgcttggtgcagtcagtctctcgcagctgccgcggcggtggctgcagccggggggcggtcggacggcggtaattttctggatgataaacaatggctcaccacaatctctcagtatgacaaggaagtcggacagtggaacaaattccgagacgatgattatttccgcacttggagtccaggaaaacccttcgatcaggctttagatccagctaaggatccatgcttaaagatgaaatgtagtcgccataaagtatgcattgctcaagattctcagactgcagtctgcattagtcaccggaggcttacacacaggatgaaagaagcaggagtagaccataggcagtggaggggtcccatattatccacctgcaagcagtgcccagtggtctatcccagccctgtttgtggttcagatggtcatacctactcttttcagtgcaaactagaatatcaggcatgtgtcttaggaaaacagatctcagtcaaatgtgaaggacattgcccatgtccttcagataagcccaccagtacaagcagaaatgttaagagagcatgcagtgacctggagttcagggaagtggcaaacagattgcgggactggttcaaggcccttcatgaaagtggaagtcaaaacaagaagacaaaaacattgctgaggcctgagagaagcagattcgataccagcatcttgccaatttgcaaggactcacttggctggatgtttaacagacttgatacaaactatgacctgctattggaccagtcagagctcagaagcatttaccttgataagaatgaacagtgtaccaaggcattcttcaattcttgtgacacatacaaggacagtttaatatctaataatgagtggtgctactgcttccagagacagcaagacccaccttgccagactgagctcagcaatattcagaagcggcaaggggtaaagaagctcctaggacagtatatccccctgtgtgatgaagatggttactacaagccaacacaatgtcatggcagtgttggacagtgctggtgtgttgacagatatggaaatgaagtcatgggatccagaataaatggtgttgcagattgtgctatagattttgagatctccggagattttgctagtggcgattttcatgaatggactgatgatgaggatgatgaagacgatattatgaatgatgaagatgaaattgaagatgatgatgaagatgaaggggatgatgatgatggtggtgatgaccatgatgtatacatttgattgatgacagttgaaatcaataaattctacatttctaatatttacaaaaatgatagcctatttaaaattatcttcttccccaataacaaaatgattctaaacctcacatatattttgtataattatttgaaaaattgcagctaaagttatagaactttatgtttaaataagaatcatttgctttgagtttttatattccttacacaaaaagaaaatacatatgcagtctagtcagacaaaataaagttttgaagtgctactataataagtttttcacgagaacaaactttgtaaatcttccataagcaaaatgacagctagtgcttgggatcgtacatgttaattttctgaaagataattctaagtgaaatttaaaataaataaatttttaatgacctgggtcttaaggatttaggaaaaatatgcatgctttaattgcatttccaaagtagcatcttgctagacctagttgagtcaggataacagagagataccacatggcaagaaaaacaaagtgacaattgtagagtcctcaattgtgtttacattaatagtggtgtttttacctatgaaattattctggatctaataggacattttacaaaatggcaagtatggaaaaccatggattctgaaagttaaaaatttagttgttctccccaatgtgtattttaatttggatggcagtctcatgcagattttttaaaagattctttaataacatgatttgtttgcctttctagatttctttatctttctgaccagcaacttagggagcagaatttaaattaggaagacaaagggaaagattcatttaaaccatatttttacaaagtttgtcatttgccccaaggtcaaattttaaattcttaattttcattttatttcccattttaggtaaaagtttgcatttaatcttagaattatgttatttttgttagtagtgtggaaacttagagaacttattgtatggtgccttgcaaaaatagagatagaaagattttagcatgcataccaatatagtatattacgcaatatataagcacacctaattaacagattaatatcagtaaaggtattgctgctggaatgaagaaaatgggatacgtttgtttctttttttctattgttacataattgccatgtggacttgtttatgattattgtgtagagtagcatttaagatttaactgtagcaaaaattactttaaccgctgtatttaagttagcatgttaattaattgtgtagacattttggcacaccatcacttttaactatatcataccaatggttttgtgcccataataaaaatggaaaaacctgttgaatgttacgtattggtatctttaatttcaacagtgggtaaactggtttcccagtatacaattcattgaaagcaaaattgattaattatttccatttaatttatacacactcaatacaaaatttaatgttgactttacgtaataaagtataatgcattttcttttttactgtttatgtatagtttacaaaataaagaatcttgtaacc

SEQ ID NO: 20301 - DNA, 2908 bp, Homo sapiens
  misc_feature 1..2908: note = ENST00000511531
  source 1..2908: mol_type = unassigned DNA
tcctctggctccagccaagcgtcctatccggagccaactgtagctgggatccagcgagaggaagatgctcaaggtgtcagccgtactgtgtgtgtgtgcagccgcttggtgcagtcagtctctcgcagctgccgcggcggtggctgcagccggggggcggtcggacggcggtaattttctggatgataaacaatggctcaccacaatctctcagtatgacaaggaagtcggacagtggaacaaattccgagacgaagtagaggatgattatttccgcacttggagtccaggaaaacccttcgatcaggctttagatccagctaaggatccatgcttaaagatgaaatgtagtcgccataaagtatgcattgctcaagattctcagactgcagtctgcattagtcaccggaggcttacacacaggatgaaagaagcaggagtagaccataggcagtggaggggtcccatattatccacctgcaagcagtgcccagtggtctatcccagccctgtttgtggttcagatggtcatacctactcttttcagtgcaaactagaatatcaggcatgtgtcttaggaaaacagatctcagtcaaatgtgaaggacattgcccatgtccttcagataagcccaccagtacaagcagaaatgttaagagagcatgcagtgacctggagttcagggaagtggcaaacagattgcgggactggttcaaggcccttcatgaaagtggaagtcaaaacaagaagacaaaaacattgctgaggcctgagagaagcagattcgataccagcatcttgccaatttgcaaggactcacttggctggatgtttaacagacttgatacaaactatgacctgctattggaccagtcagagctcagaagcatttaccttgataagaatgaacagtgtaccaaggcattcttcaattcttgtgacacatacaaggacagtttaatatctaataatgagtggtgctactgcttccagagacagcaagacccaccttgccagactgagctcagcaatattcagaagcggcaaggggtaaagaagctcctaggacagtatatccccctgtgtgatgaagatggttactacaagccaacacaatgtcatggcagtgttggacagtgctggtgtgttgacagatatggaaatgaagtcatgggatccagaataaatggtgttgcagattgtgctatagattttgagatctccggagattttgctagtggcgattttcatgaatggactgatgatgaggatgatgaagacgatattatgaatgatgaagatgaaattgaagatgatgatgaagatgaaggggatgatgatgatggtggtgatgaccatgatgtatacatttgattgatgacagttgaaatcaataaattctacatttctaatatttacaaaaatgatagcctatttaaaattatcttcttccccaataacaaaatgattctaaacctcacatatattttgtataattatttgaaaaattgcagctaaagttatagaactttatgtttaaataagaatcatttgctttgagtttttatattccttacacaaaaagaaaatacatatgcagtctagtcagacaaaataaagttttgaagtgctactataataagtttttcacgagaacaaactttgtaaatcttccataagcaaaatgacagctagtgcttgggatcgtacatgttaattttctgaaagataattctaagtgaaatttaaaataaataaatttttaatgacctgggtcttaaggatttaggaaaaatatgcatgctttaattgcatttccaaagtagcatcttgctagacctagttgagtcaggataacagagagataccacatggcaagaaaaacaaagtgacaattgtagagtcctcaattgtgtttacattaatagtggtgtttttacctatgaaattattctggatctaataggacattttacaaaatggcaagtatggaaaaccatggattctgaaagttaaaaatttagttgttctccccaatgtgtattttaatttggatggcagtctcatgcagattttttaaaagattctttaataacatgatttgtttgcctttctagatttctttatctttctgaccagcaacttagggagcagaatttaaattaggaagacaaagggaaagattcatttaaaccatatttttacaaagtttgtcatttgccccaaggtcaaattttaaattcttaattttcattttatttcccattttaggtaaaagtttgcatttaatcttagaattatgttatttttgttagtagtgtggaaacttagagaacttattgtatggtgccttgcaaaaatagagatagaaagattttagcatgcataccaatatagtatattacgcaatatataagcacacctaattaacagattaatatcagtaaaggtattgctgctggaatgaagaaaatgggatacgtttgtttctttttttctattgttacataattgccatgtggacttgtttatgattattgtgtagagtagcatttaagatttaactgtagcaaaaattactttaaccgctgtatttaagttagcatgttaattaattgtgtagacattttggcacaccatcacttttaactatatcataccaatggttttgtgcccataataaaaatggaaaaacctgttgaatgttacgtattggtatctttaatttcaacagtgggtaaactggtttcccagtatacaattcattgaaagcaaaattgattaattatttccatttaatttatacacactcaatacaaaatttaatgttgactttacgtaataaagtataatgcattttcttttttactgtttatgtatagtttacaaaataaagaatcttgtaac

SEQ ID NO: 20302 - DNA, 2947 bp, Homo sapiens
  misc_feature 1..2947: note = ENST00000506886
  source 1..2947: mol_type = unassigned DNA
acaaagcagataaggattcctaggctaggagctacctcgtcctctggctccagccaagcgtcctatccggagccaactgtagctgggatccagcgagaggaagatgctcaaggtgtcagccgtactgtgtgtgtgtgcagccgcttggtgcagtcagtctctcgcagctgccgcggcggtggctgcagccggggggcggtcggacggcggtaattttctggatgataaacaatggctcaccacaatctctcagtatgacaaggaagtcggacagtggaacaaattccgagacgaagtagaggatgattatttccgcacttggagtccaggaaaacccttcgatcaggctttagatccagctaaggatccatgcttaaagatgaaatgtagtcgccataaagtatgcattgctcaagattctcagactgcagtctgcattagtcaccggaggcttacacacaggatgaaagaagcaggagtagaccataggcagtggaggggtcccatattatccacctgcaagcagtgcccagtggtctatcccagccctgtttgtggttcagatggtcatacctactcttttcagtgcaaactagaatatcaggcatgtgtcttaggaaaacagatctcagtcaaatgtgaaggacattgcccatgtccttcagataagcccaccagtacaagcagaaatgttaagagagcatgcagtgacctggagttcagggaagtggcaaacagattgcgggactggttcaaggcccttcatgaaagtggaagtcaaaacaagaagacaaaaacattgctgaggcctgagagaagcagattcgataccagcatcttgccaatttgcaaggactcacttggctggatgtttaacagacttgatacaaactatgacctgctattggaccagtcagagctcagaagcatttaccttgataagaatgaacagtgtaccaaggcattcttcaattcttgtgacacatacaaggacagtttaatatctaataatgagtggtgctactgcttccagagacagcaagacccaccttgccagactgagctcagcaatattcagaagcggcaaggggtaaagaagctcctaggacagtatatccccctgtgtgatgaagatggttactacaagccaacacaatgtcatggcagtgttggacagtgctggtgtgttgacagatatggaaatgaagtcatgggatccagaataaatggtgttgcagattgtgctatagattttgagatctccggagattttgctagtggcgattttcatgaatggactgatgatgaggatgatgaagacgatattatgaatgatgaagatgaaattgaagatgatgatgaagatgaaggggatgatgatgatggtggtgatgaccatgatgtatacatttgattgatgacagttgaaatcaataaattctacatttctaatatttacaaaaatgatagcctatttaaaattatcttcttccccaataacaaaatgattctaaacctcacatatattttgtataattatttgaaaaattgcagctaaagttatagaactttatgtttaaataagaatcatttgctttgagtttttatattccttacacaaaaagaaaatacatatgcagtctagtcagacaaaataaagttttgaagtgctactataataagtttttcacgagaacaaactttgtaaatcttccataagcaaaatgacagctagtgcttgggatcgtacatgttaattttctgaaagataattctaagtgaaatttaaaataaataaatttttaatgacctgggtcttaaggatttaggaaaaatatgcatgctttaattgcatttccaaagtagcatcttgctagacctagttgagtcaggataacagagagataccacatggcaagaaaaacaaagtgacaattgtagagtcctcaattgtgtttacattaatagtggtgtttttacctatgaaattattctggatctaataggacattttacaaaatggcaagtatggaaaaccatggattctgaaagttaaaaatttagttgttctccccaatgtgtattttaatttggatggcagtctcatgcagattttttaaaagattctttaataacatgatttgtttgcctttctagatttctttatctttctgaccagcaacttagggagcagaatttaaattaggaagacaaagggaaagattcatttaaaccatatttttacaaagtttgtcatttgccccaaggtcaaattttaaattcttaattttcattttatttcccattttaggtaaaagtttgcatttaatcttagaattatgttatttttgttagtagtgtggaaacttagagaacttattgtatggtgccttgcaaaaatagagatagaaagattttagcatgcataccaatatagtatattacgcaatatataagcacacctaattaacagattaatatcagtaaaggtattgctgctggaatgaagaaaatgggatacgtttgtttctttttttctattgttacataattgccatgtggacttgtttatgattattgtgtagagtagcatttaagatttaactgtagcaaaaattactttaaccgctgtatttaagttagcatgttaattaattgtgtagacattttggcacaccatcacttttaactatatcataccaatggttttgtgcccataataaaaatggaaaaacctgttgaatgttacgtattggtatctttaatttcaacagtgggtaaactggtttcccagtatacaattcattgaaagcaaaattgattaattatttccatttaatttatacacactcaatacaaaatttaatgttgactttacgtaataaagtataatgcattttcttttttactgtttatgtatagtttacaaaataaagaatcttgtaac

SEQ ID NO: 20303 - DNA, 2007 bp, Homo sapiens
  misc_feature 1..2007: note = ENST00000535728
  source 1..2007: mol_type = unassigned DNA
acacatattctccacgccatggaggccactgcttgaggatgggggaggagtagtataagcagttcaatactgtcttttttaccatcttcagtgcttcttggtgatatgaagtaaaaccaggatgattatttccgcacttggagtccaggaaaacccttcgatcaggctttagatccagctaaggatccatgcttaaagatgaaatgtagtcgccataaagtatgcattgctcaagattctcagactgcagtctgcattagtcaccggaggcttacacacaggatgaaagaagcaggagtagaccataggcagtggaggggtcccatattatccacctgcaagcagtgcccagtggtctatcccagccctgtttgtggttcagatggtcatacctactcttttcagtgcaaactagaatatcaggcatgtgtcttaggaaaacagatctcagtcaaatgtgaaggacattgcccatgtccttcagataagcccaccagtacaagcagaaatgttaagagagcatgcagtgacctggagttcagggaagtggcaaacagattgcgggactggttcaaggcccttcatgaaagtggaagtcaaaacaagaagacaaaaacattgctgaggcctgagagaagcagattcgataccagcatcttgccaatttgcaaggactcacttggctggatgtttaacagacttgatacaaactatgacctgctattggaccagtcagagctcagaagcatttaccttgataagaatgaacagtgtaccaaggcattcttcaattcttgtgacacatacaaggacagtttaatatctaataatgagtggtgctactgcttccagagacagcaagacccaccttgccagactgagctcagcaatattcagaagcggcaaggggtaaagaagctcctaggacagtatatccccctgtgtgatgaagatggttactacaagccaacacaatgtcatggcagtgttggacagtgctggtgtgttgacagatatggaaatgaagtcatgggatccagaataaatggtgttgcagattgtgctatagattttgagatctccggagattttgctagtggcgattttcatgaatggactgatgatgaggatgatgaagacgatattatgaatgatgaagatgaaattgaagatgatgatgaagatgaaggggatgatgatgatggtggtgatgaccatgatgtatacatttgattgatgacagttgaaatcaataaattctacatttctaatatttacaaaaatgatagcctatttaaaattatcttcttccccaataacaaaatgattctaaacctcacatatattttgtataattatttgaaaaattgcagctaaagttatagaactttatgtttaaataagaatcatttgctttgagtttttatattccttacacaaaaagaaaatacatatgcagtctagtcagacaaaataaagttttgaagtgctactataataagtttttcacgagaacaaactttgtaaatcttccataagcaaaatgacagctagtgcttgggatcgtacatgttaattttctgaaagataattctaagtgaaatttaaaataaataaatttttaatgacctgggtcttaaggatttaggaaaaatatgcatgctttaattgcatttccaaagtagcatcttgctagacctagttgagtcaggataacagagagataccacatggcaagaaaaacaaagtgacaattgtagagtcctcaattgtgtttacattaatagtggtgtttttacctatgaaattattctggatctaataggacattttacaaaatggcaagtatggaaaaccatggattctgaaagttaaaaatttagttgttctccccaatgtgtattttaatttggatggcagtctcatgcagattttttaaaagattctttaataacatgatttgtttgcctttctagatttctttatctttctgaccagcaacttagg

SEQ ID NO: 20304 - DNA, 1963 bp, Homo sapiens
  misc_feature 1..1963: note = ENST00000510741
  source 1..1963: mol_type = unassigned DNA
gcatttccagcaggagctgcgagcacagtgctggctcacaacaagatgctcaaggtgtcagccgtactgtgtgtgtgtgcagccgcttggtgcagtcagtctctcgcagctgccgcggcggtggctgcagccggggggcggtcggacggcggtaattttctggatgataaacaatggctcaccacaatctctcagtatgacaaggaagtcggacagtggaacaaattccgagacgatgattatttccgcacttggagtccaggaaaacccttcgatcaggctttagatccagctaaggatccatgcttaaagatgaaatgtagtcgccataaagtatgcattgctcaagattctcagactgcagtctgcattagtcaccggaggcttacacacaggatgaaagaagcaggagtagaccataggcagtggaggggtcccatattatccacctgcaagcagtgcccagtggtctatcccagccctgtttgtggttcagatggtcatacctactcttttcagtgcaaactagaatatcaggcatgtgtcttaggaaaacagatctcagtcaaatgtgaaggacattgcccatgtccttcagataagcccaccagtacaagcagaaatgttaagagaggattcgataccagcatcttgccaatttgcaaggactcacttggctggatgtttaacagacttgatacaaactatgacctgctattggaccagtcagagctcagaagcatttaccttgataagaatgaacagtgtaccaaggcattcttcaattcttgtgacacatacaaggacagtttaatatctaataatgagtggtgctactgcttccagagacagcaagacccaccttgccagactgagctcagcaatattcagaagcggcaaggggtaaagaagctcctaggacagtatatccccctgtgtgatgaagatggttactacaagccaacacaatgtcatggcagtgttggacagtgctggtgtgttgacagatatggaaatgaagtcatgggatccagaataaatggtgttgcagattgtgctatagattttgagatctccggagattttgctagtggcgattttcatgaatggactgatgatgaggatgatgaagacgatattatgaatgatgaagatgaaattgaagatgatgatgaagatgaaggggatgatgatgatggtggtgatgaccatgatgtatacatttgattgatgacagttgaaatcaataaattctacatttctaatatttacaaaaatgatagcctatttaaaattatcttcttccccaataacaaaatgattctaaacctcacatatattttgtataattatttgaaaaattgcagctaaagttatagaactttatgtttaaataagaatcatttgctttgagtttttatattccttacacaaaaagaaaatacatatgcagtctagtcagacaaaataaagttttgaagtgctactataataagtttttcacgagaacaaactttgtaaatcttccataagcaaaatgacagctagtgcttgggatcgtacatgttaattttctgaaagataattctaagtgaaatttaaaataaataaatttttaatgacctgggtcttaaggatttaggaaaaatatgcatgctttaattgcatttccaaagtagcatcttgctagacctagttgagtcaggataacagagagataccacatggcaagaaaaacaaagtgacaattgtagagtcctcaattgtgtttacattaatagtggtgtttttacctatgaaattattctggatctaataggacattttacaaaatggcaagtatggaaaaccatggattctgaaagttaaaaatttagttgttctccccaatgtgtattttaatttggatggcagtctcatgcagattttttaaaagattctttaataacatgatttgtttgcc

SEQ ID NO: 20305 - DNA, 2180 bp, Homo sapiens
  misc_feature 1..2180: note = ENST00000502330
  source 1..2180: mol_type = unassigned DNA
cgcgccgggcgcagggagctgagtggacggctcgagacggcggcgcgtgcagcagctccagaaagcagcgagttggcagagcagggctgcatttccagcaggagctgcgagcacagtgctggctcacaacaagatgctcaaggtgtcagccgtactgtgtgtgtgtgcagccgcttggtgcagtcagtctctcgcagctgccgcggcggtggctgcagccggggggcggtcggacggcggtaattttctggatgataaacaatggctcaccacaatctctcagtatgacaaggaagtcggacagtggaacaaattccgagacgaagtagaggatgattatttccgcacttggagtccaggaaaacccttcgatcaggctttagatccagctaaggatccatgcttaaagatgaaatgtagtcgccataaagtatgcattgctcaagattctcagactgcagtctgcattagtcaccggaggcttacacacaggatgaaagaagcaggagtagaccataggcagtggaggggtcccatattatccacctgcaagcagtgcccagtggtctatcccagccctgtttgtggttcagatggtcatacctactcttttcagtgcaaactagaatatcaggcatgtgtcttaggaaaacagatctcagtcaaatgtgaaggacattgcccatgtccttcagataagcccaccagtacaagcagaaatgttaagagagcatgcagtgacctggagttcagggaagtggcaaacagattgcgggactggttcaaggcccttcatgaaagtggaagtcaaaacaagaagacaaaaacattgctgaggcctgagagaagcagattcgataccagcatcttgccaatttgcaaggactcacttggctggatgtttaacagacttgatacaaactatgacctgctattggaccagtcagagctcagaagcatttaccttgataagaatgaacagtgtaccaaggcattcttcaattcttgtgacacatacaaggacagtttaatatctaataatgagtggtgctactgcttccagagacagcaagacccaccttgccagactgagctcagcaatattcagaagcggcaaggggtaaagaagctcctaggacagtatatccccctgtgtgatgaagatggttactacaagccaacacaatgtcatggcagtgttggacagtgctggtgtgttgacagatatggaaatgaagtcatgggatccagaataaatggtgttgcagattgtgctatagattttgagatctccggagattttgctagtggcgattttcatgaatggactgatgatgaggatgatgaagacgatattatgaatgatgaagatgaaattgaagatgatgatgaagatgaaggggatgatgatgatggtggtgatgaccatgatgtatacatttgattgatgacagttgaaatcaataaattctacatttctaatatttacaaaaatgatagcctatttaaaattatcttcttccccaataacaaaatgattctaaacctcacatatattttgtataattatttgaaaaattgcagctaaagttatagaactttatgtttaaataagaatcatttgctttgagtttttatattccttacacaaaaagaaaatacatatgcagtctagtcagacaaaataaagttttgaagtgctactataataagtttttcacgagaacaaactttgtaaatcttccataagcaaaatgacagctagtgcttgggatcgtacatgttaattttctgaaagataattctaagtgaaatttaaaataaataaatttttaatgacctgggtcttaaggatttaggaaaaatatgcatgctttaattgcatttccaaagtagcatcttgctagacctagttgagtcaggataacagagagataccacatggcaagaaaaacaaagtgacaattgtagagtcctcaattgtgtttacattaatagtggtgtttttacctatgaaattattctggatctaataggacattttacaaaatggcaagtatggaaaaccatggattctgaaagttaaaaatttagttgttctccccaatgtgtattttaatttggatggcagtctcatgcagattttttaaaagattctttaataacatgatttgtttgcc

SEQ ID NO: 20306 - DNA, 1700 bp, Homo sapiens
  misc_feature 1..1700: note = ENST00000511905
  source 1..1700: mol_type = unassigned DNA
gtgcccgctcgggctgctgcggctggggcttgcttccttatacccacctctcctcctctgggtctgcgtgtgtatgctcaaggtgtcagccgtactgtgtgtgtgtgcagccgcttggtgcagtcagtctctcgcagctgccgcggcggtggctgcagccggggggcggtcggacggcggtaattttctggatgataaacaatggctcaccacaatctctcagtatgacaaggaagtcggacagtggaacaaattccgagacgatgattatttccgcacttggagtccaggaaaacccttcgatcagggatgaaagaagcaggagtagaccataggcagtggaggggtcccatattatccacctgcaagcagtgcccagtggtctatcccagccctgtttgtggttcagatggtcatacctactcttttcagtgcaaactagaatatcaggcatgtgtcttaggaaaacagatctcagtcaaatgtgaaggacattgcccatgtccttcagataagcccaccagtacaagcagaaatgttaagagagcatgcagtgacctggagttcagggaagtggcaaacagattgcgggactggttcaaggcccttcatgaaagtggaagtcaaaacaagaagacaaaaacattgctgaggcctgagagaagcagattcgataccagcatcttgccaatttgcaaggactcacttggctggatgtttaacagacttgatacaaactatgacctgctattggaccagtcagagctcagaagcatttaccttgataagaatgaacagtgtaccaaggcattcttcaattcttgtgacacatacaaggacagtttaatatctaataatgagtggtgctactgcttccagagacagcaagacccaccttgccagactgagctcagcaatattcagaagcggcaaggggtaaagaagctcctaggacagtatatccccctgtgtgatgaagatggttactacaagccaacacaatgtcatggcagtgttggacagtgctggtgtgttgacagatatggaaatgaagtcatgggatccagaataaatggtgttgcagattgtgctatagattttgagatctccggagattttgctagtggcgattttcatgaatggactgatgatgaggatgatgaagacgatattatgaatgatgaagatgaaattgaagatgatgatgaagatgaaggggatgatgatgatggtggtgatgaccatgatgtatacatttgattgatgacagttgaaatcaataaattctacatttctaatatttacaaaaatgatagcctatttaaaattatcttcttccccaataacaaaatgattctaaacctcacatatattttgtataattatttgaaaaattgcagctaaagttatagaactttatgtttaaataagaatcatttgctttgagtttttatattccttacacaaaaagaaaatacatatgcagtctagtcagacaaaataaagttttgaagtgctactataataagtttttcacgagaacaaactttgtaaatcttccataagcaaaatgacagctagtgcttgggatcgtacatgttaattttctgaaagataattctaagtgaaatttaaaataaataaatttttaatgacctgggtcttaaggatttaggaaaaatatgcatgctttaattgca

SEQ ID NO: 20307 - DNA, 1457 bp, Homo sapiens
  misc_feature 1..1457: note = ENST00000512681
  source 1..1457: mol_type = unassigned DNA
tttccagcaggagctgcgagcacagtgctggctcacaacaagatgctcaaggtgtcagccgtactgtgtgtgtgtgcagccgcttggtgcagtcagtctctcgcagctgccgcggcggtggctgcagccggggggcggtcggacggcggtaattttctggatgataaacaatggctcaccacaatctctcagtatgacaaggaagtcggacagtggaacaaattccgagactgcaaactagaatatcaggcatgtgtcttaggaaaacagatctcagtcaaatgtgaaggacattgcccatgtccttcagataagcccaccagtacaagcagaaatgttaagagagcatgcagtgacctggagttcagggaagtggcaaacagattgcgggactggttcaaggcccttcatgaaagtggaagtcaaaacaagaagacaaaaacattgctgaggcctgagagaagcagattcgataccagcatcttgccaatttgcaaggactcacttggctggatgtttaacagacttgatacaaactatgacctgctattggaccagtcagagctcagaagcatttaccttgataagaatgaacagtgtaccaaggcattcttcaattcttgtgacacatacaaggacagtttaatatctaataatgagtggtgctactgcttccagagacagcaagacccaccttgccagactgagctcagcaatattcagaagcggcaaggggtaaagaagctcctaggacagtatatccccctgtgtgatgaagatggttactacaagccaacacaatgtcatggcagtgttggacagtgctggtgtgttgacagatatggaaatgaagtcatgggatccagaataaatggtgttgcagattgtgctatagattttgagatctccggagattttgctagtggcgattttcatgaatggactgatgatgaggatgatgaagacgatattatgaatgatgaagatgaaattgaagatgatgatgaagatgaaggggatgatgatgatggtggtgatgaccatgatgtatacatttgattgatgacagttgaaatcaataaattctacatttctaatatttacaaaaatgatagcctatttaaaattatcttcttccccaataacaaaatgattctaaacctcacatatattttgtataattatttgaaaaattgcagctaaagttatagaactttatgtttaaataagaatcatttgctttgagtttttatattccttacacaaaaagaaaatacatatgcagtctagtcagacaaaataaagttttgaagtgctactataataagtttttcacgagaacaaactttgtaaatcttccataagcaaaatgacagctagtgcttgggatcgtacatgttaattttctgaaagataattctaagtgaaatttaaaataaataaatttttaatgacct

SEQ ID NO: 20308 - DNA, 1768 bp, Homo sapiens
  misc_feature 1..1768: note = ENST00000511269
  source 1..1768: mol_type = unassigned DNA
gctaatgcatgttttccagggtcgctcctggcttcgtaccccttatttgacactgacatgcccccccaccccccgttgtgtctcctctcccagatgctcaaggtgtcagccgtactgtgtgtgtgtgcagccgcttggtgcagtcagtctctcgcagctgccgcggcggtggctgcagccggggggcggtcggacggcggtaattttctggatgataaacaatggctcaccacaatctctcagtatgacaaggaagtcggacagtggaacaaattccgagacgatgattatttccgcacttggagtccaggaaaacccttcgatcaggctttagatccagctaaggatccatgcttaaagatgaaatgtagtcgccataaagtatgcattgctcaagattctcagactgcagtctgcattagtcaccggaggcttacacacaggatgaaagaagcaggagtagaccataggcagtggaggggtcccatattatccacctgcaagcagtgcccagtggtctatcccagccctgtttgtggttcagatggtcatacctactcttttcagtgcaaactagaatatcaggcatgtgtcttaggaaaacagatctcagtcaaatgtgaaggacattgcccatgtccttcagataagcccaccagtacaagcagaaatgttaagagagcatgcagtgacctggagttcagggaagtggcaaacagattgcgggactggttcaaggcccttcatgaaagtggaagtcaaaacaagaagacaaaaacattgctgaggcctgagagaagcagattcgataccagcatcttgccaatttgcaaggactcacttggctggatgtttaacagacttgatacaaactatgacctgctattggaccagtcagagctcagaagcatttaccttgataagaatgaacagtgtaccaaggcattcttcaattcttgtgacacatacaaggacagtttaatatctaataatgagtggtgctactgcttccagagacagcaagacccaccttgccagactgagctcagcaatattcagaagcggcaaggggtaaagaagctcctaggacagtatatccccctgtgtgatgaagatggttactacaagccaacacaatgtcatggcagtgttggacagtgctggtgtgttgacagatatggaaatgaagtcatgggatccagaataaatggtgttgcagattgtgctatagattttgagatctccggagattttgctagtggcgattttcatgaatggactgatgatgaggatgatgaagacgatattatgaatgatgaagatgaaattgaagatgatgatgaagatgaaggggatgatgatgatggtggtgatgaccatgatgtatacatttgattgatgacagttgaaatcaataaattctacatttctaatatttacaaaaatgatagcctatttaaaattatcttcttccccaataacaaaatgattctaaacctcacatatattttgtataattatttgaaaaattgcagctaaagttatagaactttatgtttaaataagaatcatttgctttgagtttttatattccttacacaaaaagaaaatacatatgcagtctagtcagacaaaataaagttttgaagtgctactataataagtttttcacgagaacaaactttgtaaatcttccataagcaaaatgacagctagtgcttgggatcgtacatgttaattttctgaaagataattctaagtgaaattt

SEQ ID NO: 20309 - DNA, 1510 bp, Homo sapiens
  misc_feature 1..1510: note = ENST00000507370
  source 1..1510: mol_type = unassigned DNA
atttccagcaggagctgcgagcacagtgctggctcacaacaagatgctcaaggtgtcagccgtactgtgtgtgtgtgcagccgcttggtgcagtcagtctctcgcagctgccgcggcggtggctgcagccggggggcggtcggacggcggtaattttctggatgataaacaatggctcaccacaatctctcagtatgacaaggaagtcggacagtggaacaaattccgagacgatgaaagaagcaggagtagaccataggcagtggaggggtcccatattatccacctgcaagcagtgcccagtggtctatcccagccctgtttgtggttcagatggtcatacctactcttttcagtgcaaactagaatatcaggcatgtgtcttaggaaaacagatctcagtcaaatgtgaaggacattgcccatgtccttcagataagcccaccagtacaagcagaaatgttaagagagcatgcagtgacctggagttcagggaagtggcaaacagattgcgggactggttcaaggcccttcatgaaagtggaagtcaaaacaagaagacaaaaacattgctgaggcctgagagaagcagattcgataccagcatcttgccaatttgcaaggactcacttggctggatgtttaacagacttgatacaaactatgacctgctattggaccagtcagagctcagaagcatttaccttgataagaatgaacagtgtaccaaggcattcttcaattcttgtgacacatacaaggacagtttaatatctaataatgagtggtgctactgcttccagagacagcaagacccaccttgccagactgagctcagcaatattcagaagcggcaaggggtaaagaagctcctaggacagtatatccccctgtgtgatgaagatggttactacaagccaacacaatgtcatggcagtgttggacagtgctggtgtgttgacagatatggaaatgaagtcatgggatccagaataaatggtgttgcagattgtgctatagattttgagatctccggagattttgctagtggcgattttcatgaatggactgatgatgaggatgatgaagacgatattatgaatgatgaagatgaaattgaagatgatgatgaagatgaaggggatgatgatgatggtggtgatgaccatgatgtatacatttgattgatgacagttgaaatcaataaattctacatttctaatatttacaaaaatgatagcctatttaaaattatcttcttccccaataacaaaatgattctaaacctcacatatattttgtataattatttgaaaaattgcagctaaagttatagaactttatgtttaaataagaatcatttgctttgagtttttatattccttacacaaaaagaaaatacatatgcagtctagtcagacaaaataaagttttgaagtgctactataataagtttttcacgagaacaaactttgtaaatcttccataagcaaaatgacagctagtgctt

SEQ ID NO: 20310 - DNA, 1749 bp, Homo sapiens
  misc_feature 1..1749: note = ENST00000502821
  source 1..1749: mol_type = unassigned DNA
atttccagcaggagctgcgagcacagtgctggctcacaacaagatgctcaaggtgtcagccgtactgtgtgtgtgtgcagccgcttggtgcagtcagtctctcgcagctgccgcggcggtggctgcagccggggggcggtcggacggcggtaattttctggatgataaacaatggctcaccacaatctctcagtatgacaaggaagtcggacagtggaacaaattccgagactaagaagaaaaacgattatttgacaggacagtagtgatgatcacacaagatcacatccacatgtcttctgggctcagtcaggatgattatttccgcacttggagtccaggaaaacccttcgatcaggctttagatccagctaaggatccatgcttaaagatgaaatgtagtcgccataaagtatgcattgctcaagattctcagactgcagtctgcattagtcaccggaggcttacacacaggatgaaagaagcaggagtagaccataggcagtggaggggtcccatattatccacctgcaagcagtgcccagtggtctatcccagccctgtttgtggttcagatggtcatacctactcttttcagtgcaaactagaatatcaggcatgtgtcttaggaaaacagatctcagtcaaatgtgaaggacattgcccatgtccttcagataagcccaccagtacaagcagaaatgttaagagagcatgcagtgacctggagttcagggaagtggcaaacagattgcgggactggttcaaggcccttcatgaaagtggaagtcaaaacaagaagacaaaaacattgctgaggcctgagagaagcagattcgataccagcatcttgccaatttgcaaggactcacttggctggatgtttaacagacttgatacaaactatgacctgctattggaccagtcagagctcagaagcatttaccttgataagaatgaacagtgtaccaaggcattcttcaattcttgtgacacatacaaggacagtttaatatctaataatgagtggtgctactgcttccagagacagcaagacccaccttgccagactgagctcagcaatattcagaagcggcaaggggtaaagaagctcctaggacagtatatccccctgtgtgatgaagatggttactacaagccaacacaatgtcatggcagtgttggacagtgctggtgtgttgacagatatggaaatgaagtcatgggatccagaataaatggtgttgcagattgtgctatagattttgagatctccggagattttgctagtggcgattttcatgaatggactgatgatgaggatgatgaagacgatattatgaatgatgaagatgaaattgaagatgatgatgaagatgaaggggatgatgatgatggtggtgatgaccatgatgtatacatttgattgatgacagttgaaatcaataaattctacatttctaatatttacaaaaatgatagcctatttaaaattatcttcttccccaataacaaaatgattctaaacctcacatatattttgtataattatttgaaaaattgcagctaaagttatagaactttatgtttaaataagaatcatttgctttgagtttttatattccttacacaaaaagaaaatacatatgcagtctagtcagacaaaataaagttttgaagtgctactataataagtttttcacgagaacaaactttgtaaatcttccataagcaaaatgacagctagtg

SEQ ID NO: 20311 - DNA, 1588 bp, Homo sapiens
  misc_feature 1..1588: note = ENST00000505187
  source 1..1588: mol_type = unassigned DNA
gcatttccagcaggagctgcgagcacagtgctggctcacaacaagatgctcaaggtgtcagccgtactgtgtgtgtgtgcagccgcttggtgcagtcagtctctcgcagctgccgcggcggtggctgcagccggggggcggtcggacggcggtaattttctggatgataaacaatggctcaccacaatctctcagtatgacaaggaagtcggacagtggaacaaattccgagacctttagatccagctaaggatccatgcttaaagatgaaatgtagtcgccataaagtatgcattgctcaagattctcagactgcagtctgcattagtcaccggaggcttacacacaggatgaaagaagcaggagtagaccataggcagtggaggggtcccatattatccacctgcaagcagtgcccagtggtctatcccagccctgtttgtggttcagatggtcatacctactcttttcagtgcaaactagaatatcaggcatgtgtcttaggaaaacagatctcagtcaaatgtgaaggacattgcccatgtccttcagataagcccaccagtacaagcagaaatgttaagagagcatgcagtgacctggagttcagggaagtggcaaacagattgcgggactggttcaaggcccttcatgaaagtggaagtcaaaacaagaagacaaaaacattgctgaggcctgagagaagcagattcgataccagcatcttgccaatttgcaaggactcacttggctggatgtttaacagacttgatacaaactatgacctgctattggaccagtcagagctcagaagcatttaccttgataagaatgaacagtgtaccaaggcattcttcaattcttgtgacacatacaaggacagtttaatatctaataatgagtggtgctactgcttccagagacagcaagacccaccttgccagactgagctcagcaatattcagaagcggcaaggggtaaagaagctcctaggacagtatatccccctgtgtgatgaagatggttactacaagccaacacaatgtcatggcagtgttggacagtgctggtgtgttgacagatatggaaatgaagtcatgggatccagaataaatggtgttgcagattgtgctatagattttgagatctccggagattttgctagtggcgattttcatgaatggactgatgatgaggatgatgaagacgatattatgaatgatgaagatgaaattgaagatgatgatgaagatgaaggggatgatgatgatggtggtgatgaccatgatgtatacatttgattgatgacagttgaaatcaataaattctacatttctaatatttacaaaaatgatagcctatttaaaattatcttcttccccaataacaaaatgattctaaacctcacatatattttgtataattatttgaaaaattgcagctaaagttatagaactttatgtttaaataagaatcatttgctttgagtttttatattccttacacaaaaagaaaatacatatgcagtctagtcagacaaaataaagttttgaagtgctactataataagtttttcacgagaacaaac

SEQ ID NO: 20312 - DNA, 1456 bp, Homo sapiens
  misc_feature 1..1456: note = ENST00000512648
  source 1..1456: mol_type = unassigned DNA
ctcgagacggcggcgcgtgcagcagctccagaaagcagcgagttggcagagcagggctgcatttccagcaggagctgcgagcacagtgctggctcacaacaagatgctcaaggtgtcagccgtactgtgtgtgtgtgcagccgcttggtgcagtcagtctctcgcagctgccgcggcggtggctgcagccggggggcggtcggacggcggtaattttctggatgataaacaatggctcaccacaatctctcagtatgacaaggaagtcggacagtggaacaaattccgagacgatgattatttccgcacttggagtccaggaaaacccttcgatcaggctttagatccagctaaggatccatgcttaaagatgaaatgtagtcgccataaagtatgcattgctcaagattctcagactgcagtctgcattagtcaccggaggcttacacacaggatgaaagaagcaggagtagaccataggcagtggaggggtcccatattatccacctgcaagcagtgcccagtggtctatcccagccctgtttgtggttcagatggtcatacctactcttttcagtgcaaactagaatatcaggcatgtgtcttaggaaaacagatctcagtcaaatgtgaaggacattgcccatgtccttcagataagcccaccagtacaagcagaaatgttaagagagcatgcagtgacctggagttcagggaagtggcaaacagattgcgggactggttcaaggcccttcatgaaagtggaagtcaaaacaagaagacaaaaacattgctgaggcctgagagaagcagattcgataccagcatcttgccaatttgcaaggactcacttggctggatgtttaacagacttgatacaaactatgacctgctattggaccagtcagagctcagaagcatttaccttgataagaatgaacagtgtaccaaggcattcttcaattcttgtgacacatacaaggacagtttaatatctaataatgagtggtgctactgcttccagagacagcaaggtaaaagatgagacccttacagacgcaaatagttgacctgcatgtcaaattttacttattttttaagaaaataaaacagtacactatgctcattcattttgtgtatgtttttgtaattcaagtgttgaataaaagagcaaataagaagcatgttgaacaaataactctgccagagatacaacacatgctaaataagatgaaaaatagtaattaatattttgtattaatgccactacattatagtttccattatgagccaccaagaagcacacagaaatattaagaacttagatactgaaagtaatcattaaaattaatttgctatctgctttgcccacaatgtaaaataaatggattttttatcactatacggtggagttttaatgttctattttgtgatcttattaaatgagttgaatgaa

SEQ ID NO: 20313 - DNA, 563 bp, Homo sapiens
  misc_feature 1..563: note = ENST00000510403
  source 1..563: mol_type = unassigned DNA
gcatttccagcaggagctgcgagcacagtgctggctcacaacaagatgctcaaggtgtcagccgtactgtgtgtgtgtgcagccgcttggtgcagtcagtctctcgcagctgccgcggcggtggctgcagccggggggcggtcggacggcggtaattttctggatgataaacaatggctcaccacaatctctcagtatgacaaggaagtcggacagtggaacaaattccgagacgatgattatttccgcacttggagtccaggaaaacccttcgatcaggcatgcagtgacctggagttcagggaagtggcaaacagattgcgggactggttcaaggcccttcatgaaagtggaagtcaaaacaagaagacaaaaacattgctgaggcctgagagaagcagattcgataccagcatcttgccaatttgcaaggactcacttggctggatgtttaacagacttgatacaaactatgacctgctattggaccagtcagagctcagaagcatttaccttgataagaatgaacagtgtaccaaggcattcttcaattcttgtgacac

SEQ ID NO: 20314 - DNA, 565 bp, Homo sapiens
  misc_feature 1..565: note = ENST00000515143
  source 1..565: mol_type = unassigned DNA
aattttctggatgataaacaatggctcaccacaatctctcagtatgacaaggaagtcggacagtggaacaaattccgagacgatgattatttccgcacttggagtccaggaaaacccttcgatcaggctttagatccagctaaggatccatgcttaaagatgaaatgtagtcgccataaagtatgcattgctcaagattctcagactgcagtctgcattagtcaccggaggcttacacacagtgcaaactagaatatcaggcatgtgtcttaggaaaacagatctcagtcaaatgtgaaggacattgcccatgtccttcagataagcccaccagtacaagcagaaatgttaagagagcatgcagtgacctggagttcagggaagtggcaaacagattgcgggactggttcaaggcccttcatgaaagtggaagtcaaaacaagaagacaaaaacattgctgaggcctgagagaagcagattcgataccagcatcttgccaatttgcaaggactcacttggctggatgtttaacagacttgatacaaactatgacctgctattgga

SEQ ID NO: 20315 - DNA, 565 bp, Homo sapiens
  misc_feature 1..565: note = ENST00000511226
  source 1..565: mol_type = unassigned DNA
gtgcccgctcgggctgctgcggctggggcttgcttccttatacccacctctcctcctctgggtctgcgtgtgtatgctcaaggtgtcagccgtactgtgtgtgtgtgcagccgcttggtgcagtcagtctctcgcagctgccgcggcggtggctgcagccggggggcggtcggacggcggtaattttctggatgataaacaatggctcaccacaatctctcagtatgacaaggaagtcggacagtggaacaaattccgagacgatgattatttccgcacttggagtccaggaaaacccttcgatcagggatgaaagaagcaggagtagaccataggcagtggaggggtcccatattatccacctgcaagcagtgcccagtggtctatcccagccctgtttgtggttcagatggtcatacctactcttttcagtgcaaactagaatatcaggcatgtgtcttaggaaaacagatctcagtcaaatgtgaaggacattgcccatgtccttcagataagcccaccagtacaagcagaaatgttaagagagcatgcagtgacctggagt

SEQ ID NO: 20316 - DNA, 1032 bp, Homo sapiens
  misc_feature 1..1032: note = ENST00000507086
  source 1..1032: mol_type = unassigned DNA
gagtggacggctcgagacggcggcgcgtgcagcagctccagaaagcagcgagttggcagagcagggctgcatttccagcaggagctgcgagcacagtgctggctcacaacaagatgctcaaggtgtcagccgtactgtgtgtgtgtgcagccgcttggtgcagtcagtctctcgcagctgccgcggcggtggctgcagccggggggcggtcggacggcggtaattttctggatgataaacaatggctcaccacaatctctcagtatgacaaggaagtcggacagtggaacaaattccgagacgaagtagaggatgattatttccgcacttggagtccaggaaaacccttcgatcaggctttagatccagctaaggatccatgcttaaagatgaaatgtagtcgccataaagtatgcattgctcaagattctcagactgcagtctgcattagtcaccggaggcttacacacagtgcaaactagaatatcaggcatgtgtcttaggaaaacagatctcagtcaaatgtgaaggacattgcccatgtccttcagataagcccaccagtacaagcagaaatgttaagagagtactctgagtgctatggaaccctatcaagaaacaaagtttatttcattattgtgctatgattataagttaactgatttaaggaaaaagtattattgattaagaattaatgtatgccattttccaagtgacaaataatttagttttaacgtttaattttgtatgatggaatttttttatatcctctgaattatggaatggattttcaatgagaaacagattaacatcagtgtattaatatactcttgcaacatgcatgcttctccgtaactaatatagtgtattcataaatggtaagttcttctgtaattttgtttaattggagccatggaaaaataaaattaagtcagtttattggcaagtgttgcataattatttataataaaaattaagttttactcatttggattatttgaaatacattcttggattaaattaatgtgtctg

SEQ ID NO: 20317 - DNA, 1032 bp, Homo sapiens; identical to SEQ ID NO: 20316
  misc_feature 1..1032: note = ENST00000502741
  source 1..1032: mol_type = unassigned DNA

SEQ ID NO: 20318 - DNA, 556 bp, Homo sapiens
  misc_feature 1..556: note = ENST00000509854
  source 1..556: mol_type = unassigned DNA
gtgcccgctcgggctgctgcggctggggcttgcttccttatacccacctctcctcctctgggtctgcgtgtgtatgctcaaggtgtcagccgtactgtgtgtgtgtgcagccgcttggtgcagtcagtctctcgcagctgccgcggcggtggctgcagccggggggcggtcggacggcggtaattttctggatgataaacaatggctcaccacaatctctcagtatgacaaggaagtcggacagtggaacaaattccgagacgatgattatttccgcacttggagtccaggaaaacccttcgatcaggctttagatccagctaaggatccatgcttaaagatgaaatgtagtcgccataaagtatgcattgctcaagattctcagactgcagtctgcattagtcaccggaggcttacacacaggatgaaagaagcaggagtagaccataggcagtggaggggtcccatattatccacctgcaagcagtgcccagtggtctatcccagccctgtttgtggttcagatggtcatacctactcttttcagtgcaaacta

SEQ ID NO: 20319 - DNA, 524 bp, Homo sapiens
  misc_feature 1..524: note = ENST00000515316
  source 1..524: mol_type = unassigned DNA
atttccagcaggagctgcgagcacagtgctggctcacaacaagatgctcaaggtgtcagccgtactgtgtgtgtgtgcagccgcttggtgcagtcagtctctcgcagctgccgcggcggtggctgcagccggggggcggtcggacggcggtaattttctggatgataaacaatggctcaccacaatctctcagtatgacaaggaagtcggacagtggaacaaattccgagacgatgattatttccgcacttggagtccaggaaaacccttcgatcaggctctctccttccacgatttggggatttttgtgtgatgtgaatattgccataactgccttcctttggattagtacttgccagctttagatccagctaaggatccatgcttaaagatgaaatgtagtcgccataaagtatgcattgctcaagattctcagactgcagtctgcattagtcaccggaggcttacacacaggatgaaagaagcaggagtagaccataggcagtggaggggtcccatattat

SEQ ID NO: 20320 - DNA, 505 bp, Homo sapiens
  misc_feature 1..505: note = ENST00000506697
  source 1..505: mol_type = unassigned DNA
gtaaagcctgcggggaggggacacgcttgcctctgcttgtctcctcctccctctaccctcgtcgttgctaatgcatgttttccagggtcgctcctggcttcgtaccccttatttgacactgacatgcccccccaccccccgttgtgtctcctctcccagatgctcaaggtgtcagccgtactgtgtgtgtgtgcagccgcttggtgcagtcagtctctcgcagctgccgcggcggtggctgcagccggggggcggtcggacggcggtaattttctggatgataaacaatggctcaccacaatctctcagtatgacaaggaagtcggacagtggaacaaattccgagacgaagtagaggatgattatttccgcacttggagtccaggaaaacccttcgatcaggctttagatccagctaaggatccatgcttaaagatgaaatgtagtcgccataaagtatgcattgctcaagattctcagactgcagtctgcattagtcaccgga

SEQ ID NO: 20321 - DNA, 505 bp, Homo sapiens; identical to SEQ ID NO: 20320
  misc_feature 1..505: note = ENST00000512042
  source 1..505: mol_type = unassigned DNA

SEQ ID NO: 20322 - DNA, 3061 bp, Homo sapiens
  misc_feature 1..3061: note = ENST00000421836
  source 1..3061: mol_type = unassigned DNA
ggggggagcgcgccgggcgcagggagctgagtggacggctcgagacggcggcgcgtgcagcagctccagaaagcagcgagttggcagagcagggctgcatttccagcaggagctgcgagcacagtgctggctcacaacaagatgctcaaggtgtcagccgtactgtgtgtgtgtgcagccgcttggtgcagtcagtctctcgcagctgccgcggcggtggctgcagccggggggcggtcggacggcggtaattttctggatgataaacaatggctcaccacaatctctcagtatgacaaggaagtcggacagtggaacaaattccgagactaagaagaaaaacgattatttgacaggacagtagtgatgatcacacaagatcacatccacatgtcttctgggctcagtcaggatgattatttccgcacttggagtccaggaaaacccttcgatcaggctttagatccagctaaggatccatgcttaaagatgaaatgtagtcgccataaagtatgcattgctcaagattctcagactgcagtctgcattagtcaccggaggcttacacacaggatgaaagaagcaggagtagaccataggcagtggaggggtcccatattatccacctgcaagcagtgcccagtggtctatcccagccctgtttgtggttcagatggtcatacctactcttttcagtgcaaactagaatatcaggcatgtgtcttaggaaaacagatctcagtcaaatgtgaaggacattgcccatgtccttcagataagcccaccagtacaagcagaaatgttaagagagcatgcagtgacctggagttcagggaagtggcaaacagattgcgggactggttcaaggcccttcatgaaagtggaagtcaaaacaagaagacaaaaacattgctgaggcctgagagaagcagattcgataccagcatcttgccaatttgcaaggactcacttggctggatgtttaacagacttgatacaaactatgacctgctattggaccagtcagagctcagaagcatttaccttgataagaatgaacagtgtaccaaggcattcttcaattcttgtgacacatacaaggacagtttaatatctaataatgagtggtgctactgcttccagagacagcaagacccaccttgccagactgagctcagcaatattcagaagcggcaaggggtaaagaagctcctaggacagtatatccccctgtgtgatgaagatggttactacaagccaacacaatgtcatggcagtgttggacagtgctggtgtgttgacagatatggaaatgaagtcatgggatccagaataaatggtgttgcagattgtgctatagattttgagatctccggagattttgctagtggcgattttcatgaatggactgatgatgaggatgatgaagacgatattatgaatgatgaagatgaaattgaagatgatgatgaagatgaaggggatgatgatgatggtggtgatgaccatgatgtatacatttgattgatgacagttgaaatcaataaattctacatttctaatatttacaaaaatgatagcctatttaaaattatcttcttccccaataacaaaatgattctaaacctcacatatattttgtataattatttgaaaaattgcagctaaagttatagaactttatgtttaaataagaatcatttgctttgagtttttatattccttacacaaaaagaaaatacatatgcagtctagtcagacaaaataaagttttgaagtgctactataataagtttttcacgagaacaaactttgtaaatcttccataagcaaaatgacagctagtgcttgggatcgtacatgttaattttctgaaagataattctaagtgaaatttaaaataaataaatttttaatgacctgggtcttaaggatttaggaaaaatatgcatgctttaattgcatttccaaagtagcatcttgctagacctagttgagtcaggataacagagagataccacatggcaagaaaaacaaagtgacaattgtagagtcctcaattgtgtttacattaatagtggtgtttttacctatgaaattattctggatctaataggacattttacaaaatggcaagtatggaaaaccatggattctgaaagttaaaaatttagttgttctccccaatgtgtattttaatttggatggcagtctcatgcagattttttaaaagattctttaataacatgatttgtttgcctttctagatttctttatctttctgaccagcaacttagggagcagaatttaaattaggaagacaaagggaaagattcatttaaaccatatttttacaaagtttgtcatttgccccaaggtcaaattttaaattcttaattttcattttatttcccattttaggtaaaagtttgcatttaatcttagaattatgttatttttgttagtagtgtggaaacttagagaacttattgtatggtgccttgcaaaaatagagatagaaagattttagcatgcataccaatatagtatattacgcaatatataagcacacctaattaacagattaatatcagtaaaggtattgctgctggaatgaagaaaatgggatacgtttgtttctttttttctattgttacataattgccatgtggacttgtttatgattattgtgtagagtagcatttaagatttaactgtagcaaaaattactttaaccgctgtatttaagttagcatgttaattaattgtgtagacattttggcacaccatcacttttaactatatcataccaatggttttgtgcccataataaaaatggaaaaacctgttgaatgttacgtattggtatctttaatttcaacagtgggtaaactggtttcccagtatacaattcattgaaagcaaaattgattaattatttccatttaatttatacacactcaatacaaaatttaatgttgactttacgtaataaagtataatgcattttcttttttactgtttatgtatagtttacaaaataaagaatcttgtaaccaaa

SEQ ID NO: 20323 - DNA, 2797 bp, Homo sapiens
  misc_feature 1..2797: note = ENST00000541354
  source 1..2797: mol_type = unassigned DNA
gtgcccgctcgggctgctgcggctggggcttgcttccttatacccacctctcctcctctgggtctgcgtgtgtatgctcaaggtgtcagccgtactgtgtgtgtgtgcagccgcttggtgcagtcagtctctcgcagctgccgcggcggtggctgcagccggggggcggtcggacggcggtaattttctggatgataaacaatggctcaccacaatctctcagtatgacaaggaagtcggacagtggaacaaattccgagacgatgattatttccgcacttggagtccaggaaaacccttcgatcagggatgaaagaagcaggagtagaccataggcagtggaggggtcccatattatccacctgcaagcagtgcccagtggtctatcccagccctgtttgtggttcagatggtcatacctactcttttcagtgcaaactagaatatcaggcatgtgtcttaggaaaacagatctcagtcaaatgtgaaggacattgcccatgtccttcagataagcccaccagtacaagcagaaatgttaagagagcatgcagtgacctggagttcagggaagtggcaaacagattgcgggactggttcaaggcccttcatgaaagtggaagtcaaaacaagaagacaaaaacattgctgaggcctgagagaagcagattcgataccagcatcttgccaatttgcaaggactcacttggctggatgtttaacagacttgatacaaactatgacctgctattggaccagtcagagctcagaagcatttaccttgataagaatgaacagtgtaccaaggcattcttcaattcttgtgacacatacaaggacagtttaatatctaataatgagtggtgctactgcttccagagacagcaagacccaccttgccagactgagctcagcaatattcagaagcggcaaggggtaaagaagctcctaggacagtatatccccctgtgtgatgaagatggttactacaagccaacacaatgtcatggcagtgttggacagtgctggtgtgttgacagatatggaaatgaagtcatgggatccagaataaatggtgttgcagattgtgctatagattttgagatctccggagattttgctagtggcgattttcatgaatggactgatgatgaggatgatgaagacgatattatgaatgatgaagatgaaattgaagatgatgatgaagatgaaggggatgatgatgatggtggtgatgaccatgatgtatacatttgattgatgacagttgaaatcaataaattctacatttctaatatttacaaaaatgatagcctatttaaaattatcttcttccccaataacaaaatgattctaaacctcacatatattttgtataattatttgaaaaattgcagctaaagttatagaactttatgtttaaataagaatcatttgctttgagtttttatattccttacacaaaaagaaaatacatatgcagtctagtcagacaaaataaagttttgaagtgctactataataagtttttcacgagaacaaactttgtaaatcttccataagcaaaatgacagctagtgcttgggatcgtacatgttaattttctgaaagataattctaagtgaaatttaaaataaataaatttttaatgacctgggtcttaaggatttaggaaaaatatgcatgctttaattgcatttccaaagtagcatcttgctagacctagttgagtcaggataacagagagataccacatggcaagaaaaacaaagtgacaattgtagagtcctcaattgtgtttacattaatagtggtgtttttacctatgaaattattctggatctaataggacattttacaaaatggcaagtatggaaaaccatggattctgaaagttaaaaatttagttgttctccccaatgtgtattttaatttggatggcagtctcatgcagattttttaaaagattctttaataacatgatttgtttgcctttctagatttctttatctttctgaccagcaacttagggagcagaatttaaattaggaagacaaagggaaagattcatttaaaccatatttttacaaagtttgtcatttgccccaaggtcaaattttaaattcttaattttcattttatttcccattttaggtaaaagtttgcatttaatcttagaattatgttatttttgttagtagtgtggaaacttagagaacttattgtatggtgccttgcaaaaatagagatagaaagattttagcatgcataccaatatagtatattacgcaatatataagcacacctaattaacagattaatatcagtaaaggtattgctgctggaatgaagaaaatgggatacgtttgtttctttttttctattgttacataattgccatgtggacttgtttatgattattgtgtagagtagcatttaagatttaactgtagcaaaaattactttaaccgctgtatttaagttagcatgttaattaattgtgtagacattttggcacaccatcacttttaactatatcataccaatggttttgtgcccataataaaaatggaaaaacctgttgaatgttacgtattggtatctttaatttcaacagtgggtaaactggtttcccagtatacaattcattgaaagcaaaattgattaattatttccatttaatttatacacactcaatacaaaatttaatgttgactttacgtaataaagtataatgcattttcttttttactgtttatgtatagtttacaaaataaagaatcttgtaaccaaa

SEQ ID NO: 20324 - DNA, 4837 bp, Homo sapiens
  misc_feature 1..4837: note = ENST00000576479
  source 1..4837: mol_type = unassigned DNA
gcgctgctctcgttcgcttggctcagctcagctcagctcagcgcagctccgcggccgccaagccgaggcgggcacggtctccgagtcgcggacgccagctccgagctccctctctccgccgcgcctccgccaggtcgcgccttcgtcgggaccacttcgggcaggagtcgcgtggcgaaggcctgcggccgcggcacaaagttgggggccgcgaagatgaggctgtccccggcgcccctgaagctgagccggactccggcactgctggccctggcgctgcccctggccgcggcgctggccttctccgacgagaccctggacaaagtgcccaagtcagagggctactgcagccgtatcctgcgcgcccagggcacgcggcgcgagggctacaccgagttcagcctccgcgtggagggcgaccccgacttctacaagccgggaaccagctaccgcgtaacactttcagctgctcctccctcctacttcagaggattcacattaattgccctcagagagaacagagagggtgataaggaagaagaccatgctgggaccttccagatcatagacgaagaagaaactcagtttatgagcaattgccctgttgcagtcactgaaagcactccacggaggaggacccggatccaggtgttttggatagcaccaccagcgggaacaggctgcgtgattctgaaggccagcatcgtacaaaaacgcattatttattttcaagatgagggctctctgaccaagaaactttgtgaacaagattccacatttgatggggtgactgacaaacccatcttagactgctgtgcctgcggaactgccaagtacagactcacattttatgggaattggtccgagaagacacacccaaaggattaccctcgtcgggccaaccactggtctgcgatcatcggaggatcccactccaagaattatgtactgtgggaatatggaggatatgccagcgaaggcgtcaaacaagttgcagaattgggctcacccgtgaaaatggaggaagaaattcgacaacagagtgatgaggtcctcaccgtcatcaaagccaaagcccaatggccagcctggcagcctctcaacgtgagagcagcaccttcagctgaattttccgtggacagaacgcgccatttaatgtccttcctgaccatgatgggccctagtcccgactggaacgtaggcttatctgcagaagatctgtgcaccaaggaatgtggctgggtccagaaggtggtgcaagacctgattccctgggacgctggcaccgacagcggggtgacctatgagtcacccaacaaacccaccattccccaggagaaaatccggcccctgaccagcctggaccatcctcagagtcctttctatgacccagagggtgggtccatcactcaagtagccagagttgtcatcgagagaatcgcacggaagggtgaacaatgcaatattgtacctgacaatgtcgatgatattgtagctgacctggctccagaagagaaagatgaagatgacacccctgaaacctgcatctactccaactggtccccatggtccgcctgcagctcctccacctgtgacaaaggcaagaggatgcgacagcgcatgctgaaagcacagctggacctcagcgtcccctgccctgacacccaggacttccagccctgcatgggccctggctgcagtgacgaagacggctccacctgcaccatgtccgagtggatcacctggtcgccctgcagcatctcctgcggcatgggcatgaggtcccgggagaggtatgtgaagcagttcccggaggacggctccgtgtgcacgctgcccactgaggaaacggagaagtgcacggtcaacgaggagtgctctcccagcagctgcctgatgaccgagtggggcgagtgggacgagtgcagcgccacctgcggcatgggcatgaagaagcggcaccgcatgatcaagatgaaccccgcagatggctccatgtgcaaagccgagacatcacaggcagagaagtgcatgatgccagagtgccacaccatcccatgcttgctgtccccatggtccgagtggagtgactgcagcgtgacctgcgggaagggcatgcgaacccgacagcggatgctcaagtctctggcagaacttggagactgcaatgaggatctggagcaggtggagaagtgcatgctccctgaatgccccattgactgtgagctcaccgagtggtcccagtggtcggaatgtaacaagtcatgtgggaaaggccacgtgattcgaacccggatgatccaaatggagcctcagtttggaggtgcaccctgcccagagactgtgcagcgaaaaaagtgccgcatccgaaaatgccttcgaaatccatccatccaaaagctacgctggagggaggcccgagagagccggcggagtgagcagctgaaggaagagtctgaaggggagcagttcccaggttgtaggatgcgcccatggacggcctggtcagaatgcaccaaactgtgcggaggtggaattcaggaacgttacatgactgtaaagaagagattcaaaagctcccagtttaccagctgcaaagacaagaaggagatcagagcatgcaatgttcatccttgttagcaagggtacgagttccccagggctgcactctagattccagagtcaccaatggctggattatttgcttgtttaagacaatttaaattgtgtacgctagttttcatttttgcagtgtggttcgcccagtagtcttgtggatgccagagacatcctttctgaatacttcttgatgggtacaggctgagtggggcgccctcacctccagccagcctcttcctgcagaggagtagtgtcagccaccttgtactaagctgaaacatgtccctctggagcttccacctggccagggaggacggagactttgacctactccacatggagaggcaaccatgtctggaagtgactatgcctgagtcccagggtgcggcaggtaggaaacattcacagatgaagacagcagattccccacattctcatctttggcctgttcaatgaaaccattgtttgcccatctcttcttagtggaactttaggtctcttttcaagtctcctcagtcatcaatagttcctggggaaaaacagagctggtagacttgaagaggagcattgatgttgggtggcttttgttctttcactgagaaattcggaatacatttgtctcacccctgatattggttcctgatgcccccccaacaaaaataaataaataaattatggctgctttatttaaatataaggtagctagtttttacacctgagataaataataagcttagagtgtatttttcccttgcttttgggggttcagaggagtatgtacaattcttctgggaagccagccttctgaactttttggtactaaatccttattggaaccaagacaaaggaagcaaaattggtctctttagagaccaatttgcctaaattttaaaatcttcctacacacatctagacgttcaagtttgcaaatcagtttttagcaagaaaacatttttgctatacaaacattttgctaagtctgcccaaagcccccccaatgcattccttcaacaaaatacaatctctgtactttaaagttattttagtcatgaaattttatatgcagagagaaaaagttaccgagacagaaaacaaatctaagggaaaggaatattatgggattaagctgagcaagcaattctggtggaaagtcaaacctgtcagtgctccacaccagggctgtggtcctcccagacatgcataggaatggccacaggtttacactgccttcccagcaattataagcacaccagattcagggagactgaccaccaagggatagtgtaaaaggacattttctcagttgggtccatcagcagtttttcttcctgcatttattgttgaaaactattgtttcatttcttcttttataggccttattactgcttaatccaaatgtgtaccattggtgagacacatacaatgctctgaatacactacgaatttgtattaaacacatcagaatatttccaaatacaacatagtatagtcctgaatatgtacttttaacacaagagagactattcaataaaaactcactgggtctttcatgtctttaagctaagtaagtgttcagaaggttcttttttatattgtcctccacctccatcattttcaataaaagatagggcttttgctcccttgttcttggagggaccattattacatctctgaactacctttgtatccaacatgttttaaatccttaaatgaattgctttctcccaaaaaaagcacaatataaagaaacacaagatttaattatttttctacttggggggaaaaaagtcctcatgtagaagcacccacttttgcaatgttgttctaagctatctatctaactctcagcccatgataaagttccttaagctggtgattcctaatcaaggacaagccaccctagtgtctcatgtttgtatttggtcccagttgggtacattttaaaatcctgattttggagacttaaaaccaggttaatggctaagaatgggtaacatgactcttgttggattgttattttttgtttgcaatggggaatttataagaagcatcaagtctctttcttaccaaagtcttgttaggtggtttatagttcttttggctaacaaatcattttggaaataaagattttttactacaaaaatgaaatttgtttggacttccacttgagacagtaaagagagtattagacacccagtaaaaactgccatataaagaa

SEQ ID NO: 20325 - DNA, 1005 bp, Homo sapiens
  misc_feature 1..1005: note = ENST00000591785
  source 1..1005: mol_type = unassigned DNA
ctgaaagtcctccaaagccttcttgagtcatagagggagcatagaatgggtgatgacctggcaccaatcctgcctctgctgcttaccaaccacacgggctgaagtcagcctgcctctttggagcctcagtttcttcttctgtaaaatagcatgacacagcacctgctttgcatccctcataggcttgttgagatgttcaaaggagagcgtgaccatatcttgtttcagacatgtgatacactcatgcccatctgtgtcttgccagccattgactgtgagctcaccgagtggtcccagtggtcggaatgtaacaagtcatgtgggaaaggccacgtgattcgaacccggatgatccaaatggagcctcagtttggaggtgcaccctgcccagagactgtgcagcgaaaaaagtgccgcatccgaaaatgccttcgaaatccatccatccaaaagctacgctggagggaggcccgagagagccggcggagtgagcagctgaaggaagagtctgaaggggagcagttcccaggttgtaggatgcgcccatggacggcctggtcagaatgcaccaaactgtgcggaggtggaattcaggaacgttacatgactgtaaagaagagattcaaaagctcccagtttaccagctgcaaagacaagaaggagatcagagcatgcaatgttcatccttgttagcaagggtacgagttccccagggctgcactctagattccagagtcaccaatggctggattatttgcttgtttaagacaatttaaattgtgtacgctagttttcatttttgcagtgtggttcgcccagtagtcttgtggatgccagagacatcctttctgaatacttcttgatgggtacaggctgagtggggcgccctcacctccagccagcctcttcctgcagaggagtagtgtcagccaccttgtactaagctgaaacatgtccctctggagcttccacctggccagggaggacggagactttgacctactc

SEQ ID NO: 20326 - DNA, 1869 bp, Homo sapiens
  misc_feature 1..1869: note = ENST00000290902
  source 1..1869: mol_type = unassigned DNA
gacagggaggggaggggagggataggacagacagacaaagaaaggggtgcggcagcactgccaggggaagagggtgatccgacccggggaaggtcgctgggcagggcgagttgggaaagcggcagcccccgccgcccccgcagccccttctcctcctttctcccacgtcctatctgcctctcgctggaggccaggccgtgcagcatcgaagacaggaggaactggagcctcattggccggcccggggcgccggcctcgggcttaaataggagctccgggctctggctgggacccgaccgctgccggccgcgctcccgctgctcctgccgggtgatggaaaaccccagcccggccgccgccctgggcaaggccctctgcgctctcctcctggccactctcggcgccgccggccagcctcttgggggagagtccatctgttccgccagagccctggccaaatacagcatcaccttcacgggcaagtggagccagacggccttccccaagcagtaccccctgttccgcccccctgcgcagtggtcttcgctgctgggggccgcgcatagctccgactacagcatgtggaggaagaaccagtacgtcagtaacgggctgcgcgactttgcggagcgcggcgaggcctgggcgctgatgaaggagatcgaggcggcgggggaggcgctgcagagcgtgcacgcggtgttttcggcgcccgccgtccccagcggcaccgggcagacgtcggcggagctggaggtgcagcgcaggcactcgctggtctcgtttgtggtgcgcatcgtgcccagccccgactggttcgtgggcgtggacagcctggacctgtgcgacggggaccgttggcgggaacaggcggcgctggacctgtacccctacgacgccgggacggacagcggcttcaccttctcctcccccaacttcgccaccatcccgcaggacacggtgaccgagataacgtcctcctctcccagccacccggccaactccttctactacccgcggctgaaggccctgcctcccatcgccagggtgacactggtgcggctgcgacagagccccagggccttcatccctcccgccccagtcctgcccagcagggacaatgagattgtagacagcgcctcagttccagaaacgccgctggactgcgaggtctccctgtggtcgtcctggggactgtgcggaggccactgtgggaggctcgggaccaagagcaggactcgctacgtccgggtccagcccgccaacaacgggagcccctgccccgagctcgaagaagaggctgagtgcgtccctgataactgcgtctaagaccagagccccgcagcccctggggccccccggagccatggggtgtcgggggctcctgtgcaggctcatgctgcaggcggccgagggcacagggggtttcgcgctgctcctgaccgcggtgaggccgcgccgaccatctctgcactgaagggccctctggtggccggcacgggcattgggaaacagcctcctcctttcccaaccttgcttcttaggggcccccgtgtcccgtctgctctcagcctcctcctcctgcaggataaagtcatccccaaggctccagctactctaaattatgtctccttataagttattgctgctccaggagattgtccttcatcgtccaggggcctggctcccacgtggttgcagatacctcagacctggtgctctaggctgtgctgagcccactctcccgagggcgcatccaagcgggggccacttgagaagtgaataaatggggcggtttcggaagcgtcagtgtttccatgttatggatctctctgcgtttgaataaagactatctctgttgctcacaaa

SEQ ID NO: 20327 - DNA, 886 bp, Homo sapiens
  misc_feature 1..886: note = ENST00000509697
  source 1..886: mol_type = unassigned DNA
gccgggacggacagcggcttcaccttctcctcccccaacttcgccaccatcccgcaggacacggtgaccgagataacgtcctcctctcccagccacccggccaactccttctactacccgcggctgaaggccctgcctcccatcgccagggtgacactggtgcggctgcgacagagccccagggccttcatccctcccgccccagtcctgcccagcagggacaatgagattgtagacagcgcctcaggtaacggacatacaggtcacatgggacacacagcagccccgaaccctgccacagggcgaccaccaaacccgaacctaaggctctgagaaattccaagtagggattcgtagtgcgtactgcaagatggtgcctagaagatttaggattctgttgattcacacactgaagatgtgactcttgcacattatttgcagttgaaagcatcttacagggccacagcccagaggaaagaatgaaaggaggctccagacagtacctgagagactctgtcctgtcagacacgcacccacaggtgacctgtgtgtcacagctgacaaggaagcttgctaggatggccctgtgtggccaccgggtgacagctatgctgcagggcacctgtgggggtctcgggacccagccaccacacagctcggggctctgctcacaggcgccttggcctggggcggggcaggtgctgatgagcattctcctagctcttccaggcacctgctggacagggcaggctgggaacgctggggccgagtggcagttccctccctactcagctgggtggcagccactggcctcacggagcgcctgtggtctggagcgcattgctgggtcgtgggtcagggcctgttggctctgggtctctgggtc

SEQ ID NO: 20328 - DNA, 525 bp, Homo sapiens
  misc_feature 1..525: note = ENST00000507466
  source 1..525: mol_type = unassigned DNA
agggtgtcacggtccgacgtgactgggggccatggttccctgcgggcggcggggagggatttcctggggcgccccctggaatccaagcccgaccgcagtgtctgaccatggtccgcggcgcggccgggtggtcctgcaggggccgcgcatagctccgactacagcatgtggaggaagaaccagtacgtcagtaacgggctgcgcgactttgcggagcgcggcgaggcctgggcgctgatgaaggagatcgaggcggcgggggaggcgctgcagagcgtgcacgcggtgttttcggcgcccgccgtccccagcggcaccgggcagacgtcggcggagctggaggtgcagcgcaggcactcgctggtctcgtttgtggtgcgcatcgtgcccagccccgactggttcgtgggcgtggacagcctggacctgtgcgacggggaccgttggcgggaacaggcggcgctggacctgtacccctacgacgccgggacggacagcggcttcaccttctcctcccccaacttc

SEQ ID NO: 20329 - DNA, 597 bp, Homo sapiens
  misc_feature 1..597: note = ENST00000503765
  source 1..597: mol_type = unassigned DNA
gatgcctgcgccgggagccaggagcttccccagccacttccagcatgtagactgaagtcaggccacgcacagggctctccaggtcacaccctgcgcaagaaggtgtagcacgctggctctaatttcgagaaggccgtgcagcatcgaagacaggaggaactggagcctcattggccggcccggggcgccggcctcgggcttaaataggagctccgggctctggctgggacccgaccgctgccggccgcgctcccgctgctcctgccgggtgatggaaaaccccagcccggccgccgccctgggcaaggccctctgcgctctcctcctggccactctcggcgccgccggccagcctcttgggggagagtccatctgttccgccagagccctggccaaatacagcatcaccttcacgggcaagtggagccagacggccttccccaagcagtaccccctgttccgcccccctgcgcagtggtcttcgctgctgggggccgcgcatagctccgactacagcatgtggaggaagaaccagtacgtcagtaacgggctgcgcgactttgcggagcgcggcgaggcctgggcgctgatgaagga

SEQ ID NO: 20330 - DNA, 551 bp, Homo sapiens
  misc_feature 1..551: note = ENST00000504909
  source 1..551: mol_type = unassigned DNA
gttacccctggtcgctcgcaggcgcacgggcgatctaaccccgcgccgtccattccgctgatgggggtctcggaagcaccgcaggagagctttgcggagcagggagggggtcgcgggtgctcggggccgtcctcagagcccaaagtgccgcagccctctcggctttccaccccgaggctgccacgacggtgccagcgcgcggctgctcccctctgtgctcccaggtgatggaaaaccccagcccggccgccgccctgggcaaggccctctgcgctctcctcctggccactctcggcgccgccggccagcctcttgggggagagtccatctgttccgccagagccctggccaaatacagcatcaccttcacgggcaagtggagccagacggccttccccaagcagtaccccctgttccgcccccctgcgcagtggtcttcgctgctgggggccgcgcatagctccgactacagcatgtggaggaagaaccagtacgtcagtaacgggctgcgcgactttgcggagcgcggcgaggcctgggcgctgatgaag

SEQ ID NO: 20331 - DNA, 851 bp, Homo sapiens
  misc_feature 1..851: note = ENST00000512888
  source 1..851: mol_type = unassigned DNA
agacagacaaagaaaggggtgcggcagcactgccaggggaagagggtgatccgacccggggaaggtcgctgggcagggcgagttgggaaagcggcagcccccgccgcccccgcagccccttctcctcctttctcccacgtcctatctgcctctcgctggaggccaggccgtgcagcatcgaagacaggaggaactggagcctcattggccggcccggggcgccggcctcgggcttaaataggagctccgggctctggctgggacccgaccgctgccggccgcgctcccgctgctcctgccgggtgatggaaaaccccagcccggccgccgccctgggcaaggccctctgcgctctcctcctggccactctcggcgccgccggccagcctcttgggggagagtccatctgttccgccagagccctggccaaatacagcatcaccttcacgggcaagtggagccagacggccttccccaagcagtaccccctgttccgcccccctgcgcagtggtcttcgctgctgggtaagtacagccccctcctcgcctcctgctccaccaggagggctgcggcgccggagccccccgcacagctgcacggcggcgcttcccagtctggggcgtgctgacgtcgggagactctaacaccagaatgtttgccgagcgcctgcggtgtgcggttccggggatgcggtgggggcagggggcgctcacggggagggcgcaggtgggtcgcggcaggggcagccacagggtgtcacggtccgacgtgactgggggccatggttccctgcgggcggcggggagggatttcctggggcgccccctggaatccaagcccgaccgcagtg

SEQ ID NO: 20332 - DNA, 505 bp, Homo sapiens
  misc_feature 1..505: note = ENST00000512150
  source 1..505: mol_type = unassigned DNA
cacaccctgcgcaagaaggtgtagcacgctggctctaatttcgagaaggccgtgcagcatcgaagacaggaggaactggagcctcattggccggcccggggcgccggcctcgggcttaaataggagctccgggctctggctgggacccgaccgctgccggccgcgctcccgctgctcctgccgggtgatggaaaaccccagcccggccgccgccctgggcaaggccctctgcgctctcctcctggccactctcggcgccgccggccagcctcttgggggagagtccatctgttccgccagagccctggccaaatacagcatcaccttcacgggcaagtggagccagacggccttccccaagcagtaccccctgttccgcccccctgcgcagtggtcttcgctgctgggtaagtacagccccctcctcgcctcctgctccaccaggagggctgcggcgccggagccccccgcacagctgcacggcggcgcttcccagtctggggcg

SEQ ID NO: 20333 - DNA, 571 bp, Homo sapiens
  misc_feature 1..571: note = ENST00000515004
  source 1..571: mol_type = unassigned DNA
ctgagccgccggctgcggggttggagccgccggctgcggggttggagccgccggctgcggggttggagacgccggctgcggggttggagccgccggctgcggggttggagccgccggctgcggggttggaaccgccggctgtgagtttcctcactgcttggaggaagatgagaattctcagaggtccttatgctgccctttttgctgcagtcttgacatcttaacgtggatagaaaaaggccgtgcagcatcgaagacaggaggaactggagcctcattggccggcccggggcgccggcctcgggcttaaataggagctccgggctctggctgggacccgaccgctgccggccgcgctcccgctgctcctgccgggtgatggaaaaccccagcccggccgccgccctgggcaaggccctctgcgctctcctcctggccactctcggcgccgccggccagcctcttgggggagagtccatctgttccgccagagccctggccaaatacagcatcaccttcacgggcaagtggagccagacggccttccccaagcagtaccccctgttccgcc

SEQ ID NO: 20334 - DNA, 571 bp, Homo sapiens
  misc_feature 1..571: note = ENST00000502483
  source 1..571: mol_type = unassigned DNA
gagccctgagccgccggctgcggggttggagccgccggctgcggggttggagccgccggctgcggggttggagacgccggctgcggggttggagccgccggctgcggggttggagccgccggctgcggggttggaaccgccggctgtgagtttcctcactgcttggaggaagatgagaattctcagaggtccttatgctgccctttttgctgcagtcttgacatcttaacgtggatagaaaaaggccaggccgtgcagcatcgaagacaggaggaactggagcctcattggccggcccggggcgccggcctcgggcttaaataggagctccgggctctggctgggacccgaccgctgccggccgcgctcccgctgctcctgccgggtgatggaaaaccccagcccggccgccgccctgggcaaggccctctgcgctctcctcctggccactctcggcgccgccggccagcctcttgggggagagtccatctgttccgccagagccctggccaaatacagcatcaccttcacgggcaagtggagccagacggccttccccaagcagtacccc

SEQ ID NO: 20335 - DNA, 307 bp, Homo sapiens
  misc_feature 1..307: note = ENST00000514490
  source 1..307: mol_type = unassigned DNA
agcatgtagactgaagtcaggccacgcacagggctctccaggtcacaccctgcgcaagaaggtgtagcacgctggctctaatttcgagaaggccaggccgtgcagcatcgaagacaggaggaactggagcctcattggccggcccggggcgccggcctcgggcttaaataggagctccgggctctggctgggacccgaccgctgccggccgcgctcccgctgctcctgccgggtgatggaaaaccccagcccggccgccgccctgggcaaggccctctgcgctctcctcctggccactctcggcgcc

SEQ ID NO: 20336 - DNA, 549 bp, Homo sapiens
  misc_feature 1..549: note = ENST00000509233
  source 1..549: mol_type = unassigned DNA
agagaaacccaagagcagctgcatgagccctcccaggcctacccccgcagccggcactccctgcagcaaagaaaaccatctggccactgggccctgagcccggcgcccggaggaggacctctgccccgctgagcagctctgctccccaggctggccctgggcctctcgcggcctgacccgctccccttggcatcaagcaccaggagggacggggtggcccggccagggcgtgggtgttccccggcccctctgagcaccagcacctgtttcctcactgcttggaggaagatgagaattctcagaggtccttatgctgccctttttgctgcagtcttgacatcttaacgtggatagaaaaaggccgtgcagcatcgaagacaggaggaactggagcctcattggccggcccggggcgccggcctcgggcttaaataggagctccgggctctggctgggacccgaccgctgccggccgcgctcccgctgctcctgccgggtgatggaaaaccccagcccggccgccgccctgggcaaggccctctgcgctct

SEQ ID NO: 20337 - DNA, 556 bp, Homo sapiens
  misc_feature 1..556: note = ENST00000511679
  source 1..556: mol_type = unassigned DNA
gtgtgtttgtgaactggcgatgtgatcgagggcacgggtgctgggcttccccctcatgggtaaaaccagagctactgtatgccagccgtggaggcatggacggcccctgagctcggacagcagacggacagaccgttgacgcgttggcaccgtggccagagtccgttcaagaaaggtcggcagagagggctgagaacgcggcaggcacatcctccaagggccctgctggaacccctggagcaggaggaagcggtgattctccaggccttggtttcctcactgcttggaggaagatgagaattctcagaggtccttatgctgccctttttgctgcagtcttgacatcttaacgtggatagaaaaaggccaggccgtgcagcatcgaagacaggaggaactggagcctcattggccggcccggggcgccggcctcgggcttaaataggagctccgggctctggctgggacccgaccgctgccggccgcgctcccgctgctcctgccgggtgatggaaaaccccagcccggccgccgccctgggcaaggccctctgcgc

SEQ ID NO: 20338 - DNA, 557 bp, Homo sapiens
  misc_feature 1..557: note = ENST00000511672
  source 1..557: mol_type = unassigned DNA
aagagccccgggaagagctgcatgcacacggctggagagaggctctgcacccgagcacagcctgctgcgactcctcatagacccggaaaactgattagaaggcagagggcctcctccctccctgcgtggtttgggggctgttcctgatagcacagatgccctgatcacaaacacctgcctgcattgctgaccacaggcctggcctggagaaacccacagcctcttcagggaagcgagcaaggggcttggaagtgcctgaagccagtgggctggggactcacggccgggacactcagggcagtttcctcactgcttggaggaagatgagaattctcagaggtccttatgctgccctttttgctgcagtcttgacatcttaacgtggatagaaaaaggccgtgcagcatcgaagacaggaggaactggagcctcattggccggcccggggcgccggcctcgggcttaaataggagctccgggctctggctgggacccgaccgctgccggccgcgctcccgctgctcctgccgggtgatggaaaaccccagcccggccgc

SEQ ID NO: 20339 - DNA, 462 bp, Homo sapiens
  misc_feature 1..462: note = ENST00000506266
  source 1..462: mol_type = unassigned DNA
gtgaactggcgatgtgatcgagggcacgggtgctgggcttccccctcatgggtaaaaccagagctactgtatgccagccgtggaggcatggacggcccctgagctcggacagcagacggacagaccgttgacgcgttggcaccgtggccagagtccgttcaagaaaggtcggcagagagggctgagaacgcggcaggcacatcctccaagggccctgctggaacccctggagcaggaggaagcggtgattctccaggccttggtttcctcactgcttggaggaagatgagaattctcagaggtccttatgctgccctttttgctgcagtcttgacatcttaacgtggatagaaaaaggccgtgcagcatcgaagacaggaggaactggagcctcattggccggcccggggcgccggcctcgggcttaaataggagctccgggctctggctgggacccgaccg

SEQ ID NO: 20340 - DNA, 581 bp, Homo sapiens
  misc_feature 1..581: note = ENST00000504871
  source 1..581: mol_type = unassigned DNA
agtccctctggggtggcccaagcagggcacagggcagggagccaggctcttcggggccccaccccaggctggccctgcaccccatcctgccttctctccccactgtgggcccagaacttgccccgtgggggccgggaagcacccaccatccccacccctagctgctctcagccagagcccagctggacttgcaggattgattttccagcaaaaaacaacagcagagaaacccaagagcagctgcatgagccctcccaggcctacccccgcagccggcactccctgcagcaaagaaaaccatctggccactgggccctgagcccggcgcccggaggaggacctctgccccgctgagcagctctgctccccaggctggccctgggcctctcgcggcctgacccgctccccttggcatcaagcaccaggagggacggggtggcccggccagggcgtgggtgttccccggcccctctgagcaccagcacctggccgtgcagcatcgaagacaggaggaactggagcctcattggccggcccggggcgccggcctcgggcttaaataggagctccgggctctggct

SEQ ID NO: 20341 - DNA, 559 bp, Homo sapiens
  misc_feature 1..559: note = ENST00000502657
  source 1..559: mol_type = unassigned DNA
gatgtgatcgagggcacgggtgctgggcttccccctcatgggtaaaaccagagctactgtatgccagccgtggaggcatggacggcccctgagctcggacagcagacggacagaccgttgacgcgttggcaccgtggccagagtccgttcaagaaaggtcggcagagagggctgagaacgcggcaggcacatcctccaagggccctgctggaacccctggagcaggaggaagcggtgattctccaggccttggacctaattatggagagagagacacggagggagctcctgtgaccctcaagtcccctcatcatgtccccgtcctgttggctttccgagtttagctcccatgtttggaccatggaggtttatgtcttctatctcagtcatcgtccctgccacatgcccaaccagacatgctgacatcacaggccctacttagccctgtttcctctccccttggcctcaccttgatgtcaggggggtgtcctctggtctgactcagaggcagtgactggcttccttctagtaccttctctggataatgagtatggatgac

SEQ ID NO: 20342 - DNA, 1736 bp, Homo sapiens
  misc_feature 1..1736: note = ENST00000400762
  source 1..1736: mol_type = unassigned DNA
ggttctgacactgagggctccggggcaggggcagggcccgctggcttggcgtgcgcgtgcgtgcacaggtgtgtgggtgtctgcctggtgggcgggcggcgtgtgcgtgtgcgcatgtgtgtttgtgaactggcgatgtgatcgagggcacgggtgctgggcttccccctcatgggtaaaaccagagctactgtatgccagccgtggaggcatggacggcccctgagctcggacagcagacggacagaccgttgacgcgttggcaccgtggccagagtccgttcaagaaaggtcggcagagagggctgagaacgcggcaggcacatcctccaagggccctgctggaacccctggagcaggaggaagcggtgattctccaggccttggccacagggacaggccaggcctcacagccaagagccccgggaagagctgcatgcacacggctggagagaggctctgcacccgagcacagcctgctgcgactcctcatagacccggaaaactgattagaaggcagagggcctcctccctccctgcgtggtttgggggctgttcctgatagcacagatgccctgatcacaaacacctgcctgcattgctgaccacaggcctggcctggagaaacccacagcctcttcagggaagcgagcaaggggcttggaagtgcctgaagccagtgggctggggactcacggccgggacactcagggcaggccgtgcgccgtttctcctggaataactggaggtgatttcatggaacctggaggctgggcttcaggctggggggagaggctccagactgggtcttctccgtggctctgccccccgctctccttgcttgagtggtgggggccctgcatcctctcatgcccacccccacctttctcgccaaattgtcggaggcttttgtcacctggagacactgttcctgccagctccggtcttggaaaacatggcctctcctctcctgccctggccccggcccctcctgccagctggacgtgggcatttctgcacccagtagaaccccacagccaggaaagatgcctggaaggctagagaagaggcgtgatggggggaccccatgtgtggcgacagagcagcacacccagctattctcagccaccatgtgggagagaaatgacgcctctgtcgagctccccatggccggagctgctccatacagcatcctaaccttcacccccaactactcagttgccatggcaaagggaatattttgactccctttttttaaaatttccaggtgattattgctagaggagtgggaagttactaatttttgtatatttatcttgtattaaaatgtttttactgatttttaattttaattttaatattttttgagatggagtttcactcttctggcctaggctggagtgcagtggtgtgatttcggctcgctgcaacctccacccatgggttcaagcgattctcgtgcctcagacccccgagtagctgggattacaggcatgcaccaccacgcccggctaattttgtgtttttagtagagacaggatttcactatgttggtcaggctggtctcgaactcctgatctcaggtgatctgcccaccttggcctcccaaagtgctgggattacaggcgtgagccaccgcacctggcctgatttttaatttttaaatgagggagcagaggcataactaggtttacaatcatgtcatcaacaaaataaattgtcttatttttctgata

SEQ ID NO: 20343 - DNA, 520 bp, Homo sapiens
  misc_feature 1..520: note = ENST00000505653
  source 1..520: mol_type = unassigned DNA
cccacagcctcttcagggaagcgagcaaggggcttggaagtgcctgaagccagtgggctggggactcacggccgggacactcagggccgtgcgccgtttctcctggaataactggaggtgatttcatggaacctggaggctgggcttcaggctggggggagaggctccagactgggtcttctccgtggctctgccccccgctctccttgcttgagtggtgggggccctgcatcctctcatgcccacccccacctttctcgccaaattgtcggaggcttttgtcacctggagacactgttcctgccagctccggtcttggaaaacatggcctctcctctcctgccctggccccggcccctcctgccagctggacgtgggcatttctgcacccagtagaaccccacagccaggaaagatgcctggaaggctagagaagaggcgtgatggggggaccccatgtgtggcgacagagcagcacacccagctattctcagccaccatgtgggagagaaatgacgcc

SEQ ID NO: 20344 - DNA, 234 bp, Homo sapiens
  misc_feature 1..234: note = ENST00000515553
  source 1..234: mol_type = unassigned DNA
acagccaagagccccgggaagagctgcatgcacacggctggagagaggctctgcacccgagcacagcctgctgcgactcctcatagacccggaaaactgattagaaggcagaggccgtgcgccgtttctcctggaataactggaggtgatttcatggaacctggaggctgggcttcaggctggggggagaggctccagactgggtcttctccgtggctctgccccccgctctcc

SEQ ID NO: 20345 - DNA, 633 bp, Homo sapiens
  misc_feature 1..633: note = ENST00000510542
  source 1..633: mol_type = unassigned DNA
gggtcgggacagtccctctggggtggcccaagcagggcacagggcagggagccaggctcttcggggccccaccccaggctggccctgcaccccatcctgccttctctccccactgtgggcccagaacttgccccgtgggggccgggaagcacccaccatccccacccctagctgctctcagccagagcccagctggacttgcaggattgattttccagcaaaaaacaacagcagagaaacccaagagcagctgcatgagccctcccaggcctacccccgcagccggcactccctgcagcaaagaaaaccatctggccactgggccctgagcccggcgcccggaggaggacctctgccccgctgagcagctctgctccccaggctggccctgggcctctcgcggcctgacccgctccccttggcatcaagcaccaggagggacggggtggcccggccagggcgtgggtgttccccggcccctctgagcaccagcacctgccacagggacaggccaggcctcacagccaagagccccgggaagagctgcatgcacacggctggagagaggctctgcacccgagcacagcctgctgcgactcctcatagacccggaaaactgattagaaggcagag

SEQ ID NO: 20346 - DNA, 2156 bp, Homo sapiens
  misc_feature 1..2156: note = ENST00000617421
  source 1..2156: mol_type = unassigned DNA
ggttctgacactgagggctccggggcaggggcagggcccgctggcttggcgtgcgcgtgcgtgcacaggtgtgtgggtgtctgcctggtgggcgggcggcgtgtgcgtgtgcgcatgtgtgtttgtgaactggcgatgtgatcgagggcacgggtgctgggcttccccctcatgggtaaaaccagagctactgtatgccagccgtggaggcatggacggcccctgagctcggacagcagacggacagaccgttgacgcgttggcaccgtggccagagtccgttcaagaaaggtcggcagagagggctgagaacgcggcaggcacatcctccaagggccctgctggaacccctggagcaggaggaagcggtgattctccaggccttggtttcctcactgcttggaggaagatgagaattctcagaggtccttatgctgccctttttgctgcagtcttgacatcttaacgtggatagaaaaaggccaggccgtgcagcatcgaagacaggaggaactggagcctcattggccggcccggggcgccggcctcgggcttaaataggagctccgggctctggctgggacccgaccgctgccggccgcgctcccgctgctcctgccgggtgatggaaaaccccagcccggccgccgccctgggcaaggccctctgcgctctcctcctggccactctcggcgccgccggccagcctcttgggggagagtccatctgttccgccagagccctggccaaatacagcatcaccttcacgggcaagtggagccagacggccttccccaagcagtaccccctgttccgcccccctgcgcagtggtcttcgctgctgggggccgcgcatagctccgactacagcatgtggaggaagaaccagtacgtcagtaacgggctgcgcgactttgcggagcgcggcgaggcctgggcgctgatgaaggagatcgaggcggcgggggaggcgctgcagagcgtgcacgcggtgttttcggcgcccgccgtccccagcggcaccgggcagacgtcggcggagctggaggtgcagcgcaggcactcgctggtctcgtttgtggtgcgcatcgtgcccagccccgactggttcgtgggcgtggacagcctggacctgtgcgacggggaccgttggcgggaacaggcggcgctggacctgtacccctacgacgccgggacggacagcggcttcaccttctcctcccccaacttcgccaccatcccgcaggacacggtgaccgagataacgtcctcctctcccagccacccggccaactccttctactacccgcggctgaaggccctgcctcccatcgccagggtgacactggtgcggctgcgacagagccccagggccttcatccctcccgccccagtcctgcccagcagggacaatgagattgtagacagcgcctcagttccagaaacgccgctggactgcgaggtctccctgtggtcgtcctggggactgtgcggaggccactgtgggaggctcgggaccaagagcaggactcgctacgtccgggtccagcccgccaacaacgggagcccctgccccgagctcgaagaagaggctgagtgcgtccctgataactgcgtctaagaccagagccccgcagcccctggggccccccggagccatggggtgtcgggggctcctgtgcaggctcatgctgcaggcggccgagggcacagggggtttcgcgctgctcctgaccgcggtgaggccgcgccgaccatctctgcactgaagggccctctggtggccggcacgggcattgggaaacagcctcctcctttcccaaccttgcttcttaggggcccccgtgtcccgtctgctctcagcctcctcctcctgcaggataaagtcatccccaaggctccagctactctaaattatgtctccttataagttattgctgctccaggagattgtccttcatcgtccaggggcctggctcccacgtggttgcagatacctcagacctggtgctctaggctgtgctgagcccactctcccgagggcgcatccaagcgggggccacttgagaagtgaataaatggggcggtttcggaagcgtcagtgtttccatgttatggatctctctgcgtttgaataaagactatctctgttgctc

SEQ ID NO: 20347 - DNA, 1802 bp, Homo sapiens
  misc_feature 1..1802: note = ENST00000431380
  source 1..1802: mol_type = unassigned DNA
gatgcctgcgccgggagccaggagcttccccagccacttccagcatgtagactgaagtcaggccacgcacagggctctccaggtcacaccctgcgcaagaaggtgtagcacgctggctctaatttcgagaaggccgtgcagcatcgaagacaggaggaactggagcctcattggccggcccggggcgccggcctcgggcttaaataggagctccgggctctggctgggacccgaccgctgccggccgcgctcccgctgctcctgccgggtgatggaaaaccccagcccggccgccgccctgggcaaggccctctgcgctctcctcctggccactctcggcgccgccggccagcctcttgggggagagtccatctgttccgccagagccctggccaaatacagcatcaccttcacgggcaagtggagccagacggccttccccaagcagtaccccctgttccgcccccctgcgcagtggtcttcgctgctgggggccgcgcatagctccgactacagcatgtggaggaagaaccagtacgtcagtaacgggctgcgcgactttgcggagcgcggcgaggcctgggcgctgatgaaggagatcgaggcggcgggggaggcgctgcagagcgtgcacgcggtgttttcggcgcccgccgtccccagcggcaccgggcagacgtcggcggagctggaggtgcagcgcaggcactcgctggtctcgtttgtggtgcgcatcgtgcccagccccgactggttcgtgggcgtggacagcctggacctgtgcgacggggaccgttggcgggaacaggcggcgctggacctgtacccctacgacgccgggacggacagcggcttcaccttctcctcccccaacttcgccaccatcccgcaggacacggtgaccgagataacgtcctcctctcccagccacccggccaactccttctactacccgcggctgaaggccctgcctcccatcgccagggtgacactggtgcggctgcgacagagccccagggccttcatccctcccgccccagtcctgcccagcagggacaatgagattgtagacagcgcctcagttccagaaacgccgctggactgcgaggtctccctgtggtcgtcctggggactgtgcggaggccactgtgggaggctcgggaccaagagcaggactcgctacgtccgggtccagcccgccaacaacgggagcccctgccccgagctcgaagaagaggctgagtgcgtccctgataactgcgtctaagaccagagccccgcagcccctggggccccccggagccatggggtgtcgggggctcctgtgcaggctcatgctgcaggcggccgagggcacagggggtttcgcgctgctcctgaccgcggtgaggccgcgccgaccatctctgcactgaagggccctctggtggccggcacgggcattgggaaacagcctcctcctttcccaaccttgcttcttaggggcccccgtgtcccgtctgctctcagcctcctcctcctgcaggataaagtcatccccaaggctccagctactctaaattatgtctccttataagttattgctgctccaggagattgtccttcatcgtccaggggcctggctcccacgtggttgcagatacctcagacctggtgctctaggctgtgctgagcccactctcccgagggcgcatccaagcgggggccacttgagaagtgaataaatggggcggtttcggaagcgtcagtgtttccatgttatggatctctctgcgtttgaataaagactatctctgttgctc

SEQ ID NO: 20348 - DNA, 1581 bp, Homo sapiens
  misc_feature 1..1581: note = ENST00000237623
  source 1..1581: mol_type = unassigned DNA
ggatgtctgcagcagcatttaaattctgggagggcttggttgtcagcagcagcaggaggaggcagagcacagcatcgtcgggaccagactcgtctcaggccagttgcagccttctcagccaaacgccgaccaaggaaaactcactaccatgagaattgcagtgatttgcttttgcctcctaggcatcacctgtgccataccagttaaacaggctgattctggaagttctgaggaaaagcagctttacaacaaatacccagatgctgtggccacatggctaaaccctgacccatctcagaagcagaatctcctagccccacagacccttccaagtaagtccaacgaaagccatgaccacatggatgatatggatgatgaagatgatgatgaccatgtggacagccaggactccattgactcgaacgactctgatgatgtagatgacactgatgattctcaccagtctgatgagtctcaccattctgatgaatctgatgaactggtcactgattttcccacggacctgccagcaaccgaagttttcactccagttgtccccacagtagacacatatgatggccgaggtgatagtgtggtttatggactgaggtcaaaatctaagaagtttcgcagacctgacatccagtaccctgatgctacagacgaggacatcacctcacacatggaaagcgaggagttgaatggtgcatacaaggccatccccgttgcccaggacctgaacgcgccttctgattgggacagccgtgggaaggacagttatgaaacgagtcagctggatgaccagagtgctgaaacccacagccacaagcagtccagattatataagcggaaagccaatgatgagagcaatgagcattccgatgtgattgatagtcaggaactttccaaagtcagccgtgaattccacagccatgaatttcacagccatgaagatatgctggttgtagaccccaaaagtaaggaagaagataaacacctgaaatttcgtatttctcatgaattagatagtgcatcttctgaggtcaattaaaaggagaaaaaatacaatttctcactttgcatttagtcaaaagaaaaaatgctttatagcaaaatgaaagagaacatgaaatgcttctttctcagtttattggttgaatgtgtatctatttgagtctggaaataactaatgtgtttgataattagtttagtttgtggcttcatggaaactccctgtaaactaaaagcttcagggttatgtctatgttcattctatagaagaaatgcaaactatcactgtattttaatatttgttattctctcatgaatagaaatttatgtagaagcaaacaaaatacttttacccacttaaaaagagaatataacattttatgtcactataatcttttgttttttaagttagtgtatattttgttgtgattatctttttgtggtgtgaataaatcttttatcttgaatgtaataagaatttggtggtgtcaattgcttatttgttttcccacggttgtccagcaattaataaaacataaccttttttactgcctatataatgtttttaaa

SEQ ID NO: 20349 - DNA, 1473 bp, Homo sapiens
  misc_feature 1..1473: note = ENST00000395080
  source 1..1473: mol_type = unassigned DNA
aattctgggagggcttggttgtcagcagcagcaggaggaggcagagcacagcatcgtcgggaccagactcgtctcaggccagttgcagccttctcagccaaacgccgaccaaggaaaactcactaccatgagaattgcagtgatttgcttttgcctcctaggcatcacctgtgccataccagttaaacaggctgattctggaagttctgaggaaaagcagctttacaacaaatacccagatgctgtggccacatggctaaaccctgacccatctcagaagcagaatctcctagccccacagaatgctgtgtcctctgaagaaaccaatgactttaaacaagagacccttccaagtaagtccaacgaaagccatgaccacatggatgatatggatgatgaagatgatgatgaccatgtggacagccaggactccattgactcgaacgactctgatgatgtagatgacactgatgattctcaccagtctgatgagtctcaccattctgatgaatctgatgaactggtcactgattttcccacggacctgccagcaaccgaagttttcactccagttgtccccacagtagacacatatgatggccgaggtgatagtgtggtttatggactgaggtcaaaatctaagaagtttcgcagacctgacatccagtaccctgatgctacagacgaggacatcacctcacacatggaaagcgaggagttgaatggtgcatacaaggccatccccgttgcccaggacctgaacgcgccttctgattgggacagccgtgggaaggacagttatgaaacgagtcagctggatgaccagagtgctgaaacccacagccacaagcagtccagattatataagcggaaagccaatgatgagagcaatgagcattccgatgtgattgatagtcaggaactttccaaagtcagccgtgaattccacagccatgaatttcacagccatgaagatatgctggttgtagaccccaaaagtaaggaagaagataaacacctgaaatttcgtatttctcatgaattagatagtgcatcttctgaggtcaattaaaaggagaaaaaatacaatttctcactttgcatttagtcaaaagaaaaaatgctttatagcaaaatgaaagagaacatgaaatgcttctttctcagtttattggttgaatgtgtatctatttgagtctggaaataactaatgtgtttgataattagtttagtttgtggcttcatggaaactccctgtaaactaaaagcttcagggttatgtctatgttcattctatagaagaaatgcaaactatcactgtattttaatatttgttattctctcatgaatagaaatttatgtagaagcaaacaaaatacttttacccacttaaaaagagaatataacattttatgtcactataatcttttgttttttaagttagtgtatattttgttgtgattatctttttgt

SEQ ID NO: 20350 - DNA, 557 bp, Homo sapiens
  misc_feature 1..557: note = ENST00000504310
  source 1..557: mol_type = unassigned DNA
agcagcaggaggaggcagagcacagcatcgtcgggaccagactcgtctcaggccagttgcagccttctcagccaaacgccgaccaaggaaaactcactaccatgagaattgcagtgatttgcttttgcctcctaggcatcacctgtgccataccagttaaacaggctgattctggaagttctgaggaaaagcagcactaaagatgtacctacccctccacaacagatgaaactgtgccagccaaacaacaaatgggcattgtccccagaagcttggacaaaaaggcacacagagttcaattccagttgaacagaataaaggccaaaatagagctgccttgggggtcactgcaattagactgcttaatgaagacattaaaagaagtattctgtgttcgtttgtgtgtggaggggtgtgtgtgtctgtttttcaactgatttgaaaatacaggtgttgaatcctaataataaaccagaaaaattaacatctccagagaagatagaggtcatactatttgaggcaagaattagcgtctttttaataaacgaaaatatggc

SEQ ID NO: 20351 - DNA, 719 bp, Homo sapiens
  misc_feature 1..719: note = ENST00000513981
  source 1..719: mol_type = unassigned DNA
agcagcaggaggaggcagagcacagcatcgtcgggaccagactcgtctcaggccagttgcagccttctcagccaaacgccgaccaaggaaaactcactaccatgagaattgcagtgatttgcttttgcctcctaggcatcacctgtgccataccagttaaacaggctgattctggaagttctgaggaaaagcagcactaaagatgtacctacccctccacaacagatgaaactgtgccagccaaacaacaaatgggcattgtccccagaagcttggacaaaaaggcacacagagttcaattccagttgaacagaataaaggccaaaatagagctgccttgggggtcactgcaattagactgcttaatgaagacattaaaagaagtattctgtctttacaacaaatacccagatgctgtggccacatggctaaaccctgacccatctcagaagcagaatctcctagccccacagaatgctgtgtcctctgaagaaaccaatgactttaaacaagagacccttccaagtaagtccaacgaaagccatgaccacatggatgatatggatgatgaagatgatgatgaccatgtggacagccaggactccattgactcgaacgactctgatgatgtagatgacactgatgattctcaccagtctgatgagtctcaccattctgatgaatctgatgaactggtcactgattttcccacggacctg

SEQ ID NO: 20352 - DNA, 760 bp, Homo sapiens
  misc_feature 1..760: note = ENST00000509334
  source 1..760: mol_type = unassigned DNA
agcagcaggaggaggcagagcacagcatcgtcgggaccagactcgtctcaggccagttgcagccttctcagccaaacgccgaccaaggaaaactcactaccatgagaattgcagtgatttgcttttgcctcctaggcatcacctgtgccataccagttaaacaggctgattctggaagttctgaggaaaagcagcactaaagatgtacctacccctccacaacagatgaaactgtgccagccaaacaacaaatgggcattgtccccagaagcttggacaaaaaggcacacagagttcaattccagttgaacagaataaaggccaaaatagagctgccttgggggtcactgcaattagactgcttaatgaagacattaaaagaagtattctgtctttacaacaaatacccagatgctgtggccacatggctaaaccctgacccatctcagaagcagaatctcctagccccacagacccttccaagtaagtccaacgaaagccatgaccacatggatgatatggatgatgaagatgatgatgaccatgtggacagccaggactccattgactcgaacgactctgatgatgtagatgacactgatgattctcaccagtctgatgagtctcaccattctgatgaatctgatgaactggtcactgattttcccacggacctgccagcaaccgaagttttcactccagttgtccccacagtagacacatatgatggccgaggtgatagtgtggtttatggactgag

SEQ ID NO: 20353 - DNA, 825 bp, Homo sapiens
  misc_feature 1..825: note = ENST00000508233
  source 1..825: mol_type = unassigned DNA
agcagcaggaggaggcagagcacagcatcgtcgggaccagactcgtctcaggccagttgcagccttctcagccaaacgccgaccaaggaaaactcactaccatgagaattgcagtgatttgcttttgcctcctaggcatcacctgtgccataccagttaaacaggctgattctggaagttctgaggaaaagcagacccttccaagtaagtccaacgaaagccatgaccacatggatgatatggatgatgaagatgatgatgaccatgtggacagccaggactccattgactcgaacgactctgatgatgtagatgacactgatgattctcaccagtctgatgagtctcaccattctgatgaatctgatgaactggtcactgattttcccacggacctgccagcaaccgaagttttcactccagttgtccccacagtagacacatatgatggccgaggtgatagtgtggtttatggactgaggtcaaaatctaagaagtttcgcagacctgacatccagtaccctgatgctacagacgaggacatcacctcacacatggaaagcgaggagttgaatggtgcatacaaggccatccccgttgcccaggacctgaacgcgccttctgattgggacagccgtgggaaggacagttatgaaacgagtcagctggatgaccagagtgctgaaacccacagccacaagcagtccagattatataagcggaaagccaatgatgagagcaatgagcattccgatgtgattgatagtcaggaactttccaaagtcagccgtgaattccacagccatgaatttcacagccatgaag

SEQ ID NO: 20354 - DNA, 1196 bp, Homo sapiens
  misc_feature 1..1196: note = ENST00000360804
  source 1..1196: mol_type = unassigned DNA
agcagcaggaggaggcagagcacagcatcgtcgggaccagactcgtctcaggccagttgcagccttctcagccaaacgccgaccaaggaaaactcactaccatgagaattgcagtgatttgcttttgcctcctaggcatcacctgtgccataccagttaaacaggctgattctggaagttctgaggaaaagcagaatgctgtgtcctctgaagaaaccaatgactttaaacaagagacccttccaagtaagtccaacgaaagccatgaccacatggatgatatggatgatgaagatgatgatgaccatgtggacagccaggactccattgactcgaacgactctgatgatgtagatgacactgatgattctcaccagtctgatgagtctcaccattctgatgaatctgatgaactggtcactgattttcccacggacctgccagcaaccgaagttttcactccagttgtccccacagtagacacatatgatggccgaggtgatagtgtggtttatggactgaggtcaaaatctaagaagtttcgcagacctgacatccagtaccctgatgctacagacgaggacatcacctcacacatggaaagcgaggagttgaatggtgcatacaaggccatccccgttgcccaggacctgaacgcgccttctgattgggacagccgtgggaaggacagttatgaaacgagtcagctggatgaccagagtgctgaaacccacagccacaagcagtccagattatataagcggaaagccaatgatgagagcaatgagcattccgatgtgattgatagtcaggaactttccaaagtcagccgtgaattccacagccatgaatttcacagccatgaagatatgctggttgtagaccccaaaagtaaggaagaagataaacacctgaaatttcgtatttctcatgaattagatagtgcatcttctgaggtcaattaaaaggagaaaaaatacaatttctcactttgcatttagtcaaaagaaaaaatgctttatagcaaaatgaaagagaacatgaaatgcttctttctcagtttattggttgaatgtgtatctatttgagtctggaaataactaatgtgtttgataattagtttagtttgtggcttcatggaaactccctgtaaactaaaagcttcagggttatgtctatgttcattctatagaaga

SEQ ID NO: 20355 - DNA, 1664 bp, Homo sapiens
  misc_feature 1..1664: note = ENST00000509659
  source 1..1664: mol_type = unassigned DNA
gcagcaggaggaggcagagcacagcatcgtcgggaccagactcgtctcaggccagttgcagccttctcagccaaacgccgaccaaggaaaactcactaccatgagaattgcagtgatttgcttttgcctcctaggcatcacctgtgccataccagttaaacaggctgattctggaagttctgaggaaaagcagcactaaagatgtacctacccctccacaacagatgaaactgtgccagccaaacaacaaatgggcattgtccccagaagcttggacaaaaaggcacacagagttcaattccagttgaacagaataaaggccaaaatagagctgccttgggggtcactgcaattagactgcttaatgaagacattaaaagaactttacaacaaatacccagatgctgtggccacatggctaaaccctgacccatctcagaagcagaatctcctagccccacagaatgctgtgtcctctgaagaaaccaatgactttaaacaagagacccttccaagtaagtccaacgaaagccatgaccacatggatgatatggatgatgaagatgatgatgaccatgtggacagccaggactccattgactcgaacgactctgatgatgtagatgacactgatgattctcaccagtctgatgagtctcaccattctgatgaatctgatgaactggtcactgattttcccacggacctgccagcaaccgaagttttcactccagttgtccccacagtagacacatatgatggccgaggtgatagtgtggtttatggactgaggtcaaaatctaagaagtttcgcagacctgacatccagtaccctgatgctacagacgaggacatcacctcacacatggaaagcgaggagttgaatggtgcatacaaggccatccccgttgcccaggacctgaacgcgccttctgattgggacagccgtgggaaggacagttatgaaacgagtcagctggatgaccagagtgctgaaacccacagccacaagcagtccagattatataagcggaaagccaatgatgagagcaatgagcattccgatgtgattgatagtcaggaactttccaaagtcagccgtgaattccacagccatgaatttcacagccatgaagatatgctggttgtagaccccaaaagtaaggaagaagataaacacctgaaatttcgtatttctcatgaattagatagtgcatcttctgaggtcaattaaaaggagaaaaaatacaatttctcactttgcatttagtcaaaagaaaaaatgctttatagcaaaatgaaagagaacatgaaatgcttctttctcagtttattggttgaatgtgtatctatttgagtctggaaataactaatgtgtttgataattagtttagtttgtggcttcatggaaactccctgtaaactaaaagcttcagggttatgtctatgttcattctatagaagaaatgcaaactatcactgtattttaatatttgttattctctcatgaatagaaatttatgtagaagcaaacaaaatacttttacccacttaaaaagagaatataacattttatgtcactataatcttttgttttttaagttagtgtatattttgttgtgattatctttttgtggtgtgaataaatcttttatcttgaatgt

SEQ ID NO: 20356 - DNA, 568 bp, Homo sapiens
  misc_feature 1..568: note = ENST00000508002
  source 1..568: mol_type = unassigned DNA
agcaggaggaggcagagcacagcatcgtcgggaccagactcgtctcaggccagttgcagccttctcagccaaacgccgaccaaggaaaactcactaccatgagaattgcagtgatttgcttttgcctcctaggcatcacctgtgccataccagttaaacaggctgattctggaagttctgaggaaaagcagctttacaacaaatacccagatgctgtggccacatggctaaaccctgacccatctcagaagcagaatctcctagccccacagaatgctgtgtcctctgaagaaaccaatgactttaaacaagaggtaagttctcattttcaatcagaggcccatcatgccttgaagagatgaaagaaggcattgcctggattctcttctgatgaaatttcattagcaagttttccagctaattggcagtctaaaacttgctcataaataaaacatgtatttactaaatatcagaaatactaggtttcctcggataagtttagcattacagaagatgtttattaatgcctgttatttgaaacattaatctgcttgcaatttatttaagg

SEQ ID NO: 20357 - DNA, 252 bp, Homo sapiens
  misc_feature 1..252: note = ENST00000505146
  source 1..252: mol_type = unassigned DNA
aggaaaactcactaccatgagaattgcagtgatttgcttttgcctcctaggcatcacctgtgccataccagttaaacaggctgattctggaagttctgaggaaaagcagctttacaacaaatacccagatgctgtggccacatggctaaaccctgacccatctcagaagcagaatctcctagccccacaggtatttttaaacttctcataattaaactacagtgatgaaagatagccacactcaggccattt

SEQ ID NO: 20358 - DNA, 1558 bp, Homo sapiens
  misc_feature 1..1558: note = ENST00000614857
  source 1..1558: mol_type = unassigned DNA
ctccctgtgttggtggaggatgtctgcagcagcatttaaattctgggagggcttggttgtcagcagcagcaggaggaggcagagcacagcatcgtcgggaccagactcgtctcaggccagttgcagccttctcagccaaacgccgaccaaggaaaactcactaccatgagaattgcagtgatttgcttttgcctcctaggcatcacctgtgccataccagttaaacaggctgattctggaagttctgaggaaaagcagctttacaacaaatacccagatgctgtggccacatggctaaaccctgacccatctcagaagcagaatctcctagccccacagaatgctgtgtcctctgaagaaaccaatgactttaaacaagagacccttccaagtaagtccaacgaaagccatgaccacatggatgatatggatgatgaagatgatgattctcaccagtctgatgagtctcaccattctgatgaatctgatgaactggtcactgattttcccacggacctgccagcaaccgaagttttcactccagttgtccccacagtagacacatatgatggccgaggtgatagtgtggtttatggactgaggtcaaaatctaagaagtttcgcagacctgacatccagtaccctgatgctacagacgaggacatcacctcacacatggaaagcgaggagttgaatggtgcatacaaggccatccccgttgcccaggacctgaacgcgccttctgattgggacagccgtgggaaggacagttatgaaacgagtcagctggatgaccagagtgctgaaacccacagccacaagcagtccagattatataagcggaaagccaatgatgagagcaatgagcattccgatgtgattgatagtcaggaactttccaaagtcagccgtgaattccacagccatgaatttcacagccatgaagatatgctggttgtagaccccaaaagtaaggaagaagataaacacctgaaatttcgtatttctcatgaattagatagtgcatcttctgaggtcaattaaaaggagaaaaaatacaatttctcactttgcatttagtcaaaagaaaaaatgctttatagcaaaatgaaagagaacatgaaatgcttctttctcagtttattggttgaatgtgtatctatttgagtctggaaataactaatgtgtttgataattagtttagtttgtggcttcatggaaactccctgtaaactaaaagcttcagggttatgtctatgttcattctatagaagaaatgcaaactatcactgtattttaatatttgttattctctcatgaatagaaatttatgtagaagcaaacaaaatacttttacccacttaaaaagagaatataacattttatgtcactataatcttttgttttttaagttagtgtatattttgttgtgattatctttttgtggtgtgaataaatcttttatcttgaatgtaataagaatttggtggtgtcaattgcttatttgttttcccacggttgtccagcaattaataaaacataaccttttttactgcct

SEQ ID NO: 20359 - DNA, 1539 bp, Homo sapiens
  misc_feature 1..1539: note = ENST00000587013
  source 1..1539: mol_type = unassigned DNA
cgtagaccaccacctctttagaaccttgagaccagtccctgtccctgccccgtcccctcctcatagcattagagaccaatggcgcagatgggtggaaaagtgggggatcccctctggatcttaagaaaatgggggctggggggttgctctctggagctagtgccgggctctaggacccagcaggcaagtaagcccgcctcgctcttacccctcccccaagccgccccttccccccccacccgtcttccaggttccccctccctcccccctcgccccggctcccggtgcccgtctccagcgccgccggagccagccagggagccggaacgaaaaggaggaggaggaggccgcgtcgccgccgctcggagcccggccggagcctcgcagacaaccttggagtgtacactgaagccaggcttggtttacaacaaggtgaatcccatctttcaccactggagcctgggtgactgcaagtttggactgacgtttcagagccctgcagaggctgatgagttccagaagagcctgctggctgcgctggccgcactgggtcgaggctcactcaccccctcctcctcctcctcctcctcctctccttcccaggatactgcagagaccccctgccctctgacgtcccacgtggacagcgactcctcctccagtcacagccgccaggagactcctcccagcgccgctgcggcccccatcatcacgatggagtcagcttcaggcttcgggccgaccacgcccccccagcgccgccgctcctccgctcagagctaccctccgcttctaccgttcacggggattccggaaccctcagagcccctggcaggggcagggggcctggggtggggcggccgcggctacgaggattaccggcgctccgggccacccgcgcccctcgccctgtccacctgcgtcgtgcgcttcgccaagaccggcgcgttgaggggcgctgccctgggtcccccagcggcactacctgcccctttgaccgaggctgcgcccccagcgccccccgctcgcccaccccccggcccgggcccatcctctgcgcctgccaaggcctccccggaagcggaggaggcagcgcgctgcgtgcattgccgcgcgctcttccgtcgcagagcagacgggcgtggcggccgctgcgcagaggccccggacccgggtcgcctcctggtgcgccgtctaagctgcctgtggtgcgccgagagcttgctctaccactgcctgtcggacgccgagggcgacttctcggacccgtgcgcctgcgagccgggccacccgcgccccgccgcgcgctgggccgcgctggccgcgctctccctggcagtgccctgcctctgctgctacgcgcccctgcgcgcgtgccactgggtcgcagcgcgatgcggctgcgccggctgcgggggtcgccacgaggaggctgcgcggtgaggacggcctggtgggtcccctagccggcccgaggacccaaaattgagggtccaggaccccggactccgttcggacctaaaacccaaacctaggcac

SEQ ID NO: 20360 - DNA, 1366 bp, Homo sapiens
  misc_feature 1..1366: note = ENST00000586301
  source 1..1366: mol_type = unassigned DNA
ctctggatgtgtcttcggtcgcccgtttctgacttcctctgcctccgtctccctctgagcctctctttctggccatttctggttctctccctgttccctgcccatctcccgttgctgggtgactcagtacatggtgcgggtccgagctgtggtgatggcccgagatgactccagtgggggctggctgcctgtggggggcgggggcctcagccaggtgagcgtgtgtcgggtccgaggggccaggcccgaggggggggcccgccaggggcactacgtcatccacggggaacgcctccgggaccagaaaacaaccttggagtgtacactgaagccaggcttggtttacaacaaggtgaatcccatctttcaccactggagcctgggtgactgcaagtttggactgacgtttcagagccctgcagaggctgatgagttccagaagagcctgctggctgcgctggccgcactgggtcgaggctcactcaccccctcctcctcctcctcctcctcctctccttcccaggatactgcagagaccccctgccctctgacgtcccacgtggacagcgactcctcctccagtcacagccgccaggagactcctcccagcgccgctgcggcccccatcatcacgatggagtcagcttcaggcttcgggccgaccacgcccccccagcgccgccgctcctccgctcagagctaccctccgcttctaccgttcacggggattccggaaccctcagagcccctggcaggggcagggggcctggggtggggcggccgcggctacgaggattaccggcgctccgggccacccgcgcccctcgccctgtccacctgcgtcgtgcgcttcgccaagaccggcgcgttgaggggcgctgccctgggtcccccagcggcactacctgcccctttgaccgaggctgcgcccccagcgccccccgctcgcccaccccccggcccgggcccatcctctgcgcctgccaaggcctccccggaagcggaggaggcagcgcgctgcgtgcattgccgcgcgctcttccgtcgcagagcagacgggcgtggcggccgctgcgcagaggccccggacccgggtcgcctcctggtgcgccgtctaagctgcctgtggtgcgccgagagcttgctctaccactgcctgtcggacgccgagggcgacttctcggacccgtgcgcctgcgagccgggccacccgcgccccgccgcgcgctgggccgcgctggccgcgctctccctggcagtgccctgcctctgctgctacgcgcccctgcgcgcgtgccactgggtcgcagcgcgatgcggctgcgccggctgcgggggtcgccacgaggaggctgcgcggtgagga

SEQ ID NO: 20361 - DNA, 646 bp, Homo sapiens
  misc_feature 1..646: note = ENST00000587947
  source 1..646: mol_type = unassigned DNA
agaaagggcagacatggagaagaagatagaggtgagagagaagagatggcatgaggaagaaaggagctgtgtggaagacggtggccatggggttgaaggtacatggtgcgggtccgagctgtggtgatggcccgagatgactccagtgggggctggctgcctgtggggggcgggggcctcagccaggtgagcgtgtgtcgggtccgaggggccaggcccgaggggggggcccgccaggggcactacgtcatccacggggaacgcctccgggaccagaaaacaaccttggagtgtacactgaagccaggcttggtttacaacaaggtgaatcccatctttcaccactggagcctgggtgactgcaagtttggactgacgtttcagagccctgcagaggctgatgagttccagaagagcctgctggctgcgctggccgcactgggtcgaggctcactcaccccctcctcctcctcctcctcctcctctccttcccaggatactgcagagaccccctgccctctgacgtcccacgtggacagcgactcctcctccagtcacagccgccaggagactcctcccagcgccgctgcggcccccatcatcacgatggagtcagcttcaggcttcgggccgaccacgccccccc

SEQ ID NO: 20362 - DNA, 4778 bp, Homo sapiens
  misc_feature 1..4778: note = ENST00000338502
  source 1..4778: mol_type = unassigned DNA
aagttggaggggagatgagggttgagggaacattccatgggagagcagggtttgagctcatgactgtgttgtccctgtccttccccccacctcctgcaggtacatggtgcgggtccgagctgtggtgatggcccgagatgactccagtgggggctggctgcctgtggggggcgggggcctcagccaggtgagcgtgtgtcgggtccgaggggccaggcccgaggggggggcccgccaggggcactacgtcatccacggggaacgcctccgggaccagaaaacaaccttggagtgtacactgaagccaggcttggtttacaacaaggtgaatcccatctttcaccactggagcctgggtgactgcaagtttggactgacgtttcagagccctgcagaggctgatgagttccagaagagcctgctggctgcgctggccgcactgggtcgaggctcactcaccccctcctcctcctcctcctcctcctctccttcccaggatactgcagagaccccctgccctctgacgtcccacgtggacagcgactcctcctccagtcacagccgccaggagactcctcccagcgccgctgcggcccccatcatcacgatggagtcagcttcaggcttcgggccgaccacgcccccccagcgccgccgctcctccgctcagagctaccctccgcttctaccgttcacggggattccggaaccctcagagcccctggcaggggcagggggcctggggtggggcggccgcggctacgaggattaccggcgctccgggccacccgcgcccctcgccctgtccacctgcgtcgtgcgcttcgccaagaccggcgcgttgaggggcgctgccctgggtcccccagcggcactacctgcccctttgaccgaggctgcgcccccagcgccccccgctcgcccaccccccggcccgggcccatcctctgcgcctgccaaggcctccccggaagcggaggaggcagcgcgctgcgtgcattgccgcgcgctcttccgtcgcagagcagacgggcgtggcggccgctgcgcagaggccccggacccgggtcgcctcctggtgcgccgtctaagctgcctgtggtgcgccgagagcttgctctaccactgcctgtcggacgccgagggcgacttctcggacccgtgcgcctgcgagccgggccacccgcgccccgccgcgcgctgggccgcgctggccgcgctctccctggcagtgccctgcctctgctgctacgcgcccctgcgcgcgtgccactgggtcgcagcgcgatgcggctgcgccggctgcgggggtcgccacgaggaggctgcgcggtgaggacggcctggtgggtcccctagccggcccgaggacccaaaattgagggtccaggaccccggactccgttcggacctaaaacccaaacctaggcacatccggaacttggagcttgagtttggattgagagatctcagacctggaacctggaacccaaacctaggactgagagaccccagccccagcttcattggggtgtctgtctaagaagtcccaggcgtcctgagttctggcgttcccccacccccacaccccacgaggaggctccaggcgtccccatactttgcatctcagaaaggccagggagcacatagatcccgaaaagggcaggtccctgttgaaatgaacaacctagaacccggtcacgcctggcaccatgtccctcagattacagccccacaattagtcaggacttgcccataactggctctgcctttattcaactcccagatcagatcttgagaccataggacctggagtcacccacaaacagttcctgaatattcacctaagacctggtgcccccacatctgagacattctcatagtcccaggacccctgagacagcaggacccctgagaaagtttcaaacagagtttgaaactctgttatgctctggaatctccagatgctgcccctcaaatctacccacgacttagtgcccacagacctggcctccagtccgggaacactgaagtctaagatgtccagggaactcccagacaccctgggaccccagactcttaagatgcactgagtgctcggatatactgaaacacgagctgttctcttaccaaaatgacttgggagacccatcccagagcccccaagatccagatatcagacaccaagatgctctggaagccagggatcaaagacctccataggtccacccacccccaagccagggttctcaggagctttggatatcatttataggactcagaggtgcctggggtcctcagatgtgcgactgaaggccaccaacacctcaggacccgagatactggtctcgagttctcaaatagccctctcttgcagtccctcctggacctggattttgagaccccaaatgtcctggaatcttcagcttctttctacccacagattcccaaccccttaagggctgggagtccagctcccagaagaggggatgctcatggtgacccagacctctgatgcccttggccctcagcccttgagtgaccctaaggtactttaggagcactggatccaataccccaaaggtgccactgacccccaaatgcaaggctcaagaccctacaacattgggattgttcctgatccaagaccttcatccctccataccagaggcgttcagattcgaggtgccccaagaccccagcaccctcagaccccagatttctttggattcaaacctctctagtctgatgaaccccaagttgcctctacacctgattcccccatccccacttgtcggacctcagagacctgctgccccttgaatcctgtcatccataggcccctaaaaccccaaggttccagcctctggaattctggtcccaaggatcccagcccaagcccccagcaatcctcagaattacccctttatcttagggtgggatccctaccatttggaactcattgtaggaccacccagggtggggcacagtggctcatgccttgtaatcccagcactttgggaggccaagggaggaggatcgcttaaggccaggagtttgagaccagcctgggcaatgtagtgagaccgtctctaaaaaaaaaaaaaaaggaccaagtaggagctccctcactgtcacgtctaggacccagcattgtcacagatgattatgcagggtcttcattaagtgaaggcacacagcccagggtttcgaggagctggaagtcacaccagtctgctggccacactgtgccctcagaagaagtgtgtgcaatggaaactttcaggctagttatggctctgctgtcccacagcccccagtcttgcagaccttccttcaagcacaaccttaattcctagtccaggttcaagtcccaccttttatgttctccccctccattaaccccttctcttcctatttatttatttatttatttatttattttgagacagagtctcgctgtatcacccaggctggagtgcagtggcacaatctcggctcaccacaacctccccctcccgggttcaagccattcgtctgcctcagcctcccgagtagctgggataacaggcatgtgccaccacacccagctaattttttgtattttgagtagagacagggtttcaccatgttggccaggatggtctcaaactcctgacctcatgatccacctgcctcagcctcccaaagtgctgggattacaggcatgagccactgcacctggctctcttccactttagagtgagaagttgcttcaggaagtttgaaagcctgtttcatggcccactgagtctcttctgtgcaaaggggggtgccacaggcttttttcccccaagtgaaatggggcttccagtggatcgaagatctggtgtcctgtatgggggcctcaaggtcttggagcaagacagtctcaatgttgtatgggcttgggacctgcatctggccccaagcatctggaactgtgcacttaacctttcttcattacccagacttggatggccttgttggggttcaagggataggtcctctgtctcttcctttaaattattaactatttattacatccggaacctgtgagattcagcactcccaaccagaccctgggatgggtgagagaaaagcgggggtgtctctcccctccccactctgcccagctctcatcactgtcagacccaccagagctgagggcggagggattgggggctggggcagcctgggtccccatgcccctctctgtgcctcggtctccccccttccatggtgggcgggggggaagctccattcttaacctacctcgttttggggaggggtgggacgggggaccagagtgctgtacggtgctgtgggatctgcagatgaagcggtgggggctaaggaaaggtcccctggccgccacttcccagcagcgcctctcccaggtcccccagtcctgctccctgctgagacccacctctgatccatgattccccttcattgcccccaaatcaggggtacatggagggccgccctgggagccaggcagacctcagaccctggagcccccaggcccaatttcccagccgcttgcccctcagatcggatgcttggcccccagatttgggggaggcaccccaacatatatcttcctgatcttgtttctaagccagtctgtgacctcaatattgttagtgtcagtgcaggctgaagtggtgggggaggatgggggccaaagacccagccttgtcatcgggggagggggcacgagatctgctccaagaaatgtctgtgacaaagtctca

SEQ ID NO: 20363 - DNA, 543 bp, Homo sapiens
  misc_feature 1..543: note = ENST00000587564
  source 1..543: mol_type = unassigned DNA
gtacatggtgcgggtccgagctgtggtgatggcccgagatgactccagtgggggctggctgcctgtggggggcgggggcctcagccaggtgagcgtgtgtcgggtccgaggggccaggcccgaggggggggcccgccaggggcactacgtcatccacggggaacgcctccgggaccagaaaacaaccttggagtgtacactgaagccaggcttggtttacaacaaggtgaatcccatctttcaccactggagcctgggtgactgcaagtttggactgacgtttcagagccctgcagaggctgatgagttccagaagagcctgctggctgcgctggccgcactgggtcgaggctcactcaccccctcctcctcctcctcctcctcctctccttcccaggatactgcagagaccccctgccctctgacgctctcccagtacttcaggcatatgctgtgcccttgacagtggccctaaccgcatccttatgaataggtactcttaggatccccgttttacagaggaggaaactgaggctcaaagag

SEQ ID NO: 20364 - DNA, 478 bp, Homo sapiens
  misc_feature 1..478: note = ENST00000586958
  source 1..478: mol_type = unassigned DNA
gtacatggtgcgggtccgagctgtggtgatggcccgagatgactccagtgggggctggctgcctgtggggggcgggggcctcagccagacaaccttggagtgtacactgaagccaggcttggtttacaacaaggtgaatcccatctttcaccactggagcctgggtgactgcaagtttggactgacgtttcagagccctgcagaggctgatgagttccagaagagcctgctggctgcgctggccgcactgggtcgaggctcactcaccccctcctcctcctcctcctcctcctctccttcccaggatactgcagagaccccctgccctctgacgctctcccagtacttcaggcatatgctgtgcccttgacagtggccctaaccgcatccttatgaataggtactcttaggatccccgttttacagaggaggaaactgaggctcaaagagtcccacgtggacagcgactcctcctcca

SEQ ID NO: 20365 - DNA, 560 bp, Homo sapiens
  misc_feature 1..560: note = ENST00000590962
  source 1..560: mol_type = unassigned DNA
gtgaatcccatctttcaccactggagcctgggtgactgcaagtttggactgacgtttcagagccctgcagaggctgatgagttccagaagagcctgctggctgcgctggccgcactgggtcgaggctcactcaccccctcctcctcctcctcctcctcctctccttcccaggatactgcagagaccccctgccctctgacggtgagtgtccaggatgcctctctgctgggggagggtaggggttttgtttttattctatgaacattcttgagcacctactgtgtagcaggcaccatgccacacaccgggtacacaaaattgggccggaactatgagtgtcaattcaatcccagttattctagtctttctgccctgtcatgattcacacgttcattcaagggtccttattgtgtaccttctgtataccaggcagtgctttaggcactgggttacatcagtgaacaaaaagttcctttcctcctggagcttctattctagtgtggaaaggcagaaaattaaaaaaaatatatatataaacaataaaaatgaataaatattga

SEQ ID NO: 20366 - DNA, 2908 bp, Homo sapiens
  misc_feature 1..2908: note = ENST00000310546
  source 1..2908: mol_type = unassigned DNA
cggcggcggaggagggggaggcggcggcggctgcagcatccagagctggccgtggcggccggcgcgccccgcgcacaaaagcacccagccccaggggagggcgatgaacacaccacatcccgggcccgggccccagctgctgctaccgctgcgtgcgctcagggcgctggggaagacgcccggcgcgccgggggccagcggccgaggcgcggcccgtgcgccctgagcgcgggactcgtcgccctccgggtcaggcgccaagcttccaagcggctagagcgcgggccttggagcgcccccaggatcgcttcagtaaggcgcttccccactccaggcccgacccccggcgcctgagcgccaacttcgccaagaacgctcctaactccaggccatcctgcagcgcagagggggcgctgctgccgggcatcagccgtgaggacgcgcccctggccgtgcggagagagccggcatttgcgggtcactcgggcgcccctgagtgggcggcggcggcagcagacccctctccagggagtccaggacctgccagcgctggggattcttcccgaacaggcgcttgccctctcttttatggagcttgggcccctgccgcagcccggtagaggctgtggaggtctaccgtccggaagcctggttcccagccccgtggcccattcctggctacggggagtggaggctcccacgaggtagcggtggcctgcagcggcctcctccccgcagtgaagcatgggccagaagctctcggggagcctcaagtcagtggaggtgcgagagccggcgctgcggccggccaagcgggagctgcggggtgcagagcccgggcggccggcgcggctggaccagctgttggacatgccagcggcggggctggctgtgcagctgcggcacgcgtggaaccccgaggaccgctcgctcaacgtcttcgtcaaggacgacgaccggctcaccttccaccggcaccccgtggcccagagcaccgacggcatccgcggcaaggtgggccacgcccgcggcctgcacgcctggcagatcaactggccggctcggcagcgcggcacccacgctgtagttggtgtggccacggcccgtgctcccctgcactccgtgggctacacggcgctggtaggcagtgacgccgagtcgtggggctgggacctgggccgcagccgcctctaccacgacggcaagaaccagcccggcgtggcctacccggcctttctggggcccgacgaggcctttgcgctgcccgactcgctgctcgtggtgctggacatggatgagggcacactcagcttcatcgtggatggccagtacctgggcgtggccttccgaggtctcaagggcaagaagctgtacccggtggtgagtgccgtgtggggccactgtgaagtcaccatgcgctacatcaacggccttgaccccgagcccctgccactgatggacctgtgccggagatccatccgctcggccctgggccgccagcgcctgcaggacatcagctccctgcccctgcctcagtctctcaaaaactatctgcagtaccagtgagccaagcctgatgggcagcacagacacagacacacaccgcagggcccgaccctcctgtcattcacagtcccatggcacataggggaaaggatctacccttctcctggctccccaggacactcagttctttcaaagaccaggatgtggtaccaactttggaaacgaaaggtctcttgccaacagtatctactgccctcgaggcagccctcccaagtcagacacctccttcggagccacagagagcctggagtctgcacctcctggaaatcctgccaccaaccaggacacagcagccaccgtattgatcagagagcctgtttccttattcaagagaatgaataaaacatttaggcaggagactttctattgtgtgccccgttgcagacagggccagggagaaattagccagtgcagggggaaaattgcctctgaataatgaatgatgaaagcctgacgccgtgcccctcctggcccatacgccttgccagggcggcaggattgtcacaccgttttaggactctgtgccactttgagagactgttcccaggaggcccaaccgcagacctggcaagtggacagtgcagtgtggagacaccttccggcttacctctttgaacgttgtttacctacccctttccacgtgctccccttcccagccactgactcacagttctctggatgcccagacacctctcttcagggaagatgagtctgactggtttgccccagggaagagcatatccttaccattattttaagtagcatttgcattttaaaagaggaatgcggagaggacagtacttagtccaaaggtgctaacgggggaactgggggcattgtgacacccaagtctgatgtgtcctgggttggggggccttcctggagtgtcagggtctctgggcaacgtccattcagggtgcggcatggctgtcacaaagctttatttgagcaaattattttttcactttaggagacttctacaagtttgtttcctgtttcaaatgtgtgtgtgatgtgctgtttatttatcagcttgaggtccatgggggcagccttgtgactggaagggtggatatgggagacacattctctacctgctccgagcctggtcctctcgcaggaatgctgctgctgcctccgccgccactgctgctgccacctcttatatgtttcagacactctctgcccagactcatttttaactggaaatcatcacagcagtgggatatcagagccccagacagcactgcctcttcctccccaccccactgcccccaccttaatgtgaatttgactgatgaatgaagagcgtttctaataaagtttgtcattcagtccttca

SEQ ID NO: 20367 - DNA, 1752 bp, Homo sapiens
  misc_feature 1..1752: note = ENST00000508126
  source 1..1752: mol_type = unassigned DNA
cgtggtgctggacatggatgagggcacactcagcttcatcgtggatggccagtacctgggcgtggccttccgaggtctcaagggcaagaagctgtacccggtggtgagtgccgtgtggggccactgtgaagtcaccatgcgctacatcaacggccttgaccatggagtctcactcggttgccctggccaaagtgcagtggcacgatctcggctcactgcaacctccgcctcccgggttcaagctattcttctgcctcagcttcccgagtagctgggactacagccgagcccctgccactgatggacctgtgccggagatccatccgctcggccctgggccgccagcgcctgcaggacatcagctccctgcccctgcctcagtctctcaaaaactatctgcagtaccagtgagccaagcctgatgggcagcacagacacagacacacaccgcagggcccgaccctcctgtcattcacagtcccatggcacataggggaaaggatctacccttctcctggctccccaggacactcagttctttcaaagaccaggatgtggtaccaactttggaaacgaaaggtctcttgccaacagtatctactgccctcgaggcagccctcccaagtcagacacctccttcggagccacagagagcctggagtctgcacctcctggaaatcctgccaccaaccaggacacagcagccaccgtattgatcagagagcctgtttccttattcaagagaatgaataaaacatttaggcaggagactttctattgtgtgccccgttgcagacagggccagggagaaattagccagtgcagggggaaaattgcctctgaataatgaatgatgaaagcctgacgccgtgcccctcctggcccatacgccttgccagggcggcaggattgtcacaccgttttaggactctgtgccactttgagagactgttcccaggaggcccaaccgcagacctggcaagtggacagtgcagtgtggagacaccttccggcttacctctttgaacgttgtttacctacccctttccacgtgctccccttcccagccactgactcacagttctctggatgcccagacacctctcttcagggaagatgagtctgactggtttgccccagggaagagcatatccttaccattattttaagtagcatttgcattttaaaagaggaatgcggagaggacagtacttagtccaaaggtgctaacgggggaactgggggcattgtgacacccaagtctgatgtgtcctgggttggggggccttcctggagtgtcagggtctctgggcaacgtccattcagggtgcggcatggctgtcacaaagctttatttgagcaaattattttttcactttaggagacttctacaagtttgtttcctgtttcaaatgtgtgtgtgatgtgctgtttatttatcagcttgaggtccatgggggcagccttgtgactggaagggtggatatgggagacacattctctacctgctccgagcctggtcctctcgcaggaatgctgctgctgcctccgccgccactgctgctgccacctcttatatgtttcagacactctctgcccagactcatttttaactggaaatcatcacagcagtgggatatcagagccccagacagcactgcctcttcctccccaccccactgcccccaccttaatgtgaatttgactgatgaatgaagagcgtttctaataaagtttgtcattcagtccttc

SEQ ID NO: 20368 - DNA, 537 bp, Homo sapiens
  misc_feature 1..537: note = ENST00000508828
  source 1..537: mol_type = unassigned DNA
gggggatggggtttaagtgagcggggagagccaatgccctgccaggctggcggcagcctttatttacagggtcgggagccagctgatttgctttggttaaagcaagggggcggttagcgtgagttacggcctcgcccagacactaataaggctgcttgtctgaggcattccataattcaagcaaaggctgtgccgcttaatggcccttcttcgtcagatcttccaggactcggtgcctccttaatgagttatttgcttgggatgaaattaagccgagacagcgtgagcttggaaaatactgccgtgcaggctctccccggttcttcatccttctcagcggctgctttctataaatagagccgtgagttctgcttcgtgacccgcctgctgggagccccagtgggcgcctggtgtctcccatccctcttgtctcccacgcccatgatctcactgaaaactgaattccaggctttttaagaaagcatagagttccctgggtctactaagaaccatctggcagtccagccaagaaaaggg

SEQ ID NO: 20369 - DNA, 576 bp, Homo sapiens
  misc_feature 1..576: note = ENST00000507895
  source 1..576: mol_type = unassigned DNA
accttgtcatcatcccagctttgaagtcatttaagtagatgcttctgagtcgatccagggagccacagctgacttccagatcttgtcctctttgttgatgtttctccctcaaaatgcaattcatgaggaggtcccaggaaaactgaattccaggctttttaagaaagcatagagttccctgggtctactaagaaccatctggcagtccagccaagaaaaggggcctctgtaaagcagtgaactcagcgtgagctttgccgagcccctgccactgatggacctgtgccggagatccatccgctcggccctgggccgccagcgcctgcaggacatcagctccctgcccctgcctcagtctctcaaaaactatctgcagtaccagtgagccaagcctgatgggcagcacagacacagacacacaccgcagggcccgaccctcctgtcattcacagtcccatggcacataggggaaaggatctacccttctcctggctccccaggacactcagttctttcaaagaccaggatgtggtaccaactttggaaacgaaaggtctcttgccaacagtatctact

SEQ ID NO: 20370 - DNA, 10153 bp, Homo sapiens
  misc_feature 1..10153: note = ENST00000556626
  source 1..10153: mol_type = unassigned DNA
gtgccaggagccccgcgctgccctcctccccctgcgccgccgccgccgccacccccgggctcggggtggcccccgcttcagtcccagggcagggatccttccatgaagactgaggcaggcggagctgctaagagcctgctgacatgacatcggccacagagtttgaaaatgtgggcaaccagccaccttacagcaggatcaatgcccgctgggacgccccagacgacgagctggataatgacaacagctcagccaggctctttgagaggtcccggataaaggccttggcagatgagcgggaagttgttcagaaaaagaccttcacgaaatgggtgaactcgcacctggctcgagtgtcctgccgcatcaccgatctctacaaggacctgcgggatgggcgcatgctcatcaagctgctggaggtgctctctggagagatgctgccaaagcccaccaaggggaagatgcgcatccactgcctggagaatgtggacaaggctctccagttcctcaaggagcagcgtgtacacctggagaacatgggctcccacgacattgtagatggcaaccaccgcctggtcctgggcctcatctggaccatcatcctccgcttccagattcaggacattgtggtccaaactcaggaaggtcgtgaaacacgctcagccaaggatgcgttgctgttgtggtgtcagatgaagacggcaggctaccctcatgttaatgtcaccaactttacctccagctggaaggatggcttggcctttaatgccctgatacacaagcaccggcccgacctgatcgactttgataagctgaaggactccaatgcccggcacaacctggagcacgcattcaatgtggctgagcgccagctgggcatcatcccgctcctcgaccccgaagatgtctttacggaaaaccctgatgagaaatccatcatcacctatgtggtggccttttaccactacttctccaagatgaaggtgctggcagtggagggcaagcgtgtcggcaaggttattgaccatgccattgagactgagaagatgattgaaaagtacagcgggctagcctcggacctgctcacctggatcgagcagaccatcactgtcctgaacagccgcaagtttgccaactcgctgacgggcgtccagcagcagctgcaggccttcagcacctaccgcaccgtggagaagccgcccaagtttcaagagaaggggaatctggaagttctactttttaccatccagtcccggatgagagccaacaatcagaaagtgtacacaccccacgatgggaaactagtgtctgacatcaacagggcctgggaaagcctggaggaagctgagtatcggcgggagctggccctgagaaatgagctcattcggcaggagaagctagagcaactggcccggcgctttgaccggaaggccgcaatgagagagacctggctcagtgaaaaccagcgcctcgtggcccaggataactttgggtatgacctggcagctgtggaggccgccaagaagaagcatgaggccatcgagaccgacacggctgcctacgaggagcgggtgagagccctggaggacctggctcaggagctggagaaagagaactaccatgaccagaagcgcatcacggcccgcaaggacaatatactgcgcctatggagctacctgcaggagctgctgcagtcccggcgccagaggctcgagaccaccctggcactgcagaagctcttccaggacatgctgcacagcatcgactggatggatgagatcaaggctcacctcttgtctgccgagtttgggaagcacttgttggaggttgaagacctgctacagaagcacaagttgatggaagctgacatcgccatccaaggggacaaagtgaaggccatcaccgcagccaccctgaagttcaccgaggggaaagggtaccagccttgtgacccccaggtcatccaggaccgcatcagccacttggagcagtgctttgaggagctgagcaacatggcagctgggcggaaggcccaactggagcagtccaaacgactctggaagttcttctgggagatggatgaggctgagagctggatcaaggagaaggagcagatctattcttccctggactatggcaaagacctgaccagtgtgctcatcttacagcgcaagcacaaggcctttgaggatgagctccgtgggctggatgctcacctggagcagatcttccaggaggctcatggcatggttgcgcgcaagcagtttgggcacccgcagatcgaggcccgcataaaggaggtgtcggcacagtgggaccagctgaaggacctggctgccttctgcaagaagaacctccaggatgctgagaactttttccagttccagggcgatgcggatgacctgaaggcttggctgcaagacgcccaccggctgctctctggtgaagatgtggggcaggacgaaggggccacgcgggccctggggaaaaagcacaaggacttcctggaggagctggaggagagccgtggggtgatggagcacctggagcagcaggcccagggattccccgaagagtttcgggattccccagatgtgacccatcggctgcaggccctgcgggagctctaccaacaggtggtggcccaggcggacctgcgtcagcagaggctgcaggaagccctggacctgtacacggtgttcggggagacagacgcctgtgagctgtggatgggagagaaggagaagtggctggccgagatggaaatgccagacaccctggaggacctggaggtcgtgcagcacaggttcgacatcctggaccaggagatgaagaccttgatgactcagattgatggtgtgaacctcgctgccaacagcttggtagagagtggccacccacgcagcagggaggtgaagcagtaccaggaccatctgaacaccaggtggcaggcatttcagaccctggtgtcggagcggcgggaggctgtggactcagccctccgagtgcacaactactgcgtagattgcgaggagaccagcaagtggatcacggacaagacaaaggtagtggagtccacaaaagacctggggcgggacctggcaggtatcatcgccatccagaggaagttgtcagggctggagcgtgacgtggccgccatccaggcccgtgtggatgccctggagcgtgagtcccagcagctgatggactcgcaccctgagcagaaggaggatattggtcagcggcaaaaacacttggaggagctgtggcagggcctgcagcaatccctgcagggccaggaggacttgctgggggaagtcagccagctgcaggccttcctgcaggatctggatgacttccaggcctggctctccatcacccagaaggctgtggcctctgaggacatgcccgaatccctcccagaggctgagcagctcctgcagcagcatgcaggtatcaaggatgagattgacgggcaccaagacagctaccagcgtgttaaggagtctggggagaaagtgatccaaggccagacggacccagagtatctgcttctgggccagcggctggagggcctggatactggctggaatgccctgggcaggatgtgggagagccgcagccacaccctcgctcagtgccttggcttccaggagttccagaaagatgccaagcaggctgaagccatcctcagcaaccaggaatacactctggctcacttggagcccccagactccctggaagctgcagaggctgggatccggaagtttgaggatttcttggggtctatggagaacaaccgggataaggtcttgagtcctgtggactctggaaacaagctggtagctgagggaaacctatactcagacaagatcaaggagaaggtgcagctgattgaggacaggcacaggaagaacaacgagaaggcccaggaggcctctgtcctactgagagacaacctggagctacagaacttcctccagaactgccaggagctcactctctggatcaacgacaagctgctgacatctcaggatgtctcctatgatgaagcacgaaaccttcacaataaatggctaaagcaccaggcgtttgtggcagagctggcttcccatgaagggtggctagagaacatcgatgcggaaggaaagcagctgatggatgagaagccccagtttacagccctggtgtcccaaaagctggaagccctgcaccggctctgggacgagctgcaggccaccacaaaggagaagacccagcacctctcggctgccaggagctccgacctgcgcttgcagacccatgctgacctcaacaagtggatcagcgccatggaggaccagctgcggtcagacgacccgggcaaggacctgaccagtgtcaatcggatgttggctaagctgaagcgagtggaggaccaagtgaatgtgcgaaaagaggagctgggggagctgtttgcccaggtgccttcaatgggagaggagggaggagatgcagacttgagcatcgagaagcggttcctggacctcctggaacccctaggaaggaggaagaagcagctggaatcatccagagccaagctgcagatcagccgggacttagaggatgagacgctttgggtggaggagaggctgcctctggcccagtcagccgactatggcactaatctgcaaactgtgcaactgttcatgaagaagaaccagacactgcagaatgagattctgggccatacgccgcgggttgaggatgtgctgcagagagggcagcagctggtggaggcggcggagatcgactgccaggaccttgaggagcgcctggggcacctgcagagctcctgggacaggctgcgggaggcagcggccgggaggctgcagcgactgagggacgccaacgaggcacagcagtactacctggatgcagacgaggctgaggcctggattggcgagcaggagctctacgtcatctccgatgagatccccaaggatgaagagggcgccattgtgatgctgaagcgacatttgcggcagcagcgtgcggtggaggactacggccggaacatcaagcagctggccagccgggcccagggcctgctgtctgcaggccaccctgagggggaacagatcatcagacttcaggggcaagtggacaagcactacgcagggctgaaggacgtggcggaagagcgcaagcgcaagctggagaacatgtaccacctgttccagctcaagcgggagaccgacgacctggagcagtggatttcagaaaaggagctagtggcctcttccccggaaatggggcaagactttgaccacgtgactcttctgcgggacaagttccgggactttgcccgggagaccggggcgattgggcaggagcgggtggacaatgtgaatgccttcatcgagcgactcatcgacgcgggccacagcgaggcggccaccatcgccgagtggaaggacgggctgaacgagatgtgggcagacctcctggagctcattgacacgcgcatgcagctgctggccgcctcctatgacctgcaccgctacttctacacgggtgccgagatcctgggcctcatcgacgagaagcaccgcgagctgcccgaggacgtggggctggacgccagcacggccgagtccttccaccgggtgcacacagccttcgagcgggagctccacctgctgggtgtccaggtgcagcagttccaggacgtggccacccgtctgcagacagcatatgctggggagaaggcagaggccatccagaacaaggagcaggaggtgtctgccgcgtggcaggcgctgctcgatgcctgtgccgggcgccggacccagctagtggacacggcggataaattccgcttcttcagcatggcccgtgacctcctctcctggatggagagcatcatccggcagatcgagacccaggagaggcccagggatgtctcctctgtggaactgctcatgaagtatcaccagggcatcaatgcagagattgaaacccggagcaagaacttcagtgcctgcctggagcttggcgagtccctgctgcagcggcagcaccaggcctcagaggagatccgcgagaaactgcagcaggtgatgtccaggaggaaagagatgaatgagaagtgggaagcccgctgggagcggctccgcatgttgctggaggtgtgccagttctcgagggatgcctctgtggctgaggcgtggctgattgcccaggagccctacctggccagcggggactttggacacacagtggacagtgtggagaagctcatcaagaggcatgaggcttttgagaagtccacggccagctgggcagagcgctttgctgccctggagaagcccaccacgcttgagctgaaagaacgccagattgcagagagacccgcagaggagactgggcctcaagaggaggaaggcgagacagcaggggaggctccagtttcccaccatgcggccaccgagagaacgtccccgggggaagaagagggaacgtggcctcagaacctgcagcagccaccaccgccgggtcagcacaaggatgggcagaaatccactggggatgagaggcccaccacggagcccctctttaaggtcctagatacgcctctgagcgagggtgatgagcccgcaacgctgccggccccgcgggaccatgggcagagtgtgcagatggaaggctacctgggccgcaagcatgacctggaggggcccaacaagaaggcttccaacaggtcctggaacaacctgtactgtgtgctcaggaacagtgagctaaccttctacaaggatgccaagaacctggccctggggatgccctaccatggggaggaacccctggccctgagacatgccatctgtgagattgctgccaactacaagaagaagaagcacgtctttaagctgaggctgagtaatggcagcgagtggctcttccatggcaaggatgaggaggagatgctgtcctggctgcagggcgtgagcaccgccatcaacgagtcccagagcatccgcgtcaaggcgcagagcctgcccctgccttccctctccggccccgacgccagcctcggcaagaaagacaaggagaagagattcagcttcttccccaaaaagaagtagcaggtggggctggcgggcgcggcggagtcgggacgcgcagagaccgggcagcccaggccttggcctcctctcgccgccgcccgccggtcgaatcgagatgagtcgagtcgcgggccgggcccccgggccccacgctgcactgcaaaagctgccttcgcccgcgtgtcctgggccgacgccccctccatgccctcgcccgcgctggctccgctccagggacaggggctcccagctcctctggcgcctttggggcctccaggcctgggggcaggaaacggttctctgaggcacacgccctcctctcccaccctcctcctgagccgagggggcacaggccccttacccccaaccaaaaaaaaaaaaaaaaaagagctggagaaggctgatggggttcttcaaacgctgcccgttcctaaagcaagtcttgcttcgggtcacctcccacctggtggcagccagggaaaggggaaaggaagaagacactggaaatgcatggccagccccctaggggcatgaggaaggagccttcaggtggcccacaaagccctagctctgggccaggggctctggggggctgaggggaccagactgggtgcagggccttgggagctgccagcctccttcccactgggcttccgcagaactgggactctcacttcaggggccaccacatccctcctctctgcttctccccccagatcaaagggtaccctcccacggttggcagggcctggctgagtgcctctagcaccctttgtgccaccacaggcggtcccaggaagggcagcaaggtcagaccattcctcattgaaaaccgtggctagggcacagggctctgatctgaaggagtgacaggtgcgtcacaacactgcctaaggctctccctctcaatgctgggaccctcgccccactcccagtggcagccaaaccagcaatatccaacagacataggccccctacgggacagtgtgggcccccagatataagatggataccccccgcacctgcagtaaagcatcccaaagccaaatgctcaattgcatcctgtctgcagctgggactttggagggtaatggctgggcagacagtaaagttgatcatctgttttctcggggtggcagacgcagccatgtcttggtatcaccacccatgtgacagctactcctgcacaactgggacaaatgtcagggccagagccatgaaggtgtggtaccccttgatcagcttctccacgtcctggccccaggtcttggcggggagggggtcacatgagtacagaggtcaaatatctaccaccctccagccctgagcaccagaagctctgcaaccaacgtccccaggaatggccttccccttgctgctcaggtcatacttctggaggaagagaaagctcattccatattttccccaccactctactccgaaagcaacacagttctggcccagtatcaaactagggttaggtccaagagagcagtcaagcgggtcgggggtgggggggagggcggagggcagcaggcattttcccccaaggaaaccatgaaagtccccagggcctgcagtcaagtttctatcaccttccccgtgagaaggaccttagttccatggagatgaagtgggtgaggttcaggtagaagccacaggggcaggcatccagaatgaggccccctgaggaaccctgagtgctgaccagtgccggcagaaatcagttccaccctgtggccctgacactatatgtcagggtgacaccaactgcagcaggcaggagccacaggaaggaagacgtcatccgatggagcctgacatccccaggttcccgccctggtgagcaaggtcttcatttggctttggtacatatgaccctatacagggaacctagtgtgtatcactcaccagcctctttctgtatctggggaaaccaaggcagtgaggtgactgcactcacctagcaataaagtaggcctttggtgcacttgcaggcatgtcctcctctggggcagagagcaggttccttgctgaagggcagatggtggcaaacatctccctcaactgtttccctgggccagtctttagggagcctagggacaagggcccaccctcccccttccacgtgtgccaaatcagcacctgaagtgaggcatttccagcaagcaactccacagacccgagaaaggaagggctctagtggaagagctagcatctcaccaccccaggtcccctggcctggtccagggcagccagctgcatgtgaccattctgttgccagctccccacacatccctcctgtcacccaggctccaagacattcgaccaactagactgaaaatgcaggcatccagctttgggagaccctgtgtgtgccacaccagggctaagctctcccagtgccctagcaaggtctttttttttttttctctccttattctactctacagtcttttgacagtattcccaaacgaggttgacacagctccagtccacaccagcataccaggcttccttcccagggcagtttagaggaagctccttctgggcaaggtcaggcggtcctccttccctctctccttcccctttgtcccagcctcaactgactctggctgtgggaggtgtggagggtccttaggcttccctccccaacctggcctccaccaacacccctaacaggaggcccgtggaaggctcagcctctcctccgcatccctcctccttcctgcctatcggagggagccagggtcccctaggctgaccctgaatcctcttcctcccttcatgggaggggggcaggaatccagaggaggatgaagccagcgggaccacatggcttggtggcttggacaaacaagctcagggaggaaatgaggaggcggcggctgcagaggaatgcaaccctgttgggcacagaccatgcaatctggggctggccctggggccagctgggtcctgtcctccacctgctcaaccgtgcttccaccaaccagaggaaacccatttactagtttttctaataaatcaataatgctcca

SEQ ID NO: 20371 - DNA, 1723 bp, Homo sapiens
  misc_feature 1..1723: note = ENST00000342835
  source 1..1723: mol_type = unassigned DNA
ctgcacggtcccaccgccttccctcacctcttgcctttttacattagagcacgttctggtaaaggccaatccgttcatacagggggaagaagagggaacgtggcctcagaacctgcagcagccaccaccgccgggtcagcacaaggatgggcagaaatccactggggatgagaggcccaccacggagcccctctttaaggtcctagatacgcctctgagcgagggtgatgagcccgcaacgctgccggccccgcgggaccatgggcagagtgtgcagatggaaggctacctgggccgcaagcatgacctggaggggcccaacaagaaggcttccaacaggtcctggaacaacctgtactgtgtgctcaggaacagtgagctaaccttctacaaggatgccaagaacctggccctggggatgccctaccatggggaggaacccctggccctgagacatgccatctgtgagattgctgccaactacaagaagaagaagcacgtctttaagctgaggctgagtaatggcagcgagtggctcttccatggcaaggatgaggaggagatgctgtcctggctgcagggcgtgagcaccgccatcaacgagtcccagagcatccgcgtcaaggcgcagagcctgcccctgccttccctctccggccccgacgccagcctcggcaagaaagacaaggagaagagattcagcttcttccccaaaaagaagtagcaggtggggctggcgggcgcggcggagtcgggacgcgcagagaccgggcagcccaggccttggcctcctctcgccgccgcccgccggtcgaatcgagatgagtcgagtcgcgggccgggcccccgggccccacgctgcactgcaaaagctgccttcgcccgcgtgtcctgggccgacgccccctccatgccctcgcccgcgctggctccgctccagggacaggggctcccagctcctctggcgcctttggggcctccaggcctgggggcaggaaacggttctctgaggcacacgccctcctctcccaccctcctcctgagccgagggggcacaggccccttacccccaaccaaaaaaaaaaaaaaaaaagagctggagaaggctgatggggttcttcaaacgctgcccgttcctaaagcaagtcttgcttcgggtcacctcccacctggtggcagccagggaaaggggaaaggaagaagacactggaaatgcatggccagccccctaggggcatgaggaaggagccttcaggtggcccacaaagccctagctctgggccaggggctctggggggctgaggggaccagactgggtgcagggccttgggagctgccagcctccttcccactgggcttccgcagaactgggactctcacttcaggggccaccacatccctcctctctgcttctccccccagatcaaagggtaccctcccacggttggcagggcctggctgagtgcctctagcaccctttgtgccaccacaggcggtcccaggaagggcagcaaggtcagaccattcctcattgaaaaccgtggctagggcacagggctctgatctgaaggagtgacaggtgcgtcacaacactgcctaaggctctccctctcaatgctgggaccctcgccccactcccagtggcagccaaaccagcaatatccaacagacataggccccctacgggacagtgtgggcccccagatataagatggataccccc

SEQ ID NO: 20372 - DNA, 3456 bp, Homo sapiens
  misc_feature 1..3456: note = ENST00000553938
  source 1..3456: mol_type = unassigned DNA
ggaaagcagctgatggatgagaagccccagtttacagccctggtgtcccaaaagctggaagccctgcaccggctctgggacgagctgcaggccaccacaaaggagaagacccagcacctctcggctgccaggagctccgacctgcgcttgcagacccatgctgacctcaacaagtggatcagcgccatggaggaccagctgcggtcagacgacccgggcaaggacctgaccagtgtcaatcggatgttggctaagctgaagcgagtggaggaccaagtgaatgtgcgaaaagaggagctgggggagctgtttgcccaggtgccttcaatgggagaggagggaggagatgcagacttgagcatcgagaagcggttcctggacctcctggaacccctaggaaggaggaagaagcagctggaatcatccagagccaagctgcagatcagccgggacttagaggatgagacgctttgggtggaggagaggctgcctctggcccagtcagccgactatggcactaatctgcaaactgtgcaactgttcatgaagaagaaccagacactgcagaatgagattctgggccatacgccgcgggttgaggatgtgctgcagagagggcagcagctggtggaggcggcggagatcgactgccaggaccttgaggagcgcctggggcacctgcagagctcctgggacaggctgcgggaggcagcggccgggaggctgcagcgactgagggacgccaacgaggcacagcagtactacctggatgcagacgaggctgaggcctggattggcgagcaggagctctacgtcatctccgatgagatccccaaggatgaagagggcgccattgtgatgctgaagcgacatttgcggcagcagcgtgcggtggaggactacggccggaacatcaagcagctggccagccgggcccagggcctgctgtctgcaggccaccctgagggggaacagatcatcagacttcaggggcaagtggacaagcactacgcagggctgaaggacgtggcggaagagcgcaagcgcaagctggagaacatgtaccacctgttccagctcaagcgggagaccgacgacctggagcagtggatttcagaaaaggagctagtggcctcttccccggaaatggggcaagactttgaccacgtgactcttctgcgggacaagttccgggactttgcccgggagaccggggcgattgggcaggagcgggtggacaatgtgaatgccttcatcgagcgactcatcgacgcgggccacagcgaggcggccaccatcgccgagtggaaggacgggctgaacgagatgtgggcagacctcctggagctcattgacacgcgcatgcagctgctggccgcctcctatgacctgcaccgctacttctacacgggtgccgagatcctgggcctcatcgacgagaagcaccgcgagctgcccgaggacgtggggctggacgccagcacggccgagtccttccaccgggtgcacacagccttcgagcgggagctccacctgctgggtgtccaggtgcagcagttccaggacgtggccacccgtctgcagacagcatatgctggggagaaggcagaggccatccagaacaaggagcaggaggtgtctgccgcgtggcaggcgctgctcgatgcctgtgccgggcgccggacccagctagtggacacggcggataaattccgcttcttcagcatggcccgtgacctcctctcctggatggagagcatcatccggcagatcgagacccaggagaggcccagggatgtctcctctgtggaactgctcatgaagtatcaccagggcatcaatgcagagattgaaacccggagcaagaacttcagtgcctgcctggagcttggcgagtccctgctgcagcggcagcaccaggcctcagaggagatccgcgagaaactgcagcaggtgatgtccaggaggaaagagatgaatgagaagtgggaagcccgctgggagcggctccgcatgttgctggaggtgtgccagttctcgagggatgcctctgtggctgaggcgtggctgattgcccaggagccctacctggccagcggggactttggacacacagtggacagtgtggagaagctcatcaagaggcatgaggcttttgagaagtccacggccagctgggcagagcgctttgctgccctggagaagcccaccacgcttgagctgaaagaacgccagattgcagagagacccgcagaggagactgggcctcaagaggaggaaggcgagacagcaggggaggctccagtttcccaccatgcggccaccgagagaacgtccccgggggaagaagagggaacgtggcctcagaacctgcagcagccaccaccgccgggtcagcacaaggatgggcagaaatccactggggatgagaggcccaccacggagcccctctttaaggtcctagatacgcctctgagcgagggtgatgagcccgcaacgctgccggccccgcgggaccatgggcagagtgtgcagatggaaggctacctgggccgcaagcatgacctggaggggcccaacaagaaggcttccaacagtaagggagaagagggagaggagaggagggagacagaagaggaggatgaagaggaggaggaaacagagtctgttgctgtagaaatgcagcaacatgcttcccacgtgtcctggaacaacctgtactgtgtgctcaggaacagtgagctaaccttctacaaggatgccaagaacctggccctggggatgccctaccatggggaggaacccctggccctgagacatgccatctgtgagattgctgccaactacaagaagaagaagcacgtctttaagctgaggctgagtaatggcagcgagtggctcttccatggcaaggatgaggaggagatgctgtcctggctgcagggcgtgagcaccgccatcaacgagtcccagagcatccgcgtcaaggcgcagagcctgcccctgccttccctctccggccccgacgccagcctcggcaagaaagacaaggagaagagattcagcttcttccccaaaaagaagtagcaggtggggctggcgggcgcggcggagtcgggacgcgcagagaccgggcagcccaggccttggcctcctctcgccgccgcccgccggtcgaatcgagatgagtcgagtcgcgggccgggcccccgggccccacgctgcactgcaaaagctgccttcgcccgcgtgtcctgggccgacgccccctccatgccctcgcccgcgctggctccgctccagggacaggggctcccagctcctctggcgcctttggggcctccaggcctgggggcaggaaacggttctctgaggcacacgccctcctctcccaccctcctcctgagccgagggggcacaggccccttacccccaaccaaaaaaaaaaaaaaaaaa

SEQ ID NO: 20373 - DNA, 4741 bp, Homo sapiens
  misc_feature 1..4741: note = ENST00000556227
  source 1..4741: mol_type = unassigned DNA
tctctacaggagcagtcaggaacgccaaagaaatctttgcatacattggaaaacccccattttccaaagccaacctgtgacctggccacataatttttgatcgcactggcatagcctctgaatgtccctgccaaggaatgtgggccaggcacccattaagaggaaacagaagaaaggtgggattaagttgggagtcagtcctggcaaaatccatctctattttcagaggacagttttctaaaggaaggaaaatggaatggaagtataggaagaaaatgtagacatggaggtctctagtaaaaccaatcccaggagagcagaggctgggtaagaggggcaaacatggctgagagggtctggcaagcttccctccctatatctgccatggctgcttctctgagacccaagggcagggagagcactgatggtagcaggagcagcagtgcagcccatgtcccctcctctggaacctactcccgcccctcttggaggaaaagcagggcctccccagatgtatacccaagtcagagcgcaggatccacagaaagaccccaagcccaggcttccagtcccatccctgcctctcctgctcttcctccctgctacggtgatccaggcagggctttggggcctccagatccttgtggccaatgctggctcattgcagacactctagggtccaaaggctgccagatgcatagagaggagtggcctggccacaaccctcaggggcgctaaggtgggaaaagatgaacaccataaagatgggataaaagctcaggtctgtccattttgggagtgcatattccgaactgcctcctatacctattagctttgttgtcaccaggaaatgcagagtcctcaattcttagtctgtcttgggagaattcggccaagagaccaagtagtaatgtaagcaaaaggtttactgaaggaaaataaagagcagggattgtatttatttatttattttgtgacagagtctcactctgtctcctaggctggagtgcagtggtgtgatctcggctcactgcaacctccacctcccgggttcaagcgattctcctgcctcagcctcccaagtagctgggactacaggcacgtgccaccacgcccagctaattttttgtatttttagtagagacggggtttcactgtgttagccaggatggtctcaatctcctgatctcgtgatccacctgcctcggcctcccaaagtgttgggattacaggcgtgagctaccatgcccggcctgggagtttattgaagtagactccaagagaggagccagcaggtccgcctgggaagcagcagtattcacagcaagagtgaggtagcagcagagacaatacactctgaaagatgaggcagagcaggctgctcgaaagatgagccagcaactagagagttctgccttgcggtttttattaggtcacactctatttaggttcctgcctctgtctcaagtctccacctttgtctaatttcctgcctctatcttatgtctccatcttttcgccccacctagttcccgccccaggtttgtgggactctcccttactgtcagctgatgaacctgcaggggcgggtgtcggatatgaatcctatcgaatggtgatgttgctaattactgccactccaggaagggtgtatattggtatttattgcacgtgcatatctcgtaggaatttctcctttgctttctttccctccttagcatgcagctggctacattcccacaggttaactgcagagtgatgactgggcatcttaaggggtgtcttggggtgttccttcctgcatagatatttcccctcctctctgctcatatctagggtgaatgttttggatggtctctggggtgtgagactttccagacctccctttctcagaggctttcccacctgctcatatttatctgcctactccgacagtataaccttgggcaagtcacttgacctctctgagcactggttttctcattatagatcgaaagcattagactaagtcagtggtttccaaactttcccagccacataaccctttctttaaatgaaatcttactggatccctaccatgtaacctgtttactgaacagtcctaatttgatgagatacaaacatgaccagttttatctttcttgcaaccactgccttccaacgtctccattgagccccccttcccattcctaaggccacctcaggcagaccctggtcactttcagtggataaaaagtctgcccagttgtttcagtttaaagcttcgatctgatgtccaacatggggcccacatcctcccatcctccatcctctgtttcgggtttgccccatagtctaaaggattcagaccagggaggagaacatggtctgctctctcctggctccttccctctcctccccagcactcttctggacctctgtcttcagctgttggggcagggaggagggagcagaaaaagaaccttttctgacctcctggctgaagatgtccttggtgcttcaggcatccagctgcttgggggccttcctacctcttgctgaaaggtgtttagcagtcaggtctttgggaccgggtcctggccagatggctccagtgaggctgccttccttggtgctcacttggcacggaggagacccacccattcttgccccacctggcaatgggaggccgcccgctgctgccccaatctgtcctgccctctctttcttctgccccaacaggcaaaagggcagatcagcaaggtctagcataaggagatgcccagccagggaatggcaggtcagcttccccttctcgtgggcacctgtatgtcatacagtgagtggcaccattggaggcccctcccttgacttgggcaggggccaggcatccccaggtctccacagggaggtgcagggaggtaaagaccacagcagttccccaaggctgtgcctccttacgagggggattctcaactcctgctgaacattagatcccatgaaatgctcagtaagagataccaatgtgccgacccccggggccagttaactcagcatcttgagatggagcctgagaatgtttcttttgaaagcacctgaggtgattgcggaaggcagccagggttaggaaccactgccctgtccaaaaagttcccatcaaatgatggagaaaggacctgttagacctgctgatggccagggagggtctgggttctccctttgtaaggtggcaggggcgggcagacttaggacctggtacccttagttttagggctttaggcacaatttgaaagtaccagaagagttcccattcaacattctactataagtggttgccgaacttgtcttagcagcagaactttcctcatacgagtgtctggctgcagcaaggggaggggccagagctttgccagcagcattggaacctgccccccctcacacccctttaatgaaataatcactcaggcccctttggctcactctgagaaccttccgttgctatgttacattggagagagggggccaccctgcagctctctgaagggagaatggggtggaaatggagccagaagcacaggcagagtagagaagcaagggggcacccatagcaggttgtgggagagccagggtgggccaggaggtgggagtagaaaggaagtaggcttgggggtgtggagagggtggctgctgacctcccaattttgctgagaacagccatctctaagccagagtacccagaaaggtgtgctcctccctatgccctgagcagggggaagaagagggaacgtggcctcagaacctgcagcagccaccaccgccgggtcagcacaaggatgggcagaaatccactggggatgagaggcccaccacggagcccctctttaaggtcctagatacgcctctgagcgagggtgatgagcccgcaacgctgccggccccgcgggaccatgggcagagtgtgcagatggaaggctacctgggccgcaagcatgacctggaggggcccaacaagaaggcttccaacaggtcctggaacaacctgtactgtgtgctcaggaacagtgagctaaccttctacaaggatgccaagaacctggccctggggatgccctaccatggggaggaacccctggccctgagacatgccatctgtgagattgctgccaactacaagaagaagaagcacgtctttaagctgaggctgagtaatggcagcgagtggctcttccatggcaaggatgaggaggagatgctgtcctggctgcagggcgtgagcaccgccatcaacgagtcccagagcatccgcgtcaaggcgcagagcctgcccctgccttccctctccggccccgacgccagcctcggcaagaaagacaaggagaagagattcagcttcttccccaaaaagaagtagcaggtggggctggcgggcgcggcggagtcgggacgcgcagagaccgggcagcccaggccttggcctcctctcgccgccgcccgccggtcgaatcgagatgagtcgagtcgcgggccgggcccccgggccccacgctgcactgcaaaagctgccttcgcccgcgtgtcctgggccgacgccccctccatgccctcgcccgcgctggctccgctccagggacaggggctcccagctcctctggcgcctttggggcctccaggcctgggggcaggaaacggttctctgaggcacacgccctcctctcccaccctcctcctgagccgagggggcacaggccccttacccccaacc

SEQ ID NO: 20374 - DNA, 6705 bp, Homo sapiens
  misc_feature 1..6705: note = ENST00000389721
  source 1..6705: mol_type = unassigned DNA
tgaggcaggcggagctgctaagagcctgctgacatgacatcggccacagagtttgaaaatgtgggcaaccagccaccttacagcaggatcaatgcccgctgggacgccccagacgacgagctggataatgacaacagctcagccaggctctttgagaggtcccggataaaggccttggcagatgagcgggaagttgttcagaaaaagaccttcacgaaatgggtgaactcgcacctggctcgagtgtcctgccgcatcaccgatctctacaaggacctgcgggatgggcgcatgctcatcaagctgctggaggtgctctctggagagatgctgccaaagcccaccaaggggaagatgcgcatccactgcctggagaatgtggacaaggctctccagttcctcaaggagcagcgtgtacacctggagaacatgggctcccacgacattgtagatggcaaccaccgcctggtcctgggcctcatctggaccatcatcctccgcttccagattcaggacattgtggtccaaactcaggaaggtcgtgaaacacgctcagccaaggatgcgttgctgttgtggtgtcagatgaagacggcaggctaccctcatgttaatgtcaccaactttacctccagctggaaggatggcttggcctttaatgccctgatacacaagcaccggcccgacctgatcgactttgataagctgaaggactccaatgcccggcacaacctggagcacgcattcaatgtggctgagcgccagctgggcatcatcccgctcctcgaccccgaagatgtctttacggaaaaccctgatgagaaatccatcatcacctatgtggtggccttttaccactacttctccaagatgaaggtgctggcagtggagggcaagcgtgtcggcaaggttattgaccatgccattgagactgagaagatgattgaaaagtacagcgggctagcctcggacctgctcacctggatcgagcagaccatcactgtcctgaacagccgcaagtttgccaactcgctgacgggcgtccagcagcagctgcaggccttcagcacctaccgcaccgtggagaagccgcccaagtttcaagagaaggggaatctggaagttctactttttaccatccagtcccggatgagagccaacaatcagaaagtgtacacaccccacgatgggaaactagtgtctgacatcaacagggcctgggaaagcctggaggaagctgagtatcggcgggagctggccctgagaaatgagctcattcggcaggagaagctagagcaactggcccggcgctttgaccggaaggccgcaatgagagagacctggctcagtgaaaaccagcgcctcgtggcccaggataactttgggtatgacctggcagctgtggaggccgccaagaagaagcatgaggccatcgagaccgacacggctgcctacgaggagcgggtgagagccctggaggacctggctcaggagctggagaaagagaactaccatgaccagaagcgcatcacggcccgcaaggacaatatactgcgcctatggagctacctgcaggagctgctgcagtcccggcgccagaggctcgagaccaccctggcactgcagaagctcttccaggacatgctgcacagcatcgactggatggatgagatcaaggctcacctcttgtctgccgagtttgggaagcacttgttggaggttgaagacctgctacagaagcacaagttgatggaagctgacatcgccatccaaggggacaaagtgaaggccatcaccgcagccaccctgaagttcaccgaggggaaagggtaccagccttgtgacccccaggtcatccaggaccgcatcagccacttggagcagtgctttgaggagctgagcaacatggcagctgggcggaaggcccaactggagcagtccaaacgactctggaagttcttctgggagatggatgaggctgagagctggatcaaggagaaggagcagatctattcttccctggactatggcaaagacctgaccagtgtgctcatcttacagcgcaagcacaaggcctttgaggatgagctccgtgggctggatgctcacctggagcagatcttccaggaggctcatggcatggttgcgcgcaagcagtttgggcacccgcagatcgaggcccgcataaaggaggtgtcggcacagtgggaccagctgaaggacctggctgccttctgcaagaagaacctccaggatgctgagaactttttccagttccagggcgatgcggatgacctgaaggcttggctgcaagacgcccaccggctgctctctggtgaagatgtggggcaggacgaaggggccacgcgggccctggggaaaaagcacaaggacttcctggaggagctggaggagagccgtggggtgatggagcacctggagcagcaggcccagggattccccgaagagtttcgggattccccagatgtgacccatcggctgcaggccctgcgggagctctaccaacaggtggtggcccaggcggacctgcgtcagcagaggctgcaggaagccctggacctgtacacggtgttcggggagacagacgcctgtgagctgtggatgggagagaaggagaagtggctggccgagatggaaatgccagacaccctggaggacctggaggtcgtgcagcacaggttcgacatcctggaccaggagatgaagaccttgatgactcagattgatggtgtgaacctcgctgccaacagcttggtagagagtggccacccacgcagcagggaggtgaagcagtaccaggaccatctgaacaccaggtggcaggcatttcagaccctggtgtcggagcggcgggaggctgtggactcagccctccgagtgcacaactactgcgtagattgcgaggagaccagcaagtggatcacggacaagacaaaggtagtggagtccacaaaagacctggggcgggacctggcaggtatcatcgccatccagaggaagttgtcagggctggagcgtgacgtggccgccatccaggcccgtgtggatgccctggagcgtgagtcccagcagctgatggactcgcaccctgagcagaaggaggatattggtcagcggcaaaaacacttggaggagctgtggcagggcctgcagcaatccctgcagggccaggaggacttgctgggggaagtcagccagctgcaggccttcctgcaggatctggatgacttccaggcctggctctccatcacccagaaggctgtggcctctgaggacatgcccgaatccctcccagaggctgagcagctcctgcagcagcatgcaggtatcaaggatgagattgacgggcaccaagacagctaccagcgtgttaaggagtctggggagaaagtgatccaaggccagacggacccagagtatctgcttctgggccagcggctggagggcctggatactggctggaatgccctgggcaggatgtgggagagccgcagccacaccctcgctcagtgccttggcttccaggagttccagaaagatgccaagcaggctgaagccatcctcagcaaccaggaatacactctggctcacttggagcccccagactccctggaagctgcagaggctgggatccggaagtttgaggatttcttggggtctatggagaacaaccgggataaggtcttgagtcctgtggactctggaaacaagctggtagctgagggaaacctatactcagacaagatcaaggagaaggtgcagctgattgaggacaggcacaggaagaacaacgagaaggcccaggaggcctctgtcctactgagagacaacctggagctacagaacttcctccagaactgccaggagctcactctctggatcaacgacaagctgctgacatctcaggatgtctcctatgatgaagcacgaaaccttcacaataaatggctaaagcaccaggcgtttgtggcagagctggcttcccatgaagggtggctagagaacatcgatgcggaaggaaagcagctgatggatgagaagccccagtttacagccctggtgtcccaaaagctggaagccctgcaccggctctgggacgagctgcaggccaccacaaaggagaagacccagcacctctcggctgccaggagctccgacctgcgcttgcagacccatgctgacctcaacaagtggatcagcgccatggaggaccagctgcggtcagacgacccgggcaaggacctgaccagtgtcaatcggatgttggctaagctgaagcgagtggaggaccaagtgaatgtgcgaaaagaggagctgggggagctgtttgcccaggtgccttcaatgggagaggagggaggagatgcagacttgagcatcgagaagcggttcctggacctcctggaacccctaggaaggaggaagaagcagctggaatcatccagagccaagctgcagatcagccgggacttagaggatgagacgctttgggtggaggagaggctgcctctggcccagtcagccgactatggcactaatctgcaaactgtgcaactgttcatgaagaagaaccagacactgcagaatgagattctgggccatacgccgcgggttgaggatgtgctgcagagagggcagcagctggtggaggcggcggagatcgactgccaggaccttgaggagcgcctggggcacctgcagagctcctgggacaggctgcgggaggcagcggccgggaggctgcagcgactgagggacgccaacgaggcacagcagtactacctggatgcagacgaggctgaggcctggattggcgagcaggagctctacgtcatctccgatgagatccccaaggatgaagagggcgccattgtgatgctgaagcgacatttgcggcagcagcgtgcggtggaggactacggccggaacatcaagcagctggccagccgggcccagggcctgctgtctgcaggccaccctgagggggaacagatcatcagacttcaggggcaagtggacaagcactacgcagggctgaaggacgtggcggaagagcgcaagcgcaagctggagaacatgtaccacctgttccagctcaagcgggagaccgacgacctggagcagtggatttcagaaaaggagctagtggcctcttccccggaaatggggcaagactttgaccacgtgactcttctgcgggacaagttccgggactttgcccgggagaccggggcgattgggcaggagcgggtggacaatgtgaatgccttcatcgagcgactcatcgacgcgggccacagcgaggcggccaccatcgccgagtggaaggacgggctgaacgagatgtgggcagacctcctggagctcattgacacgcgcatgcagctgctggccgcctcctatgacctgcaccgctacttctacacgggtgccgagatcctgggcctcatcgacgagaagcaccgcgagctgcccgaggacgtggggctggacgccagcacggccgagtccttccaccgggtgcacacagccttcgagcgggagctccacctgctgggtgtccaggtgcagcagttccaggacgtggccacccgtctgcagacagcatatgctggggagaaggcagaggccatccagaacaaggagcaggaggtgtctgccgcgtggcaggcgctgctcgatgcctgtgccgggcgccggacccagctagtggacacggcggataaattccgcttcttcagcatggcccgtgacctcctctcctggatggagagcatcatccggcagatcgagacccaggagaggcccagggatgtctcctctgtggaactgctcatgaagtatcaccagggcatcaatgcagagattgaaacccggagcaagaacttcagtgcctgcctggagcttggcgagtccctgctgcagcggcagcaccaggcctcagaggagatccgcgagaaactgcagcaggtgatgtccaggaggaaagagatgaatgagaagtgggaagcccgctgggagcggctccgcatgttgctggaggtgtgccagttctcgagggatgcctctgtggctgaggcgtggctgattgcccaggagccctacctggccagcggggactttggacacacagtggacagtgtggagaagctcatcaagaggcatgaggcttttgagaagtccacggccagctgggcagagcgctttgctgccctggagaagcccaccacgcttgagctgaaagaacgccagattgcagagagacccgcagaggagactgggcctcaagaggaggaaggcgagacagcaggggaggctccagtttcccaccatgcggccaccgagagaacgtccccggtcagtctctggtctcgtttgtctagttcctgggagtcactgcagccagagccctctcacccctactaggctcagcccaggtggaggcgagatgagctggcgcagccccgccctccatcctccccacatccctgcagccacctcccagcagagcaggctacgtcctcactgaggtgttcttcatgagagtactagcctcctccactcctccccacagcgcagaggaaacaggccagcccagtgacatgacgttattagttttgttttacctaatgtaataaattttattgtataaatatatcaccatttacatgaggggaaacacta

SEQ ID NO: 20375 - DNA, 6321 bp, Homo sapiens
  misc_feature 1..6321: note = ENST00000389720
  source 1..6321: mol_type = unassigned DNA
atgacatcggccacagagtttgaaaatgtgggcaaccagccaccttacagcaggatcaatgcccgctgggacgccccagacgacgagctggataatgacaacagctcagccaggctctttgagaggtcccggataaaggccttggcagatgagcgggaagttgttcagaaaaagaccttcacgaaatgggtgaactcgcacctggctcgagtgtcctgccgcatcaccgatctctacaaggacctgcgggatgggcgcatgctcatcaagctgctggaggtgctctctggagagatgctgccaaagcccaccaaggggaagatgcgcatccactgcctggagaatgtggacaaggctctccagttcctcaaggagcagcgtgtacacctggagaacatgggctcccacgacattgtagatggcaaccaccgcctggtcctgggcctcatctggaccatcatcctccgcttccagattcaggacattgtggtccaaactcaggaaggtcgtgaaacacgctcagccaaggatgcgttgctgttgtggtgtcagatgaagacggcaggctaccctcatgttaatgtcaccaactttacctccagctggaaggatggcttggcctttaatgccctgatacacaagcaccggcccgacctgatcgactttgataagctgaaggactccaatgcccggcacaacctggagcacgcattcaatgtggctgagcgccagctgggcatcatcccgctcctcgaccccgaagatgtctttacggaaaaccctgatgagaaatccatcatcacctatgtggtggccttttaccactacttctccaagatgaaggtgctggcagtggagggcaagcgtgtcggcaaggttattgaccatgccattgagactgagaagatgattgaaaagtacagcgggctagcctcggacctgctcacctggatcgagcagaccatcactgtcctgaacagccgcaagtttgccaactcgctgacgggcgtccagcagcagctgcaggccttcagcacctaccgcaccgtggagaagccgcccaagtttcaagagaaggggaatctggaagttctactttttaccatccagtcccggatgagagccaacaatcagaaagtgtacacaccccacgatgggaaactagtgtctgacatcaacagggcctgggaaagcctggaggaagctgagtatcggcgggagctggccctgagaaatgagctcattcggcaggagaagctagagcaactggcccggcgctttgaccggaaggccgcaatgagagagacctggctcagtgaaaaccagcgcctcgtggcccaggataactttgggtatgacctggcagctgtggaggccgccaagaagaagcatgaggccatcgagaccgacacggctgcctacgaggagcgggtgagagccctggaggacctggctcaggagctggagaaagagaactaccatgaccagaagcgcatcacggcccgcaaggacaatatactgcgcctatggagctacctgcaggagctgctgcagtcccggcgccagaggctcgagaccaccctggcactgcagaagctcttccaggacatgctgcacagcatcgactggatggatgagatcaaggctcacctcttgtctgccgagtttgggaagcacttgttggaggttgaagacctgctacagaagcacaagttgatggaagctgacatcgccatccaaggggacaaagtgaaggccatcaccgcagccaccctgaagttcaccgaggggaaagggtaccagccttgtgacccccaggtcatccaggaccgcatcagccacttggagcagtgctttgaggagctgagcaacatggcagctgggcggaaggcccaactggagcagtccaaacgactctggaagttcttctgggagatggatgaggctgagagctggatcaaggagaaggagcagatctattcttccctggactatggcaaagacctgaccagtgtgctcatcttacagcgcaagcacaaggcctttgaggatgagctccgtgggctggatgctcacctggagcagatcttccaggaggctcatggcatggttgcgcgcaagcagtttgggcacccgcagatcgaggcccgcataaaggaggtgtcggcacagtgggaccagctgaaggacctggctgccttctgcaagaagaacctccaggatgctgagaactttttccagttccagggcgatgcggatgacctgaaggcttggctgcaagacgcccaccggctgctctctggtgaagatgtggggcaggacgaaggggccacgcgggccctggggaaaaagcacaaggacttcctggaggagctggaggagagccgtggggtgatggagcacctggagcagcaggcccagggattccccgaagagtttcgggattccccagatgtgacccatcggctgcaggccctgcgggagctctaccaacaggtggtggcccaggcggacctgcgtcagcagaggctgcaggaagccctggacctgtacacggtgttcggggagacagacgcctgtgagctgtggatgggagagaaggagaagtggctggccgagatggaaatgccagacaccctggaggacctggaggtcgtgcagcacaggttcgacatcctggaccaggagatgaagaccttgatgactcagattgatggtgtgaacctcgctgccaacagcttggtagagagtggccacccacgcagcagggaggtgaagcagtaccaggaccatctgaacaccaggtggcaggcatttcagaccctggtgtcggagcggcgggaggctgtggactcagccctccgagtgcacaactactgcgtagattgcgaggagaccagcaagtggatcacggacaagacaaaggtagtggagtccacaaaagacctggggcgggacctggcaggtatcatcgccatccagaggaagttgtcagggctggagcgtgacgtggccgccatccaggcccgtgtggatgccctggagcgtgagtcccagcagctgatggactcgcaccctgagcagaaggaggatattggtcagcggcaaaaacacttggaggagctgtggcagggcctgcagcaatccctgcagggccaggaggacttgctgggggaagtcagccagctgcaggccttcctgcaggatctggatgacttccaggcctggctctccatcacccagaaggctgtggcctctgaggacatgcccgaatccctcccagaggctgagcagctcctgcagcagcatgcaggtatcaaggatgagattgacgggcaccaagacagctaccagcgtgttaaggagtctggggagaaagtgatccaaggccagacggacccagagtatctgcttctgggccagcggctggagggcctggatactggctggaatgccctgggcaggatgtgggagagccgcagccacaccctcgctcagtgccttggcttccaggagttccagaaagatgccaagcaggctgaagccatcctcagcaaccaggaatacactctggctcacttggagcccccagactccctggaagctgcagaggctgggatccggaagtttgaggatttcttggggtctatggagaacaaccgggataaggtcttgagtcctgtggactctggaaacaagctggtagctgagggaaacctatactcagacaagatcaaggagaaggtgcagctgattgaggacaggcacaggaagaacaacgagaaggcccaggaggcctctgtcctactgagagacaacctggagctacagaacttcctccagaactgccaggagctcactctctggatcaacgacaagctgctgacatctcaggatgtctcctatgatgaagcacgaaaccttcacaataaatggctaaagcaccaggcgtttgtggcagagctggcttcccatgaagggtggctagagaacatcgatgcggaaggaaagcagctgatggatgagaagccccagtttacagccctggtgtcccaaaagctggaagccctgcaccggctctgggacgagctgcaggccaccacaaaggagaagacccagcacctctcggctgccaggagctccgacctgcgcttgcagacccatgctgacctcaacaagtggatcagcgccatggaggaccagctgcggtcagacgacccgggcaaggacctgaccagtgtcaatcggatgttggctaagctgaagcgagtggaggaccaagtgaatgtgcgaaaagaggagctgggggagctgtttgcccaggtgccttcaatgggagaggagggaggagatgcagacttgagcatcgagaagcggttcctggacctcctggaacccctaggaaggaggaagaagcagctggaatcatccagagccaagctgcagatcagccgggacttagaggatgagacgctttgggtggaggagaggctgcctctggcccagtcagccgactatggcactaatctgcaaactgtgcaactgttcatgaagaagaaccagacactgcagaatgagattctgggccatacgccgcgggttgaggatgtgctgcagagagggcagcagctggtggaggcggcggagatcgactgccaggaccttgaggagcgcctggggcacctgcagagctcctgggacaggctgcgggaggcagcggccgggaggctgcagcgactgagggacgccaacgaggcacagcagtactacctggatgcagacgaggctgaggcctggattggcgagcaggagctctacgtcatctccgatgagatccccaaggatgaagagggcgccattgtgatgctgaagcgacatttgcggcagcagcgtgcggtggaggactacggccggaacatcaagcagctggccagccgggcccagggcctgctgtctgcaggccaccctgagggggaacagatcatcagacttcaggggcaagtggacaagcactacgcagggctgaaggacgtggcggaagagcgcaagcgcaagctggagaacatgtaccacctgttccagctcaagcgggagaccgacgacctggagcagtggatttcagaaaaggagctagtggcctcttccccggaaatggggcaagactttgaccacgtgactcttctgcgggacaagttccgggactttgcccgggagaccggggcgattgggcaggagcgggtggacaatgtgaatgccttcatcgagcgactcatcgacgcgggccacagcgaggcggccaccatcgccgagtggaaggacgggctgaacgagatgtgggcagacctcctggagctcattgacacgcgcatgcagctgctggccgcctcctatgacctgcaccgctacttctacacgggtgccgagatcctgggcctcatcgacgagaagcaccgcgagctgcccgaggacgtggggctggacgccagcacggccgagtccttccaccgggtgcacacagccttcgagcgggagctccacctgctgggtgtccaggtgcagcagttccaggacgtggccacccgtctgcagacagcatatgctggggagaaggcagaggccatccagaacaaggagcaggaggtgtctgccgcgtggcaggcgctgctcgatgcctgtgccgggcgccggacccagctagtggacacggcggataaattccgcttcttcagcatggcccgtgacctcctctcctggatggagagcatcatccggcagatcgagacccaggagaggcccagggatgtctcctctgtggaactgctcatgaagtatcaccagggcatcaatgcagagattgaaacccggagcaagaacttcagtgcctgcctggagcttggcgagtccctgctgcagcggcagcaccaggcctcagaggagatccgcgagaaactgcagcaggtgatgtccaggaggaaagagatgaatgagaagtgggaagcccgctgggagcggctccgcatgttgctggaggtgtgccagttctcgagggatgcctctgtggctgaggcgtggctgattgcccaggagccctacctggccagcggggactttggacacacagtggacagtgtggagaagctcatcaagaggcatgaggcttttgagaagtccacggccagctgggcagagcgctttgctgccctggagaagcccaccacggcctcaagaggaggaaggcgagacagcaggggaggctccagtttcccaccatgcggccaccgagagaacgtccccggtcagtctctggtctcgtttgtctag

SEQ ID NO: 20376 - DNA, 580 bp, Homo sapiens
  misc_feature 1..580: note = ENST00000542694
  source 1..580: mol_type = unassigned DNA
aaaaattagctgggcatggtggtgcacacctatagtcccagccacttggtaggctgagatgggaggatcacttgaacccaggaggctgaggctgccatgagccataatcacatcactgcactccagcctgggtgacagattgaagccctccctctaaaaaaatataactattgtgaagatcggttaggggcccagtgtggaatggggtggctgcaggcagcaagcgtatccatgtggtttagggacacctattcaggccacctgcctgaccactggccccaatcaggagtgaacgattgggtgctaacaggccctgggccttgtggggggtctgtgtcctgttccccctggcagtgctggaggtgtgccagttctcgagggatgcctctgtggctgaggcgtggctgattgcccaggagccctacctggccagcggggactttggacacacagtggacagtgtggagaagctcatcaagaggcatgaggcttttgagaagtccacggccagctgggcagagcgctttgctgccctggagaagcccaccacgcttgagctgaaagaacgccagattgcaga

SEQ ID NO: 20377 - DNA, 10063 bp, Homo sapiens
  misc_feature 1..10063: note = ENST00000389722
  source 1..10063: mol_type = unassigned DNA
cagggatccttccatgaagactgaggcaggcggagctgctaagagcctgctgacatgacatcggccacagagtttgaaaatgtgggcaaccagccaccttacagcaggatcaatgcccgctgggacgccccagacgacgagctggataatgacaacagctcagccaggctctttgagaggtcccggataaaggccttggcagatgagcgggaagttgttcagaaaaagaccttcacgaaatgggtgaactcgcacctggctcgagtgtcctgccgcatcaccgatctctacaaggacctgcgggatgggcgcatgctcatcaagctgctggaggtgctctctggagagatgctgccaaagcccaccaaggggaagatgcgcatccactgcctggagaatgtggacaaggctctccagttcctcaaggagcagcgtgtacacctggagaacatgggctcccacgacattgtagatggcaaccaccgcctggtcctgggcctcatctggaccatcatcctccgcttccagattcaggacattgtggtccaaactcaggaaggtcgtgaaacacgctcagccaaggatgcgttgctgttgtggtgtcagatgaagacggcaggctaccctcatgttaatgtcaccaactttacctccagctggaaggatggcttggcctttaatgccctgatacacaagcaccggcccgacctgatcgactttgataagctgaaggactccaatgcccggcacaacctggagcacgcattcaatgtggctgagcgccagctgggcatcatcccgctcctcgaccccgaagatgtctttacggaaaaccctgatgagaaatccatcatcacctatgtggtggccttttaccactacttctccaagatgaaggtgctggcagtggagggcaagcgtgtcggcaaggttattgaccatgccattgagactgagaagatgattgaaaagtacagcgggctagcctcggacctgctcacctggatcgagcagaccatcactgtcctgaacagccgcaagtttgccaactcgctgacgggcgtccagcagcagctgcaggccttcagcacctaccgcaccgtggagaagccgcccaagtttcaagagaaggggaatctggaagttctactttttaccatccagtcccggatgagagccaacaatcagaaagtgtacacaccccacgatgggaaactagtgtctgacatcaacagggcctgggaaagcctggaggaagctgagtatcggcgggagctggccctgagaaatgagctcattcggcaggagaagctagagcaactggcccggcgctttgaccggaaggccgcaatgagagagacctggctcagtgaaaaccagcgcctcgtggcccaggataactttgggtatgacctggcagctgtggaggccgccaagaagaagcatgaggccatcgagaccgacacggctgcctacgaggagcgggtgagagccctggaggacctggctcaggagctggagaaagagaactaccatgaccagaagcgcatcacggcccgcaaggacaatatactgcgcctatggagctacctgcaggagctgctgcagtcccggcgccagaggctcgagaccaccctggcactgcagaagctcttccaggacatgctgcacagcatcgactggatggatgagatcaaggctcacctcttgtctgccgagtttgggaagcacttgttggaggttgaagacctgctacagaagcacaagttgatggaagctgacatcgccatccaaggggacaaagtgaaggccatcaccgcagccaccctgaagttcaccgaggggaaagggtaccagccttgtgacccccaggtcatccaggaccgcatcagccacttggagcagtgctttgaggagctgagcaacatggcagctgggcggaaggcccaactggagcagtccaaacgactctggaagttcttctgggagatggatgaggctgagagctggatcaaggagaaggagcagatctattcttccctggactatggcaaagacctgaccagtgtgctcatcttacagcgcaagcacaaggcctttgaggatgagctccgtgggctggatgctcacctggagcagatcttccaggaggctcatggcatggttgcgcgcaagcagtttgggcacccgcagatcgaggcccgcataaaggaggtgtcggcacagtgggaccagctgaaggacctggctgccttctgcaagaagaacctccaggatgctgagaactttttccagttccagggcgatgcggatgacctgaaggcttggctgcaagacgcccaccggctgctctctggtgaagatgtggggcaggacgaaggggccacgcgggccctggggaaaaagcacaaggacttcctggaggagctggaggagagccgtggggtgatggagcacctggagcagcaggcccagggattccccgaagagtttcgggattccccagatgtgacccatcggctgcaggccctgcgggagctctaccaacaggtggtggcccaggcggacctgcgtcagcagaggctgcaggaagccctggacctgtacacggtgttcggggagacagacgcctgtgagctgtggatgggagagaaggagaagtggctggccgagatggaaatgccagacaccctggaggacctggaggtcgtgcagcacaggttcgacatcctggaccaggagatgaagaccttgatgactcagattgatggtgtgaacctcgctgccaacagcttggtagagagtggccacccacgcagcagggaggtgaagcagtaccaggaccatctgaacaccaggtggcaggcatttcagaccctggtgtcggagcggcgggaggctgtggactcagccctccgagtgcacaactactgcgtagattgcgaggagaccagcaagtggatcacggacaagacaaaggtagtggagtccacaaaagacctggggcgggacctggcaggtatcatcgccatccagaggaagttgtcagggctggagcgtgacgtggccgccatccaggcccgtgtggatgccctggagcgtgagtcccagcagctgatggactcgcaccctgagcagaaggaggatattggtcagcggcaaaaacacttggaggagctgtggcagggcctgcagcaatccctgcagggccaggaggacttgctgggggaagtcagccagctgcaggccttcctgcaggatctggatgacttccaggcctggctctccatcacccagaaggctgtggcctctgaggacatgcccgaatccctcccagaggctgagcagctcctgcagcagcatgcaggtatcaaggatgagattgacgggcaccaagacagctaccagcgtgttaaggagtctggggagaaagtgatccaaggccagacggacccagagtatctgcttctgggccagcggctggagggcctggatactggctggaatgccctgggcaggatgtgggagagccgcagccacaccctcgctcagtgccttggcttccaggagttccagaaagatgccaagcaggctgaagccatcctcagcaaccaggaatacactctggctcacttggagcccccagactccctggaagctgcagaggctgggatccggaagtttgaggatttcttggggtctatggagaacaaccgggataaggtcttgagtcctgtggactctggaaacaagctggtagctgagggaaacctatactcagacaagatcaaggagaaggtgcagctgattgaggacaggcacaggaagaacaacgagaaggcccaggaggcctctgtcctactgagagacaacctggagctacagaacttcctccagaactgccaggagctcactctctggatcaacgacaagctgctgacatctcaggatgtctcctatgatgaagcacgaaaccttcacaataaatggctaaagcaccaggcgtttgtggcagagctggcttcccatgaagggtggctagagaacatcgatgcggaaggaaagcagctgatggatgagaagccccagtttacagccctggtgtcccaaaagctggaagccctgcaccggctctgggacgagctgcaggccaccacaaaggagaagacccagcacctctcggctgccaggagctccgacctgcgcttgcagacccatgctgacctcaacaagtggatcagcgccatggaggaccagctgcggtcagacgacccgggcaaggacctgaccagtgtcaatcggatgttggctaagctgaagcgagtggaggaccaagtgaatgtgcgaaaagaggagctgggggagctgtttgcccaggtgccttcaatgggagaggagggaggagatgcagacttgagcatcgagaagcggttcctggacctcctggaacccctaggaaggaggaagaagcagctggaatcatccagagccaagctgcagatcagccgggacttagaggatgagacgctttgggtggaggagaggctgcctctggcccagtcagccgactatggcactaatctgcaaactgtgcaactgttcatgaagaagaaccagacactgcagaatgagattctgggccatacgccgcgggttgaggatgtgctgcagagagggcagcagctggtggaggcggcggagatcgactgccaggaccttgaggagcgcctggggcacctgcagagctcctgggacaggctgcgggaggcagcggccgggaggctgcagcgactgagggacgccaacgaggcacagcagtactacctggatgcagacgaggctgaggcctggattggcgagcaggagctctacgtcatctccgatgagatccccaaggatgaagagggcgccattgtgatgctgaagcgacatttgcggcagcagcgtgcggtggaggactacggccggaacatcaagcagctggccagccgggcccagggcctgctgtctgcaggccaccctgagggggaacagatcatcagacttcaggggcaagtggacaagcactacgcagggctgaaggacgtggcggaagagcgcaagcgcaagctggagaacatgtaccacctgttccagctcaagcgggagaccgacgacctggagcagtggatttcagaaaaggagctagtggcctcttccccggaaatggggcaagactttgaccacgtgactcttctgcgggacaagttccgggactttgcccgggagaccggggcgattgggcaggagcgggtggacaatgtgaatgccttcatcgagcgactcatcgacgcgggccacagcgaggcggccaccatcgccgagtggaaggacgggctgaacgagatgtgggcagacctcctggagctcattgacacgcgcatgcagctgctggccgcctcctatgacctgcaccgctacttctacacgggtgccgagatcctgggcctcatcgacgagaagcaccgcgagctgcccgaggacgtggggctggacgccagcacggccgagtccttccaccgggtgcacacagccttcgagcgggagctccacctgctgggtgtccaggtgcagcagttccaggacgtggccacccgtctgcagacagcatatgctggggagaaggcagaggccatccagaacaaggagcaggaggtgtctgccgcgtggcaggcgctgctcgatgcctgtgccgggcgccggacccagctagtggacacggcggataaattccgcttcttcagcatggcccgtgacctcctctcctggatggagagcatcatccggcagatcgagacccaggagaggcccagggatgtctcctctgtggaactgctcatgaagtatcaccagggcatcaatgcagagattgaaacccggagcaagaacttcagtgcctgcctggagcttggcgagtccctgctgcagcggcagcaccaggcctcagaggagatccgcgagaaactgcagcaggtgatgtccaggaggaaagagatgaatgagaagtgggaagcccgctgggagcggctccgcatgttgctggaggtgtgccagttctcgagggatgcctctgtggctgaggcgtggctgattgcccaggagccctacctggccagcggggactttggacacacagtggacagtgtggagaagctcatcaagaggcatgaggcttttgagaagtccacggccagctgggcagagcgctttgctgccctggagaagcccaccacgcttgagctgaaagaacgccagattgcagagagacccgcagaggagactgggcctcaagaggaggaaggcgagacagcaggggaggctccagtttcccaccatgcggccaccgagagaacgtccccgggggaagaagagggaacgtggcctcagaacctgcagcagccaccaccgccgggtcagcacaaggatgggcagaaatccactggggatgagaggcccaccacggagcccctctttaaggtcctagatacgcctctgagcgagggtgatgagcccgcaacgctgccggccccgcgggaccatgggcagagtgtgcagatggaaggctacctgggccgcaagcatgacctggaggggcccaacaagaaggcttccaacaggtcctggaacaacctgtactgtgtgctcaggaacagtgagctaaccttctacaaggatgccaagaacctggccctggggatgccctaccatggggaggaacccctggccctgagacatgccatctgtgagattgctgccaactacaagaagaagaagcacgtctttaagctgaggctgagtaatggcagcgagtggctcttccatggcaaggatgaggaggagatgctgtcctggctgcagggcgtgagcaccgccatcaacgagtcccagagcatccgcgtcaaggcgcagagcctgcccctgccttccctctccggccccgacgccagcctcggcaagaaagacaaggagaagagattcagcttcttccccaaaaagaagtagcaggtggggctggcgggcgcggcggagtcgggacgcgcagagaccgggcagcccaggccttggcctcctctcgccgccgcccgccggtcgaatcgagatgagtcgagtcgcgggccgggcccccgggccccacgctgcactgcaaaagctgccttcgcccgcgtgtcctgggccgacgccccctccatgccctcgcccgcgctggctccgctccagggacaggggctcccagctcctctggcgcctttggggcctccaggcctgggggcaggaaacggttctctgaggcacacgccctcctctcccaccctcctcctgagccgagggggcacaggccccttacccccaaccaaaaaaaaaaaaaaaaaagagctggagaaggctgatggggttcttcaaacgctgcccgttcctaaagcaagtcttgcttcgggtcacctcccacctggtggcagccagggaaaggggaaaggaagaagacactggaaatgcatggccagccccctaggggcatgaggaaggagccttcaggtggcccacaaagccctagctctgggccaggggctctggggggctgaggggaccagactgggtgcagggccttgggagctgccagcctccttcccactgggcttccgcagaactgggactctcacttcaggggccaccacatccctcctctctgcttctccccccagatcaaagggtaccctcccacggttggcagggcctggctgagtgcctctagcaccctttgtgccaccacaggcggtcccaggaagggcagcaaggtcagaccattcctcattgaaaaccgtggctagggcacagggctctgatctgaaggagtgacaggtgcgtcacaacactgcctaaggctctccctctcaatgctgggaccctcgccccactcccagtggcagccaaaccagcaatatccaacagacataggccccctacgggacagtgtgggcccccagatataagatggataccccccgcacctgcagtaaagcatcccaaagccaaatgctcaattgcatcctgtctgcagctgggactttggagggtaatggctgggcagacagtaaagttgatcatctgttttctcggggtggcagacgcagccatgtcttggtatcaccacccatgtgacagctactcctgcacaactgggacaaatgtcagggccagagccatgaaggtgtggtaccccttgatcagcttctccacgtcctggccccaggtcttggcggggagggggtcacatgagtacagaggtcaaatatctaccaccctccagccctgagcaccagaagctctgcaaccaacgtccccaggaatggccttccccttgctgctcaggtcatacttctggaggaagagaaagctcattccatattttccccaccactctactccgaaagcaacacagttctggcccagtatcaaactagggttaggtccaagagagcagtcaagcgggtcgggggtgggggggagggcggagggcagcaggcattttcccccaaggaaaccatgaaagtccccagggcctgcagtcaagtttctatcaccttccccgtgagaaggaccttagttccatggagatgaagtgggtgaggttcaggtagaagccacaggggcaggcatccagaatgaggccccctgaggaaccctgagtgctgaccagtgccggcagaaatcagttccaccctgtggccctgacactatatgtcagggtgacaccaactgcagcaggcaggagccacaggaaggaagacgtcatccgatggagcctgacatccccaggttcccgccctggtgagcaaggtcttcatttggctttggtacatatgaccctatacagggaacctagtgtgtatcactcaccagcctctttctgtatctggggaaaccaaggcagtgaggtgactgcactcacctagcaataaagtaggcctttggtgcacttgcaggcatgtcctcctctggggcagagagcaggttccttgctgaagggcagatggtggcaaacatctccctcaactgtttccctgggccagtctttagggagcctagggacaagggcccaccctcccccttccacgtgtgccaaatcagcacctgaagtgaggcatttccagcaagcaactccacagacccgagaaaggaagggctctagtggaagagctagcatctcaccaccccaggtcccctggcctggtccagggcagccagctgcatgtgaccattctgttgccagctccccacacatccctcctgtcacccaggctccaagacattcgaccaactagactgaaaatgcaggcatccagctttgggagaccctgtgtgtgccacaccagggctaagctctcccagtgccctagcaaggtctttttttttttttctctccttattctactctacagtcttttgacagtattcccaaacgaggttgacacagctccagtccacaccagcataccaggcttccttcccagggcagtttagaggaagctccttctgggcaaggtcaggcggtcctccttccctctctccttcccctttgtcccagcctcaactgactctggctgtgggaggtgtggagggtccttaggcttccctccccaacctggcctccaccaacacccctaacaggaggcccgtggaaggctcagcctctcctccgcatccctcctccttcctgcctatcggagggagccagggtcccctaggctgaccctgaatcctcttcctcccttcatgggaggggggcaggaatccagaggaggatgaagccagcgggaccacatggcttggtggcttggacaaacaagctcagggaggaaatgaggaggcggcggctgcagaggaatgcaaccctgttgggcacagaccatgcaatctggggctggccctggggccagctgggtcctgtcctccacctgctcaaccgtgcttccaccaaccagaggaaacccatttactagtttttctaataaatcaataatgctcc

SEQ ID NO: 20378 - DNA, 8128 bp, Homo sapiens
  misc_feature 1..8128: note = ENST00000533211
  source 1..8128: mol_type = unassigned DNA
gatgttctgggagggagagccggcccagctgcctgaaggaggacgcgagagcgaggggacgggtgagaggaatgcttagcggagacggactggaggtgcccggagaggaaaggggaacggaggctggatctcgggaaacctcgtcggcagtgtcattagaggaaggatcgcgtgtctcggggatacggattttggaggaaaagcagaatagggacaaaggcttcccaggtggcttcccctcttcccctgggggctgatttccactgagcagccaaccgcagcctctggccacaaggagagcggagcacaggagcaggaagccgcctaccaccatgagcagcacgctgtcacccacagactttgacagcttggaaatccagggccagtacagtgacatcaacaaccgctgggaccttcctgactcggactgggacaatgacagcagctcggcccgcctctttgagaggtctcgcattaaggctctggcagatgaacgagaagctgtgcagaagaaaaccttcaccaagtgggtaaactcgcacctggcccgggtcacgtgccgggtgggggacctgtacagcgacctccgggacggacgcaacctgctgaggctcctcgaggtgctctcgggagagatactgccaaagcctacaaagggccgcatgcggatccactgcctggagaacgtggacaaggcactgcagttcctcaaggagcagaaagtgcacttggaaaacatgggctcccatgacattgtggacggaaaccaccgactgacccttgggctggtctggaccatcatccttcgattccagatccaagacatcagtgtggagacagaagacaacaaggagaagaagtcagccaaggatgccctgcttctgtggtgccagatgaagactgcaggttatcccaacgtcaatgtacacaacttcaccaccagctggagagatggactagctttcaacgccatcgtgcataaacaccggccagacctgctggattttgagtctctgaagaagtgtaatgcacactataatctgcagaatgcattcaatctggctgaaaaggaactgggacttaccaagctgctggatcccgaagacgtgaatgtggaccagccagatgagaagtcaatcattacctatgtggctacttactaccattacttctccaagatgaaggccctggccgtggaaggcaagagaattggcaaggtgctggaccatgccatggaggcagagcgcctggtggagaaatacgagtccctggcctcggagctgctgcagtggatcgagcaaacgatcgtgaccctcaatgaccggcagttggccaactcccttagcggggtccagaaccagctgcagtccttcaactcctaccgcaccgtggagaagccgcccaagtttaccgagaaagggaacttggaagtgctgctcttcaccatccagagcaagcttcgggccaacaaccagaaggtctacacgccccgcgagggccggctcatctcggacatcaacaaggcttgggagcggctggagaaggcggagcacgagcgtgagctggccctgcgcaccgagctcatccgccaggagaagctggagcagctggccgcccgcttcgaccgcaaggctgccatgcgggagacctggctcagcgagaaccagcgcctcgtgtcccaggacaactttgggctggagctggcagctgtcgaggcagcagtacggaagcacgaagccattgagacggacatcgtggcctacagcggccgggtgcaggcagtggacgccgtggctgcagagctggccgccgagcgctaccacgacatcaagcgcatcgccgctcggcagcacaacgtggcacggctctgggacttcttgcggcagatggtggccgcccggcgggagcggctcctcctcaacctggagctgcagaaggtgttccaggacctgctctacctcatggactggatggaagagatgaagggccggctgcagtctcaggacctgggcaggcacctagcaggagtggaggacctgctgcagctgcacgagctggtggaggcagacatcgccgtgcaggccgagagggtgcgggccgtcagcgcctctgccctgcgcttctgcaacccagggaaagagtatagaccttgcgacccgcagctggtgtcggagcgggtggccaagctagagcagagctatgaggcactgtgcgagttggcagcggcgcggcgggcccggctggaggaatcacggcggctctggcgtttcctctgggaggtgggtgaagctgaggcctgggtgcgggagcagcagcacctcctggcctcagccgacacgggccgagacctgaccggtgccctccgcctgctcaacaagcacacagccctgcggggcgagatgagcggccggctggggcccctgaagctcaccctggagcagggccagcagttggtggccgagggtcaccctggggcaagccaggcctctgcccgtgcagctgaactccaagcccagtgggagcggctagaggccctggccgaggagcgtgcccagcggctggcccaagccgccagcctctaccagttccaggccgatgcaaacgacatggaggcctggttggttgacgcactgcgcctggtgtccagccccgagctggggcacgacgagttctccacgcaggctctagccaggcagcatcgggccctggaggaggagattcgaagccaccggccaaccctggacgccttgagggaacaggcagcagccctgccccccacactgagccgcacgcccgaggtgcagagccgggtgcccaccctggagcggcactacgaggagctgcaggcccgggcaggcgagcgagcgcgggccttggaggcagccctggcgctctacaccatgctcagcgaggccggggcctgtggactctgggtggaggagaaggagcagtggctcaacgggctggccctgcctgaacgcctggaggacctggaggtcgtgcagcagaggttcgagaccctggagcctgaaatgaacacccttgcagcacaaatcaccgcggtgaatgacattgccgagcagttactgaaggccaaccccccaggcaaagaccgcattgtcaacacccaggagcagctcaaccacaggtggcagcagtttcggcgtctggcagacggcaagaaggcagctctcacctcagccctgagcatccagaactaccacttagagtgcacggagacccaggcctggatgagagagaagaccaaagtcatcgagtccacccagggcctaggcaacgatctggctggggtgctggccctgcagcgcaagctggccggcacggagcgggacctggaggccatcgccgcccgggtgggcgaactgactcgagaggcaaatgccctggctgccggccatcccgctcaggcagtggccatcaacgcccggctgagagaggtgcagaccggctgggaggacctcagggccaccatgcggcgtcgagaagagtcgctgggggaggcgcggcggctgcaggacttcttgcgcagcttggatgacttccaggcctggctaggccgcactcagactgctgtggcctctgaagaagggccggccaccctgcctgaggcagaggccctcctggcccaacatgcagccctgcggggagaggtggagcgggcccagagcgagtatagccggctgcgagccctgggcgaggaggtgacccgggaccaggctgacccccagtgcctcttcctacgacagcgactggaggccctgggaactggctgggaggagctgggccgaatgtgggagagccggcaaggtcgcctggcccaggcccacggcttccagggattcctgcgggatgctcgtcaggctgagggcgtgctcagcagccaggaatatgttctgtctcacacggagatgccagggacactccaggctgctgatgctgccattaaaaaactggaggacttcatgagcaccatggacgccaatggggaacggatccacgggctcctggaggctggccgccagctggtatctgaaggcaacatccacgccgacaagattcgggaaaaggcagactccattgagaggaggcacaagaagaatcaagacgcagcgcagcaatttctgggccgtcttcgggacaaccgggagcagcagcatttcctgcaagattgtcacgagctgaagctctggatcgacgagaagatgctgacagcccaggacgtgtcctatgacgaggcccgcaacctgcatactaagtggcagaagcaccaggcattcatggccgagctggctgccaacaaagactggctggacaaggtggacaaggaagggcgagagctcacccttgagaagccagagctgaaagccctggtgtcggagaagctgagagacctgcacaggcgctgggacgagctggagaccaccacccaagccaaggcccgcagcctctttgatgccaaccgagctgagctgtttgcccagagctgctgtgccctggagagctggctggagagcctgcaggcccagctgcactcggatgactacggcaaggacctcaccagcgtcaacatcctgctcaagaagcagcagatgctggaatgggagatggctgtgagagagaaggaggtggaggcaatccaggcccaggccaaagcactggcccaggaggaccagggtgcaggggaggtggagagaacctcgagggccgtggaggagaagttcagggccttgtgccagcccatgcgggaacgctgccggcgcctgcaggcttctcgcgagcagcaccagttccaccgcgatgtggaagatgagattttgtgggtgacagagcggctgcccatggccagctccatggagcatggcaaggacctgcccagcgtccagcttctcatgaagaaaaaccagaccctgcagaaagagattcagggccatgagccccggatcgcggacctgagggagcggcagcgtgctctaggtgcagcagcagcaggtccagagctggctgagctgcaggaaatgtggaaacgcctgggccacgagctggaacttcgagggaagcgactggaggatgccctgcgagcccagcagttctaccgcgatgccgccgaggcggaggcctggatgggcgagcaggaattacacatgatgggccaggagaaggccaaggatgagctgagtgcccaggcagaggtgaagaagcaccaggtgctggagcaagccctggccgactacgcgcagaccatccaccagctggcggccagcagccaggacatgattgaccacgagcacccagagagcactcggatatccatccgccaagcccaggtggacaagctgtatgccggcctgaaggagctggctggagagcggcgggagcgcctgcaggagcacctccggctgtgccagctccgccgcgagctggatgacctggaacagtggatccaggagcgcgaggtggtggcggcctcccacgagctgggccaggactacgagcatgtgactatgctccgagacaaattccgagagttctcccgggacacaagcaccatcggtcaggagcgcgtagatagcgccaatgcgctggccaatgggctcattgctgggggccatgctgcacgggccaccgtggccgagtggaaggacagtctcaacgaggcctgggctgacctgcttgagctgctggacacacggggtcaggtgctggccgcggcgtacgagctgcagcgcttcctgcacggggcacgccaagccctggcgcgggtgcagcacaagcagcagcagcttccggacgggactggccgcgacctcaacgctgccgaggccctgcagcgccgacactgtgcctacgagcatgacattcaggccctcagcccccaggtccagcaggtgcaggacgacggccaccggctccagaaggcctacgctggagacaaggctgaggagatcggccgccacatgcaggccgtggccgaggcctgggcccagcttcagggaagctctgccgcccgccggcagctgctgctggacaccacagacaagttccgcttcttcaaggctgtccgggaactgatgctctggatggatgaggtcaacctgcagatggatgcccaggagcgtccccgggatgtgtcctccgcggatctagtcatcaagaaccagcaaggcatcaaggcagagatagaggcccgggcagaccgcttctcctcctgcatcgacatggggaaggagctgctggccaggagccactatgcggccgaggagatctcagagaagctgtctcagctgcaggcacggcgccaggagacagctgagaagtggcaggagaagatggactggcttcagctggttttggaggtgcttgtgtttggaagagatgcagggatggcagaggcctggctctgcagccaggagccactggtgcgcagcgctgagctgggttgcacggtcgacgaagttgagagcctcatcaagcggcacgaggccttccagaagtcagcagtggcctgggaggagcgattctgtgcgctggagaagcttactgcgctagaggagcgggagaaggagcgaaagagaaagagggaggaggaggagcggcggaaacagccgcctgctcccgaacccacagccagtgtgcctccaggggacctggtgggcggccagacagcttctgacaccacctgggacggaacccagccacggccaccaccatccacacaagcacccagtgttaatggagtctgcacagatggagagccctcacagcccctgctgggacaacagagacttgagcacagcagcttccccgaagggccgggacctggctcaggggacgaagccaatgggccccggggagagaggcagacccggactcggggcccggccccatctgcaatgccccagagcaggtctaccgagtcagcccatgctgccaccctgccgcctcgaggcccagagccatctgcccaggagcagatggaggggatgctgtgccgcaagcaggagatggaggccttcgggaagaaggctgccaacaggtcctggcagaacgtgtactgtgtcctgcggcgtgggagcctcggcttttacaaggatgccaaggcagccagcgcgggagtgccataccacggagaagtgcctgtcagcctggccagggcccagggcagcgtcgcctttgattaccgaaagcgcaaacatgtcttcaagctgggcttacaggatggaaaagaatatttattccaggccaaggatgaggcagagatgagctcgtggctacgggtggtgaatgcagccattgccacagcgtcttctgcctctggagagcctgaagagccggtggtgcccagcaccacccggggcatgacccgggccatgaccatgcccccagtgtcacccgtcggggctgaggggcctgttgtgctccgcagcaaagacggcagagaacgagagcgagaaaaacgcttcagcttctttaagaagaacaagtagttgggggcaaggtcccaggccaactccctccctccgttcaggaaactgccagggacagtcgacagggaccgccctcttgtcaggacaactgcctgctgctagggtctgttgccaaggtcaacccatcaccaggaactgtcactggggacgagtccatgttcccaagggcagcccttctcttctgctgtttaattccagactggtggtgggacccaggtaaccccctctcccacccccgccgacttctcccctttccccagcctcgtgcctctgtccctcaccacggtgtggacagtgccgcaccctcaacataggccatgtggggagtggctgcccctgcctcagggtcattctcctgccatgcgagggcactcgccttctgccttctggttcctcacccctcagaccagccaggaacctctcagagctgaagcaggccctgggggcagaagtgccagatgacagtcagaggcgcaggagccctccctccccacccccaccctgtaactccagctgccactccatctccagctgctctcaatggcttccaggtgtgttgttcggggacagccaccgccttgagtctggccaaggaggtgattaaacagctcagcttctctcac

SEQ ID NO: 20379 - DNA, 8085 bp, Homo sapiens
  misc_feature 1..8085: note = ENST00000529997
  source 1..8085: mol_type = unassigned DNA
atgagcagcacgctgtcacccacagactttgacagcttggaaatccagggccagtacagtgacatcaacaaccgctgggaccttcctgactcggactgggacaatgacagcagctcggcccgcctctttgagaggtctcgcattaaggctctggcagatgaacgagaagctgtgcagaagaaaaccttcaccaagtgggtaaactcgcacctggcccgggtcacgtgccgggtgggggacctgtacagcgacctccgggacggacgcaacctgctgaggctcctcgaggtgctctcgggagagatactgccaaagcctacaaagggccgcatgcggatccactgcctggagaacgtggacaaggcactgcagttcctcaaggagcagaaagtgcacttggaaaacatgggctcccatgacattgtggacggaaaccaccgactgacccttgggctggtctggaccatcatccttcgattccagatccaagacatcagtgtggagacagaagacaacaaggagaagaagtcagccaaggatgccctgcttctgtggtgccagatgaagactgcaggttatcccaacgtcaatgtacacaacttcaccaccagctggagagatggactagctttcaacgccatcgtgcataaacaccggccagacctgctggattttgagtctctgaagaagtgtaatgcacactataatctgcagaatgcattcaatctggctgaaaaggaactgggacttaccaagctgctggatcccgaagacgtgaatgtggaccagccagatgagaagtcaatcattacctatgtggctacttactaccattacttctccaagatgaaggccctggccgtggaaggcaagagaattggcaaggtgctggaccatgccatggaggcagagcgcctggtggagaaatacgagtccctggcctcggagctgctgcagtggatcgagcaaacgatcgtgaccctcaatgaccggcagttggccaactcccttagcggggtccagaaccagctgcagtccttcaactcctaccgcaccgtggagaagccgcccaagtttaccgagaaagggaacttggaagtgctgctcttcaccatccagagcaagcttcgggccaacaaccagaaggtctacacgccccgcgagggccggctcatctcggacatcaacaaggcttgggagcggctggagaaggcggagcacgagcgtgagctggccctgcgcaccgagctcatccgccaggagaagctggagcagctggccgcccgcttcgaccgcaaggctgccatgcgggagacctggctcagcgagaaccagcgcctcgtgtcccaggacaactttgggctggagctggcagctgtcgaggcagcagtacggaagcacgaagccattgagacggacatcgtggcctacagcggccgggtgcaggcagtggacgccgtggctgcagagctggccgccgagcgctaccacgacatcaagcgcatcgccgctcggcagcacaacgtggcacggctctgggacttcttgcggcagatggtggccgcccggcgggagcggctcctcctcaacctggagctgcagaaggtgttccaggacctgctctacctcatggactggatggaagagatgaagggccggctgcagtctcaggacctgggcaggcacctagcaggagtggaggacctgctgcagctgcacgagctggtggaggcagacatcgccgtgcaggccgagagggtgcgggccgtcagcgcctctgccctgcgcttctgcaacccagggaaagagtatagaccttgcgacccgcagctggtgtcggagcgggtggccaagctagagcagagctatgaggcactgtgcgagttggcagcggcgcggcgggcccggctggaggaatcacggcggctctggcgtttcctctgggaggtgggtgaagctgaggcctgggtgcgggagcagcagcacctcctggcctcagccgacacgggccgagacctgaccggtgccctccgcctgctcaacaagcacacagccctgcggggcgagatgagcggccggctggggcccctgaagctcaccctggagcagggccagcagttggtggccgagggtcaccctggggcaagccaggcctctgcccgtgcagctgaactccaagcccagtgggagcggctagaggccctggccgaggagcgtgcccagcggctggcccaagccgccagcctctaccagttccaggccgatgcaaacgacatggaggcctggttggttgacgcactgcgcctggtgtccagccccgagctggggcacgacgagttctccacgcaggctctagccaggcagcatcgggccctggaggaggagattcgaagccaccggccaaccctggacgccttgagggaacaggcagcagccctgccccccacactgagccgcacgcccgaggtgcagagccgggtgcccaccctggagcggcactacgaggagctgcaggcccgggcaggcgagcgagcgcgggccttggaggcagccctggcgctctacaccatgctcagcgaggccggggcctgtggactctgggtggaggagaaggagcagtggctcaacgggctggccctgcctgaacgcctggaggacctggaggtcgtgcagcagaggttcgagaccctggagcctgaaatgaacacccttgcagcacaaatcaccgcggtgaatgacattgccgagcagttactgaaggccaaccccccaggcaaagaccgcattgtcaacacccaggagcagctcaaccacaggtggcagcagtttcggcgtctggcagacggcaagaaggcagctctcacctcagccctgagcatccagaactaccacttagagtgcacggagacccaggcctggatgagagagaagaccaaagtcatcgagtccacccagggcctaggcaacgatctggctggggtgctggccctgcagcgcaagctggccggcacggagcgggacctggaggccatcgccgcccgggtgggcgaactgactcgagaggcaaatgccctggctgccggccatcccgctcaggcagtggccatcaacgcccggctgagagaggtgcagaccggctgggaggacctcagggccaccatgcggcgtcgagaagagtcgctgggggaggcgcggcggctgcaggacttcttgcgcagcttggatgacttccaggcctggctaggccgcactcagactgctgtggcctctgaagaagggccggccaccctgcctgaggcagaggccctcctggcccaacatgcagccctgcggggagaggtggagcgggcccagagcgagtatagccggctgcgagccctgggcgaggaggtgacccgggaccaggctgacccccagtgcctcttcctacgacagcgactggaggccctgggaactggctgggaggagctgggccgaatgtgggagagccggcaaggtcgcctggcccaggcccacggcttccagggattcctgcgggatgctcgtcaggctgagggcgtgctcagcagccaggaatatgttctgtctcacacggagatgccagggacactccaggctgctgatgctgccattaaaaaactggaggacttcatgagcaccatggacgccaatggggaacggatccacgggctcctggaggctggccgccagctggtatctgaaggcaacatccacgccgacaagattcgggaaaaggcagactccattgagaggaggcacaagaagaatcaagacgcagcgcagcaatttctgggccgtcttcgggacaaccgggagcagcagcatttcctgcaagattgtcacgagctgaagctctggatcgacgagaagatgctgacagcccaggacgtgtcctatgacgaggcccgcaacctgcatactaagtggcagaagcaccaggcattcatggccgagctggctgccaacaaagactggctggacaaggtggacaaggaagggcgagagctcacccttgagaagccagagctgaaagccctggtgtcggagaagctgagagacctgcacaggcgctgggacgagctggagaccaccacccaagccaaggcccgcagcctctttgatgccaaccgagctgagctgtttgcccagagctgctgtgccctggagagctggctggagagcctgcaggcccagctgcactcggatgactacggcaaggacctcaccagcgtcaacatcctgctcaagaagcagcagatgctggaatgggagatggctgtgagagagaaggaggtggaggcaatccaggcccaggccaaagcactggcccaggaggaccagggtgcaggggaggtggagagaacctcgagggccgtggaggagaagttcagggccttgtgccagcccatgcgggaacgctgccggcgcctgcaggcttctcgcgagcagcaccagttccaccgcgatgtggaagatgagattttgtgggtgacagagcggctgcccatggccagctccatggagcatggcaaggacctgcccagcgtccagcttctcatgaagaaaaaccagaccctgcagaaagagattcagggccatgagccccggatcgcggacctgagggagcggcagcgtgctctaggtgcagcagcagcaggtccagagctggctgagctgcaggaaatgtggaaacgcctgggccacgagctggaacttcgagggaagcgactggaggatgccctgcgagcccagcagttctaccgcgatgccgccgaggcggaggcctggatgggcgagcaggaattacacatgatgggccaggagaaggccaaggatgagctgagtgcccaggcagaggtgaagaagcaccaggtgctggagcaagccctggccgactacgcgcagaccatccaccagctggcggccagcagccaggacatgattgaccacgagcacccagagagcactcggatatccatccgccaagcccaggtggacaagctgtatgccggcctgaaggagctggctggagagcggcgggagcgcctgcaggagcacctccggctgtgccagctccgccgcgagctggatgacctggaacagtggatccaggagcgcgaggtggtggcggcctcccacgagctgggccaggactacgagcatgtgactatgctccgagacaaattccgagagttctcccgggacacaagcaccatcggtcaggagcgcgtagatagcgccaatgcgctggccaatgggctcattgctgggggccatgctgcacgggccaccgtggccgagtggaaggacagtctcaacgaggcctgggctgacctgcttgagctgctggacacacggggtcaggtgctggccgcggcgtacgagctgcagcgcttcctgcacggggcacgccaagccctggcgcgggtgcagcacaagcagcagcagcttccggacgggactggccgcgacctcaacgctgccgaggccctgcagcgccgacactgtgcctacgagcatgacattcaggccctcagcccccaggtccagcaggtgcaggacgacggccaccggctccagaaggcctacgctggagacaaggctgaggagatcggccgccacatgcaggccgtggccgaggcctgggcccagcttcagggaagctctgccgcccgccggcagctgctgctggacaccacagacaagttccgcttcttcaaggctgtccgggaactgatgctctggatggatgaggtcaacctgcagatggatgcccaggagcgtccccgggatgtgtcctccgcggatctagtcatcaagaaccagcaaggcatcaaggcagagatagaggcccgggcagaccgcttctcctcctgcatcgacatggggaaggagctgctggccaggagccactatgcggccgaggagatctcagagaagctgtctcagctgcaggcacggcgccaggagacagctgagaagtggcaggagaagatggactggcttcagctggttttggaggtgcttgtgtttggaagagatgcagggatggcagaggcctggctctgcagccaggagccactggtgcgcagcgctgagctgggttgcacggtcgacgaagttgagagcctcatcaagcggcacgaggccttccagaagtcagcagtggcctgggaggagcgattctgtgcgctggagaagcttactgcgctagaggagcgggagaaggagcgaaagagaaagagggaggaggaggagcggcggaaacagccgcctgctcccgaacccacagccagtgtgcctccaggggacctggtgggcggccagacagcttctgacaccacctgggacggaacccagccacggccaccaccatccacacaagcacccagtgttaatggagtctgcacagatggagagccctcacagcccctgctgggacaacagagacttgagcacagcagcttccccgaagggccgggacctggctcaggggacgaagccaatgggccccggggagagaggcagacccggactcggggcccggccccatctgcaatgccccagagcaggtctaccgagtcagcccatgctgccaccctgccgcctcgaggcccagagccatctgcccaggagcagatggaggggatgctgtgccgcaagcaggagatggaggccttcgggaagaaggctgccaacaggtcctggcagaacgtgtactgtgtcctgcggcgtgggagcctcggcttttacaaggatgccaaggcagccagcgcgggagtgccataccacggagaagtgcctgtcagcctggccagggcccagggcagcgtcgcctttgattaccgaaagcgcaaacatgtcttcaagctgggcttacaggatggaaaagaatatttattccaggccaaggatgaggtgagctgtccttcgtgttcctctctgtccgtgccattccagaagcttccagctgcagactccccttctttccctgtcctccctctttttcctggtcttgtcctttgtggtaagactggatgtgtgcgacggccgcaccaggccgcactccctgtctaagccggccacattctcctaatagcatgaaacagtcagctcactttctgcctcctcctcttacacttccctgctgtccactgcggccaactcagcacagtgtccttgaagctgattgagggtctttccatccacaggcagagatgagctcgtggctacgggtggtgaatgcagccattgccacagcgtcttctgcctctggagagcctgaagagccggtggtgcccagcaccacccggggcatgacccgggccatgaccatgcccccagtgtcacccgtcggggctgaggggcctgttgtgctccgcagcaaagacggcagagaacgagagcgagaaaaacgcttcagcttctttaagaagaacaagtagttgggggcaaggtcccaggccaactccctccctccgttcaggaaactgccagggacagtcgacagggaccgccctcttgtcaggacaactgcctgctgctagggtctgttgccaaggtcaacccatcaccaggaactgtcactggggacgagtccatgttcccaagggcagcccttctcttctgctgtttaattccagactggtggtgggacccaggtaaccccctctcccacccccgccgacttctcccctttccccagcctcgtgcctctgtccctcaccacggtgtggacagtgccgcaccctcaacataggccatgtggggagtggctgcccctgcctcagggtcattctcctgccatgcgagggcactcgccttctgccttctggttcctcacccctcagaccagccaggaacctctcagagctgaagcaggccctgggggcagaagtgccagatgacagtcagaggcgcaggagccctccctccccacccccaccctgtaactccagctgccactccatctccagctgctctcaatggcttccaggtgtgttgttcggggacagccaccgccttgagtctggccaaggaggtgattaaacagctcagcttctc

SEQ ID NO: 20380 - DNA, 573 bp, Homo sapiens
  misc_feature 1..573: note = ENST00000528051
  source 1..573: mol_type = unassigned DNA
atgattacgctctcaccagcagctacctggcagatccggattctcagctctgccctgtggcctctctctcccaacagcttacaggatggaaaagaatatttattccaggccaaggatgaggcagagatgagctcgtggctacgggtggtgaatgcagccattgccacagcgtcttctgcctctggagagcctgaagagccggtggtgcccagcaccacccggggcatgacccgggccatgaccatgcccccagtgtcacccgtcggggctgaggggcctgttgtgctccgcagcaaagacggcagagaacgagagcgagaaaaacgcttcagcttctttaagaagaacaagtagttgggggcaaggtcccaggccaactccctccctccgttcaggaaactgccagggacagtcgacagggaccgccctcttgtcaggacaactgcctgctgctagggtctgttgccaaggtcaacccatcaccaggaactgtcactggggacgagtccatgttcccaagggcagcccttctcttctgctgtttaattccagactggtggtgggacccaggta

SEQ ID NO: 20381 - DNA, 473 bp, Homo sapiens
  misc_feature 1..473: note = ENST00000530775
  source 1..473: mol_type = unassigned DNA
ccgcctcgaggcccagagccatctgcccaggagcagatggaggggatgctgtgccgcaagcaggagatggaggccttcgggaagaaggctgccaacaggtcctggcagaacgtgtactgtgtcctgcggcgtgggagcctcggcttttacaaggatgccaaggcagccagcgcgggagtgccataccacggagaagtgcctgtcagcctggccagggcccagggcagcgtcgcctttgattaccgaaagcgcaaacatgtcttcaagctggggtaggaacagggaacagtgctctcgggatgggaggagagttgggagtgacacaggtgagccatgagtcaggtccagagggaggggagttcctgtaaggagcctgagtggagtaaccaggccagccacttggggatagtgtagatgagggaggcggagattctggttgtctccacaccaaggggagcaggagaaccaagacc

SEQ ID NO: 20382 - DNA, 571 bp, Homo sapiens
  misc_feature 1..571: note = ENST00000532650
  source 1..571: mol_type = unassigned DNA
catggccactgtgccctgccagtggccactctgacccaccatcttcctgcaacccccgatcctgccagttttggaggtgcttgtgtttggaagagatgcagggatggcagaggcctggctctgcagccaggagccactggtgcgcagcgctgagctgggttgcacggtcgacgaagttgagagcctcatcaagcggcacgaggccttccagaagtcagcagtggcctgggaggagcgattctgtgcgctggagaagcttactgcgctagaggagcgggagaaggagcgaaagagaaagagggaggaggaggagcggcggaaacagccgcctgctcccgaacccacagccagtgtgcctccaggggacctggtgggcggccagacagcttctgacaccacctgggacggaacccagccacggccaccaccatccacacaagcacccagtgttaatggagtctgcacagatggagagccctcacagcccctgctgggacaacagagacttgagcacagcagcttccccgaagggccgggacctggctcaggggacgaagccaatgggccccgg

SEQ ID NO: 20383 - DNA, 573 bp, Homo sapiens
  misc_feature 1..573: note = ENST00000532902
  source 1..573: mol_type = unassigned DNA
ggcagccaggactgaggcaggctgcggctccttggagtcccccgctctgcctgactctgacccggggctccgcaggtccagcaggtgcaggacgacggccaccggctccagaaggcctacgctggagacaaggctgaggagatcggccgccacatgcaggccgtggccgaggcctgggcccagcttcagggaagctctgccgcccgccggcagctgctgctggacaccacagacaagttccgcttcttcaaggctgtccgggaactgatgctctggatggatgaggtcaacctgcagatggatgcccaggagcgtccccgggatgtgtcctccgcggatctagtcatcaagaaccagcaaggcatcaaggcagagatagaggcccgggcagaccgcttctcctcctgcatcgacatggggaaggagctgctggccaggagccactatgcggccgaggagatctcagagaagctgtctcagctgcaggcacggcgccaggagacagctgagaagtggcaggagaagatggactggcttcagctggttttggaggtgcttgtgtttggaagagat

SEQ ID NO: 20384 - DNA, 462 bp, Homo sapiens
  misc_feature 1..462: note = ENST00000530665
  source 1..462: mol_type = unassigned DNA
ccctgttttatgtttggtccagctgaagctctggatcgacgagaagatgctgacagcccaggacgtgtcctatgacgaggcccgcaacctgcatactaagtggcagaagcaccaggcattcatggccgagctggctgccaacaaagactggctggacaaggtggacaaggaagggcgagagctcacccttgagaagccagagctgaaagccctggtgtcggagaagctgagagacctgcacaggcgctgggacgagctggagaccaccacccaagccaaggcccgcagcctctttgatgccaaccgagctgagctgtttgcccagagctgctgtgccctggagagctggctggagagcctgcaggcccagctgcactcggatgactacggcaaggacctcaccagcgtcaacatcctgctcaagaagcagcagatgctggaatgggagatggctgtgagaga

SEQ ID NO: 20385 - DNA, 859 bp, Homo sapiens
  misc_feature 1..859: note = ENST00000527010
  source 1..859: mol_type = unassigned DNA
tgatttgggcataattccttcctctcctaagcaggcagcagttcaccttggttaaggaccttggaccttagaccactcagacgctaacaaaccaaggagaaacccagccgtgtcaggcctagaaatgtctgcccccacccccacccccctcaagacggtgactaggccggaattctcctggttgataaatgagaggagctgagaagcgctgagatgcctgtttggagcatctgatctgtagaagacgaatcttcactgtgccatggagatgttctgggagggagagccggcccagctgcctgaaggaggacgcgagagcgaggggacgggtgagaggaatgcttagcggagacggactggaggtgcccggagaggaaaggggaacggaggctggatctcgggaaacctcgtcggcagtgtcattagaggaaggatcgcgtgtctcggggatacggattttggaggaaaagcagaatagggacaaaggagcaggaagccgcctaccaccatgagcagcacgctgtcacccacagactttgacagcttggaaatccagggccagtacagtgacatcaacaaccgctgggaccttcctgactcggactgggacaatgacagcagctcggcccgcctctttgagaggtctcgcattaaggctctggcagatgaacgagaagctgtgcagaagaaaaccttcaccaagtgggtaaactcgcacctggcccgggtcacgtgccgggtgggggacctgtacagcgacctccgggacggacgcaacctgctgaggctcctcgaggtgctctcgggagagatactgccaaagcctacaaagggccgcatgcggatccactgcctggag

SEQ ID NO: 20386 - DNA, 7866 bp, Homo sapiens
  misc_feature 1..7866: note = ENST00000309996
  source 1..7866: mol_type = unassigned DNA
ccactgagcagccaaccgcagcctctggccacaaggagagcggagcacaggagcaggaagccgcctaccaccatgagcagcacgctgtcacccacagactttgacagcttggaaatccagggccagtacagtgacatcaacaaccgctgggaccttcctgactcggactgggacaatgacagcagctcggcccgcctctttgagaggtctcgcattaaggctctggcagatgaacgagaagctgtgcagaagaaaaccttcaccaagtgggtaaactcgcacctggcccgggtcacgtgccgggtgggggacctgtacagcgacctccgggacggacgcaacctgctgaggctcctcgaggtgctctcgggagagatactgccaaagcctacaaagggccgcatgcggatccactgcctggagaacgtggacaaggcactgcagttcctcaaggagcagaaagtgcacttggaaaacatgggctcccatgacattgtggacggaaaccaccgactgacccttgggctggtctggaccatcatccttcgattccagatccaagacatcagtgtggagacagaagacaacaaggagaagaagtcagccaaggatgccctgcttctgtggtgccagatgaagactgcaggttatcccaacgtcaatgtacacaacttcaccaccagctggagagatggactagctttcaacgccatcgtgcataaacaccggccagacctgctggattttgagtctctgaagaagtgtaatgcacactataatctgcagaatgcattcaatctggctgaaaaggaactgggacttaccaagctgctggatcccgaagacgtgaatgtggaccagccagatgagaagtcaatcattacctatgtggctacttactaccattacttctccaagatgaaggccctggccgtggaaggcaagagaattggcaaggtgctggaccatgccatggaggcagagcgcctggtggagaaatacgagtccctggcctcggagctgctgcagtggatcgagcaaacgatcgtgaccctcaatgaccggcagttggccaactcccttagcggggtccagaaccagctgcagtccttcaactcctaccgcaccgtggagaagccgcccaagtttaccgagaaagggaacttggaagtgctgctcttcaccatccagagcaagcttcgggccaacaaccagaaggtctacacgccccgcgagggccggctcatctcggacatcaacaaggcttgggagcggctggagaaggcggagcacgagcgtgagctggccctgcgcaccgagctcatccgccaggagaagctggagcagctggccgcccgcttcgaccgcaaggctgccatgcgggagacctggctcagcgagaaccagcgcctcgtgtcccaggacaactttgggctggagctggcagctgtcgaggcagcagtacggaagcacgaagccattgagacggacatcgtggcctacagcggccgggtgcaggcagtggacgccgtggctgcagagctggccgccgagcgctaccacgacatcaagcgcatcgccgctcggcagcacaacgtggcacggctctgggacttcttgcggcagatggtggccgcccggcgggagcggctcctcctcaacctggagctgcagaaggtgttccaggacctgctctacctcatggactggatggaagagatgaagggccggctgcagtctcaggacctgggcaggcacctagcaggagtggaggacctgctgcagctgcacgagctggtggaggcagacatcgccgtgcaggccgagagggtgcgggccgtcagcgcctctgccctgcgcttctgcaacccagggaaagagtatagaccttgcgacccgcagctggtgtcggagcgggtggccaagctagagcagagctatgaggcactgtgcgagttggcagcggcgcggcgggcccggctggaggaatcacggcggctctggcgtttcctctgggaggtgggtgaagctgaggcctgggtgcgggagcagcagcacctcctggcctcagccgacacgggccgagacctgaccggtgccctccgcctgctcaacaagcacacagccctgcggggcgagatgagcggccggctggggcccctgaagctcaccctggagcagggccagcagttggtggccgagggtcaccctggggcaagccaggcctctgcccgtgcagctgaactccaagcccagtgggagcggctagaggccctggccgaggagcgtgcccagcggctggcccaagccgccagcctctaccagttccaggccgatgcaaacgacatggaggcctggttggttgacgcactgcgcctggtgtccagccccgagctggggcacgacgagttctccacgcaggctctagccaggcagcatcgggccctggaggaggagattcgaagccaccggccaaccctggacgccttgagggaacaggcagcagccctgccccccacactgagccgcacgcccgaggtgcagagccgggtgcccaccctggagcggcactacgaggagctgcaggcccgggcaggcgagcgagcgcgggccttggaggcagccctggcgctctacaccatgctcagcgaggccggggcctgtggactctgggtggaggagaaggagcagtggctcaacgggctggccctgcctgaacgcctggaggacctggaggtcgtgcagcagaggttcgagaccctggagcctgaaatgaacacccttgcagcacaaatcaccgcggtgaatgacattgccgagcagttactgaaggccaaccccccaggcaaagaccgcattgtcaacacccaggagcagctcaaccacaggtggcagcagtttcggcgtctggcagacggcaagaaggcagctctcacctcagccctgagcatccagaactaccacttagagtgcacggagacccaggcctggatgagagagaagaccaaagtcatcgagtccacccagggcctaggcaacgatctggctggggtgctggccctgcagcgcaagctggccggcacggagcgggacctggaggccatcgccgcccgggtgggcgaactgactcgagaggcaaatgccctggctgccggccatcccgctcaggcagtggccatcaacgcccggctgagagaggtgcagaccggctgggaggacctcagggccaccatgcggcgtcgagaagagtcgctgggggaggcgcggcggctgcaggacttcttgcgcagcttggatgacttccaggcctggctaggccgcactcagactgctgtggcctctgaagaagggccggccaccctgcctgaggcagaggccctcctggcccaacatgcagccctgcggggagaggtggagcgggcccagagcgagtatagccggctgcgagccctgggcgaggaggtgacccgggaccaggctgacccccagtgcctcttcctacgacagcgactggaggccctgggaactggctgggaggagctgggccgaatgtgggagagccggcaaggtcgcctggcccaggcccacggcttccagggattcctgcgggatgctcgtcaggctgagggcgtgctcagcagccaggaatatgttctgtctcacacggagatgccagggacactccaggctgctgatgctgccattaaaaaactggaggacttcatgagcaccatggacgccaatggggaacggatccacgggctcctggaggctggccgccagctggtatctgaaggcaacatccacgccgacaagattcgggaaaaggcagactccattgagaggaggcacaagaagaatcaagacgcagcgcagcaatttctgggccgtcttcgggacaaccgggagcagcagcatttcctgcaagattgtcacgagctgaagctctggatcgacgagaagatgctgacagcccaggacgtgtcctatgacgaggcccgcaacctgcatactaagtggcagaagcaccaggcattcatggccgagctggctgccaacaaagactggctggacaaggtggacaaggaagggcgagagctcacccttgagaagccagagctgaaagccctggtgtcggagaagctgagagacctgcacaggcgctgggacgagctggagaccaccacccaagccaaggcccgcagcctctttgatgccaaccgagctgagctgtttgcccagagctgctgtgccctggagagctggctggagagcctgcaggcccagctgcactcggatgactacggcaaggacctcaccagcgtcaacatcctgctcaagaagcagcagatgctggaatgggagatggctgtgagagagaaggaggtggaggcaatccaggcccaggccaaagcactggcccaggaggaccagggtgcaggggaggtggagagaacctcgagggccgtggaggagaagttcagggccttgtgccagcccatgcgggaacgctgccggcgcctgcaggcttctcgcgagcagcaccagttccaccgcgatgtggaagatgagattttgtgggtgacagagcggctgcccatggccagctccatggagcatggcaaggacctgcccagcgtccagcttctcatgaagaaaaaccagaccctgcagaaagagattcagggccatgagccccggatcgcggacctgagggagcggcagcgtgctctaggtgcagcagcagcaggtccagagctggctgagctgcaggaaatgtggaaacgcctgggccacgagctggaacttcgagggaagcgactggaggatgccctgcgagcccagcagttctaccgcgatgccgccgaggcggaggcctggatgggcgagcaggaattacacatgatgggccaggagaaggccaaggatgagctgagtgcccaggcagaggtgaagaagcaccaggtgctggagcaagccctggccgactacgcgcagaccatccaccagctggcggccagcagccaggacatgattgaccacgagcacccagagagcactcggatatccatccgccaagcccaggtggacaagctgtatgccggcctgaaggagctggctggagagcggcgggagcgcctgcaggagcacctccggctgtgccagctccgccgcgagctggatgacctggaacagtggatccaggagcgcgaggtggtggcggcctcccacgagctgggccaggactacgagcatgtgactatgctccgagacaaattccgagagttctcccgggacacaagcaccatcggtcaggagcgcgtagatagcgccaatgcgctggccaatgggctcattgctgggggccatgctgcacgggccaccgtggccgagtggaaggacagtctcaacgaggcctgggctgacctgcttgagctgctggacacacggggtcaggtgctggccgcggcgtacgagctgcagcgcttcctgcacggggcacgccaagccctggcgcgggtgcagcacaagcagcagcagcttccggacgggactggccgcgacctcaacgctgccgaggccctgcagcgccgacactgtgcctacgagcatgacattcaggccctcagcccccaggtccagcaggtgcaggacgacggccaccggctccagaaggcctacgctggagacaaggctgaggagatcggccgccacatgcaggccgtggccgaggcctgggcccagcttcagggaagctctgccgcccgccggcagctgctgctggacaccacagacaagttccgcttcttcaaggctgtccgggaactgatgctctggatggatgaggtcaacctgcagatggatgcccaggagcgtccccgggatgtgtcctccgcggatctagtcatcaagaaccagcaaggcatcaaggcagagatagaggcccgggcagaccgcttctcctcctgcatcgacatggggaaggagctgctggccaggagccactatgcggccgaggagatctcagagaagctgtctcagctgcaggcacggcgccaggagacagctgagaagtggcaggagaagatggactggcttcagctggttttggaggtgcttgtgtttggaagagatgcagggatggcagaggcctggctctgcagccaggagccactggtgcgcagcgctgagctgggttgcacggtcgacgaagttgagagcctcatcaagcggcacgaggccttccagaagtcagcagtggcctgggaggagcgattctgtgcgctggagaagcttactgcgctagaggagcgggagaaggagcgaaagagaaagagggaggaggaggagcggcggaaacagccgcctgctcccgaacccacagccagtgtgcctccaggggacctggtgggcggccagacagcttctgacaccacctgggacggaacccagccacggccaccaccatccacacaagcacccagtgttaatggagtctgcacagatggagagccctcacagcccctgctgggacaacagagacttgagcacagcagcttccccgaagggccgggacctggctcaggggacgaagccaatgggccccggggagagaggcagacccggactcggggcccggccccatctgcaatgccccagagcaggtctaccgagtcagcccatgctgccaccctgccgcctcgaggcccagagccatctgcccaggagcagatggaggggatgctgtgccgcaagcaggagatggaggccttcgggaagaaggctgccaacaggtcctggcagaacgtgtactgtgtcctgcggcgtgggagcctcggcttttacaaggatgccaaggcagccagcgcgggagtgccataccacggagaagtgcctgtcagcctggccagggcccagggcagcgtcgcctttgattaccgaaagcgcaaacatgtcttcaagctgggcttacaggatggaaaagaatatttattccaggccaaggatgaggcagagatgagctcgtggctacgggtggtgaatgcagccattgccacagcgtcttctgcctctggagagcctgaagagccggtggtgcccagcaccacccggggcatgacccgggccatgaccatgcccccagtgtcacccgtcggggctgaggggcctgttgtgctccgcagcaaagacggcagagaacgagagcgagaaaaacgcttcagcttctttaagaagaacaagtagttgggggcaaggtcccaggccaactccctccctccgttcaggaaactgccagggacagtcgacagggaccgccctcttgtcaggacaactgcctgctgctagggtctgttgccaaggtcaacccatcaccaggaactgtcactggggacgagtccatgttcccaagggcagcccttctcttctgctgtttaattccagactggtggtgggacccaggtaaccccctctcccacccccgccgacttctcccctttccccagcctcgtgcctctgtccctcaccacggtgtggacagtgccgcaccctcaacataggccatgtggggagtggctgcccctgcctcagggtcattctcctgccatgcgagggcactcgccttctgccttctggttcctcacccctcagaccagccaggaacctctcagagctgaagcaggccctgggggcagaagtgccagatgacagtcagaggcgcaggagccctccctccccacccccaccctgtaactccagctgccactccatctccagctgctctcaatggcttccaggtgtgttgttcggggacagccaccgccttgagtctggccaaggaggtgattaaacagctcagcttctctc

SEQ ID NO: 20387 - DNA, 3498 bp, Homo sapiens
  misc_feature 1..3498: note = ENST00000617502
  source 1..3498: mol_type = unassigned DNA
ccactgagcagccaaccgcagcctctggccacaaggagagcggagcacaggagcaggaagccgcctaccaccatgagcagcacgctgtcacccacagactttgacagcttggaaatccagggccagtacagtgacatcaacaaccgctgggaccttcctgactcggactgggacaatgacagcagctcggcccgcctctttgagaggtctcgcattaaggctctggcagatgaacgagaagctgtgcagaagaaaaccttcaccaagtgggtaaactcgcacctggcccgggtcacgtgccgggtgggggacctgtacagcgacctccgggacggacgcaacctgctgaggctcctcgaggtgctctcgggagagatactgccaaagcctacaaagggccgcatgcggatccactgcctggagaacgtggacaaggcactgcagttcctcaaggagcagaaagtgcacttggaaaacatgggctcccatgacattgtggacggaaaccaccgactgacccttgggctggtctggaccatcatccttcgattccagatccaagacatcagtgtggagacagaagacaacaaggagaagaagtcagccaaggatgccctgcttctgtggtgccagatgaagactgcaggttatcccaacgtcaatgtacacaacttcaccaccagctggagagatggactagctttcaacgccatcgtgcataaacaccggccagacctgctggattttgagtctctgaagaagtgtaatgcacactataatctgcagaatgcattcaatctggctgaaaaggaactgggacttaccaagctgctggatcccgaagacgtgaatgtggaccagccagatgagaagtcaatcattacctatgtggctacttactaccattacttctccaagatgaaggccctggccgtggaaggcaagagaattggcaaggtgctggaccatgccatggaggcagagcgcctggtggagaaatacgagtccctggcctcggagctgctgcagtggatcgagcaaacgatcgtgaccctcaatgaccggcagttggccaactcccttagcggggtccagaaccagctgcagtccttcaactcctaccgcaccgtggagaagccgcccaagtttaccgagaaagggaacttggaagtgctgctcttcaccatccagagcaagcttcgggccaacaaccagaaggtctacacgccccgcgagggccggctcatctcggacatcaacaaggcttgggagcggctggagaaggcggagcacgagcgtgagctggccctgcgcaccgagctcatccgccaggagaagctggagcagctggccgcccgcttcgaccgcaaggctgccatgcgggagacctggctcagcgagaaccagcgcctcgtgtcccaggacaactttgggctggagctggcagctgtcgaggcagcagtacggaagcacgaagccattgagacggacatcgtggcctacagcggccgggtgcaggcagtggacgccgtggctgcagagctggccgccgagcgctaccacgacatcaagcgcatcgccgctcggcagcacaacgtggcacggctctgggacttcttgcggcagatggtggccgcccggcgggagcggctcctcctcaacctggagctgcagaaggtgttccaggacctgctctacctcatggactggatggaagagatgaagggccggctgcagtctcaggacctgggcaggcacctagcaggagtggaggacctgctgcagctgcacgagctggtggaggcagacatcgccgtgcaggccgagagggtgcgggccgtcagcgcctctgccctgcgcttctgcaacccagggaaagagtatagaccttgcgacccgcagctggtgtcggagcgggttgcaaagcttactgcgctagaggagcgggagaaggagcgaaagagaaagagggaggaggaggagcggcggaaacagccgcctgctcccgaacccacagccagtgtgcctccaggggacctggtgggcggccagacagcttctgacaccacctgggacggaacccagccacggccaccaccatccacacaagcacccagtgttaatggagtctgcacagatggagagccctcacagcccctgctgggacaacagagacttgagcacagcagcttccccgaagggccgggacctggctcaggggacgaagccaatgggccccggggagagaggcagacccggactcggggcccggccccatctgcaatgccccagagcaggtctaccgagtcagcccatgctgccaccctgccgcctcgaggcccagagccatctgcccaggagcagatggaggggatgctgtgccgcaagcaggagatggaggccttcgggaagaaggctgccaacaggtcctggcagaacgtgtactgtgtcctgcggcgtgggagcctcggcttttacaaggatgccaaggcagccagcgcgggagtgccataccacggagaagtgcctgtcagcctggccagggcccagggcagcgtcgcctttgattaccgaaagcgcaaacatgtcttcaagctgggcttacaggatggaaaagaatatttattccaggccaaggatgaggcagagatgagctcgtggctacgggtggtgaatgcagccattgccacagcgtcttctgcctctggagagcctgaagagccggtggtgcccagcaccacccggggcatgacccgggccatgaccatgcccccagtgtcacccgtcggggctgaggggcctgttgtgctccgcagcaaagacggcagagaacgagagcgagaaaaacgcttcagcttctttaagaagaacaagtagttgggggcaaggtcccaggccaactccctccctccgttcaggaaactgccagggacagtcgacagggaccgccctcttgtcaggacaactgcctgctgctagggtctgttgccaaggtcaacccatcaccaggaactgtcactggggacgagtccatgttcccaagggcagcccttctcttctgctgtttaattccagactggtggtgggacccaggtaaccccctctcccacccccgccgacttctcccctttccccagcctcgtgcctctgtccctcaccacggtgtggacagtgccgcaccctcaacataggccatgtggggagtggctgcccctgcctcagggtcattctcctgccatgcgagggcactcgccttctgccttctggttcctcacccctcagaccagccaggaacctctcagagctgaagcaggccctgggggcagaagtgccagatgacagtcagaggcgcaggagccctccctccccacccccaccctgtaactccagctgccactccatctccagctgctctcaatggcttccaggtgtgttgttcggggacagccaccgccttgagtctggccaaggaggtgattaaacagctcagcttctctc

SEQ ID NO: 20388 - DNA, 2890 bp, Homo sapiens
  misc_feature 1..2890: note = ENST00000611817
  source 1..2890: mol_type = unassigned DNA
cacaaggagagcggagcacaggagcaggaagccgcctaccaccatgagcagcacgctgtcacccacagactttgacagcttggaaatccagggccagtacagtgacatcaacaaccgctgggaccttcctgactcggactgggacaatgacagcagctcggcccgcctctttgagaggtctcgcattaaggctctggcagatgaacgagaagctgtgcagaagaaaaccttcaccaagtgggtaaactcgcacctggcccgggtcacgtgccgggtgggggacctgtacagcgacctccgggacggacgcaacctgctgaggctcctcgaggtgctctcgggagagatactgccaaagcctacaaagggccgcatgcggatccactgcctggagaacgtggacaaggcactgcagttcctcaaggagcagaaagtgcacttggaaaacatgggctcccatgacattgtggacggaaaccaccgactgacccttgggctggtctggaccatcatccttcgattccagatccaagacatcagtgtggagacagaagacaacaaggagaagaagtcagccaaggatgccctgcttctgtggtgccagatgaagactgcaggttatcccaacgtcaatgtacacaacttcaccaccagctggagagatggactagctttcaacgccatcgtgcataaacaccggccagacctgctggattttgagtctctgaagaagtgtaatgcacactataatctgcagaatgcattcaatctggctgaaaaggaactgggacttaccaagctgctggatcccgaagacgtgaatgtggaccagccagatgagaagtcaatcattacctatgtggctacttactaccattacttctccaagatgaaggccctggccgtggaaggcaagagaattggcaaggtgctggaccatgccatggaggcagagcgcctggtggagaaatacgagtccctggcctcggagctgctgcagtggatcgagcaaacgatcgtgaccctcaatgaccggcagttggccaactcccttagcggggtccagaaccagctgcagtccttcaactcctaccgcaccgtggagaagccgcccaagtttaccgagaaagggaacttggaagtgctgctcttcaccatccagagcaagcttcgggccaacaaccagaaggtctacacgccccgcgagggccggctcatctcggacatcaacaaggcttgggagcggctggagaaggcggagcacgagcgtgagctggccctgcgcaccgagctcatccgccaggagaagctggagcagctggccgcccgcttcgaccgcaaggctgccatgcgggagacctggctcagcgagaaccagcgcctcgtgtcccaggacaactttgggctggagctggcagctgtcgaggcagcagtacggaagcacgaagccattgagacggacatcgtggcctacagcggccgggtgcaggcagtggacgccgtggctgcagagctggccgccgagcgctaccacgacatcaagcgcatcgccgctcggcagcacaacgtggcacggctctgggacttcttgcggcagatggtggccgcccggcgggagcggctcctcctcaacctggagctgcagaaggtgttccaggacctgctctacctcatggactggatggaagagatgaagggccggctgcagtctcaggacctgggcaggcacctagcaggagtggaggacctgctgcagctgcacgagctggtggaggcagacatcgccgtgcaggccgagagggtgcgggccgtcagcgcctctgccctgcgcttctgcaacccagggaaagagtatagaccttgcgacccgcagctggtgtcggagcgggtggccaagcttactgcgctagaggagcgggagaaggagcgaaagagaaagagggaggaggaggagcggcggaaacagccgcctgctcccgaacccacagccagtgtgcctccaggggacctggtgggcggccagacagcttctgacaccacctgggacggaacccagccacggccaccaccatccacacaagcacccagtgttaatggagtctgcacagatggagagccctcacagcccctgctgggacaacagagacttgagcacagcagcttccccgaagggccgggacctggctcaggggacgaagccaatgggccccggggagagaggcagacccggactcggggcccggccccatctgcaatgccccagagcaggtctaccgagtcagcccatgctgccaccctgccgcctcgaggcccagagccatctgcccaggagcagatggaggggatgctgtgccgcaagcaggagatggaggccttcgggaagaaggctgccaacaggtcctggcagaacgtgtactgtgtcctgcggcgtgggagcctcggcttttacaaggatgccaaggcagccagcgcgggagtgccataccacggagaagtgcctgtcagcctggccagggcccagggcagcgtcgcctttgattaccgaaagcgcaaacatgtcttcaagctgggcttacaggatggaaaagaatatttattccaggccaaggatgaggcagagatgagctcgtggctacgggtggtgaatgcagccattgccacagcgtcttctgcctctggagagcctgaagagccggtggtgcccagcaccacccggggcatgacccgggccatgaccatgcccccagtgtcacccgtcggggctgaggggcctgttgtgctccgcagcaaagacggcagagaacgagagcgagaaaaacgcttcagcttctttaagaagaacaagtagttgggggcaaggtcccaggccaactccctccctccgttcagg

SEQ ID NO: 20389 - DNA, 5754 bp, Homo sapiens
  misc_feature 1..5754: note = ENST00000336349
  source 1..5754: mol_type = unassigned DNA
taaaagcggaagttacgcagggactcgcgagcgctgtggcggccctgaaaggatataggccgtggagggaagggggcgggcagacggcataggaaggcgccggaagtggtcccgcagaggcggggtgggagtggggctcccgaggcagtgcagttggctgtagctgggcgcctcggttaggtgcgctgtcagtcctttccgagtgcctggcccagtctctcccgcctcggcccaacatggacttcagagaaattctcatgatagcttccaagggacaaggtgtcaacaatgtgccgaaaaggtatagtttggcagtggggcctccaaaaaaagacccaaaagttaaaggtgtccaatcagcagctgtacaagcttttcttaaaaggaaagaagaggagctgagacgaaaagccttagaggagaaaaggagaaaagaggaactagtgaaaaagcgaattgagctcaaacatgacaagaaagcaagagctatggccaagaggacaaaggataatttccatggttacaatgggattcctattgaggaaaagtcaaagaagaggcaggcaacagaaagccataccagccaaggaaccgaccgagagtatgaaatggaagaagagaatgaattcctcgagtacaatcacgcagagtcagagcaggagtatgaggaagagcaagaacctcccaaagttgaaagcaaaccaaaggtcccccttaaaagtgccccaccacccatgaacttcactgatttactcaggctggctgagaaaaagcagtttgaaccagtggaaatcaaggtagtgaagaaatcagaagagcgacctatgaccgcagaagaacttagggagcgagaattccttgaacgaaagcataggagaaaaaaacttgagacagatggaaaactacctccaactgtgtccaaaaaggcaccctctcagaaagaaagtgtgggcacaaaacttagcaaaggttctggagacaggcatccttcttccaaaggaatgccccttcctcatgctgagaagaaatcaagacccagcatggccaatgagaaacacctcgctttgtcttcatccaaatccatgccaggagagaggatcaaggcaggatctggcaatagctcccaaccctcacttcgtgagggccacgacaaacctgtttttaatggagctggaaagcctcattccagcacctcttcaccaagtgtcccaaagacttctgctagcaggactcagaaatctgctgttgagcacaaagccaaaaaatctctgtcccatcctagccattccaggcctgggcccatggtcaccccacacaataaggctaagagtccaggtgtcaggcagccaggcagcagctctagctcagcccctgggcagcccagcacaggggttgctcgacccacagttagttctggccctgtgcctaggcgccagaatggcagctccagctcaggacctgagcgatcaatcagtgggtccaagaagccaaccaatgactcaaatccctctaggcggacagtcagtggtacatgtggccctggacaacctgcaagcagctcaggtggccctgggcgacccatcagtggttcagttagttctgcaagacccttgggcagctctcgtggccctggccggcctgtgagcagtccacatgaacttcgacgaccagtgagtggcttgggccccccggggcggtctgtcagtggccctgggagatccataagtggctcaattccagctggacggactgtcagtaattcagtcccaggaagaccagtgagcagcttgggacctgggcaaacagttagtagctcaggtcccactataaagcctaagtgcactgttgtctccgaaacaatttcttccaagaatatcattagccggtccagcaatggacagatgaatggaatgaagcctcccctatctggctacagagctgcccaaggtcctcaaaggcttcccttccctactggttacaaaaggcagcgagaatatgaagaggaagatgacgatgatgatgaatacgactctgaaatggaagattttattgaagatgaaggagagcctcaggaagaaatatccaagcacattagagaaatctttggttatgaccgaaaaaaatacaaagatgaaagtgattatgccttacgttacatggaaagtagttggaaagagcagcagaaggaagaagcaaagagcttaagactgggtatgcaagaggacttagaggaaatgagacgtgaagaagaagaaatgcaacgtcgaagggccaagaagctgaagaggcgttagctgctgcttttatttttgtgaaattctagagctgctctgctgcaaggatttcctgccttcagactgaagaagcccccttatcattttagatttatacttgggtactcaaggagaaggaatgcatactgtcatttgcaggctgtcatttgagcataaaatattttcagatattttccagggtgaaatctgtaatgcagatgatataatgcccacttgtgctcttatgaagttaactgttcacagatgccagccttgatcctgatgagctatgcactctaatgtggggccactcaccagtcagccaatcttttattgttcctttgctactttgaaaggaaaaaaaaggttgtctcttgatttctgtaattcttctgctgatctgtgagtagggcactgccctgctcccaatcaaacttagtctttttatgagaaacctggaccttccatgaatgttgccagcaataaagtgacttgtcctaatctatggattgagaacttgaaaatgtagagtagaatttataactatcatatggatgtcatcctgtgactttgaagtacaaagtagaataaattctgtattcatggattggatgctgagcattcttactcattaatttaggtggctaggaattaatgaaaaaattttcaagttaaaatacaggttataacagtataatattcttttctaagttttcctttcagatttactgttatgttggctttagtgtaagacaaggtcactgtgctgattgatttttatctaaaaaaattcatttttatatcgaagaaaaaatattttattcaaacattagatttgaaagagtaatagtttataaaataaggaagtaacatgtgaggctctcccctcctcccctcccccatcataaagatattttgaaatcccaaggtgccctcatacctcttgacattaatgacttcattttttagcttgaatttgttagcaaatattaatggcagaaaaccaaaaactaaatttatggtatcgagagcaccaccttctctttttgcccatattgcactttgatttcaaactatgcactgtgaagagatttttttccccaggtaggaagggatgttccctgttatcgttattttactgagctgtggaaactcatttttaccctttttaaagtcataaatatggacttaatagcccttaaccttcaagtccaagcagttccaatcaggctgacttaggatcatgctggaaggaagccaagtctcaagaactgtcagcaacagaaaatgagatatgatgctagagagcatttgtccttgactgtaagtacagaggcttaggggaagtgagacataagcttgtaggaataataaacgttctacaataaacgttttggctatcttaagccattgtatgggggggattaggaagtaggagggattgtcctacaacaggcccttatacttcaacagcccaaatattttggtttattcctttttatccataaagtctttattcttcaagtttgggtattatagattaccattgttagcctcccttaatgggaccatatgagccaggcttttaagacggactcattttgaattgagtttcaaactttgaaagtgcaaggatttaatttttaagttgaatcccatgaaaggtgtcatcatcactaggaataacaccctttgtaactacatatagaactgttacaatggtagcagaaaatcctattgatttcatctcacccatttcagataccttcagtgaaattaagggtagtgtgatgtcccatgtaataaaacaggcttagaacatcaattcctctgctgccatttatgtgcttttattcccccttcaaaaattttttattggatatatatatttttcagtattcagactctgaaatctgtcattacaatcaagtgcttgtcacagctgaaagatttctggtggcttaaagtttactagcagtaaatttatgatatggtacagttctttgtacagaaaggcaccattatgttagaataaatttccagaacttagtgggaagaatcaggttttaaccttgtgtgtctgttacttctgagtgcatttctataatataaatgttgatttgcgtcaacattataaaagagcacttctgtggctcatttaaaagaaaaaaaaggttaagtcttttaaattttggccttgtttccaaatcctgtcttccatgttgtttttctgcacttcctgaccactcttataaaaagctcacaaacctttgaagaaactggagtaggctgttatttcattaaggtttacaaattaaatgcttgatttttaatgtattctctactgttttgatttttggattttcttaattcaacatttgaagatgtgccttttgggtaatgttaatcacgaatgtagtaatatttcatgattgtaataatgttacatgatcatgggtgtggcattctctaacaaatgatgtgaaaggaaagtagttttcataaaactcatggctctgattgcacagtcccacttgcttttgatattgctatgtcaaagcaaagggcacttcttttaaggctactttcagaactttgtattttcgctaaactataaatgcagttgtgtccagttggaggccagggtaccacatgtcacaggcggccttacatgtgtgccgtgaaaaggttcaaagaccgttaacaaaaaagtaagtctggccgggcatggtggctcaagcctgtaatcccagcactttgggaggccgaggcgggcggatcacttgagaccaggagttcgagaccagcctggccaacatggtgtgagaccccgtctctactaaaaataaaaaaattagccgggtgcggtggcacacacctgtaatcccagctaccggggaggctgaggcaggagaatcgctagaacctgggaggcggaggttgcagtcagccaagatagcaccactgcactccaggctgggtgacagagcgagactccatgtcaaaaaaaaaagaatgtgggaactcaaattttcatttttaatgtaatccccaagattttctccaagaaataaattgttgttttgtattttgtaacttaaaagcagctattggtaaatttctgagatatagcaggagaccaaaacatgtttggaaagagaataaatatatgaagagagactggttgttttattttcaatgtattgaatatattagactactatttattttctgagtggatgtgattaaatattcagacgtttagtgtatgattaagagtgagatagagatttctttggagtaattaaatccatcctgtcttttacacaatggacaaatcaagttaaaaaaatttttagatagcttagcttgttttctggtgctgttgacctgcaagagaatatacttttgcatatacaggtgaaagttttgcaatttatgtatacaagaaattgtaggcattaaaaatattttattgata

SEQ ID NO: 20390 - DNA, 2167 bp, Homo sapiens
  misc_feature 1..2167: note = ENST00000536336
  source 1..2167: mol_type = unassigned DNA
agtggtcccgcagaggcggggtgggagtggggctcccgaggcagtgcagttggctgtagctgggcgcctcggttaggtgcgctgtcagtcctttccgagtgcctggcccagtctctcccgcctcggcccaacatggacttcagagaaattctcatgatagcttccaagggacaaggtgtcaacaatgtgccgaaaaggtatagtttggcagtggggcctccaaaaaaagacccaaaagttaaaggtgtccaatcagcagctgtacaagcttttcttaaaaggaaagaagaggagctgagacgaaaagccttagaggagaaaaggagaaaagaggaactagtgaaaaagcgaattgagctcaaacatgacaagaaagcaagagctatggccaagaggacaaaggataatttccatggttacaatgggattcctattgaggaaaagtcaaagaagaggcaggcaacagaaagccataccagccaaggaaccgaccgagagtatgaaatggaagaagagaatgaattcctcgagtacaatcacgcagagtcagagcaggagtatgaggaagagcaagaacctcccaaagttgaaagcaaaccaaaggtcccccttaaaagtgccccaccacccatgaacttcactgatttactcaggctggctgagaaaaagcagtttgaaccagtggaaatcaaggtagtgaagaaatcagaagagcgacctatgaccgcagaagaacttagggagcgagaattccttgaacgaaagcataggagaaaaaaacttgagacagatggaaaactacctccaactgtgtccaaaaaggcaccctctcagaaagaaagtgtgggcacaaaacttagcaaaggttctggagacaggcatccttcttccaaaggaatgccccttcctcatgctgagaagaaatcaagacccagcatggccaatgagaaacacctcgctttgtcttcatccaaatccatgccaggagagaggatcaaggcaggatctggcaatagctcccaaccctcacttcgtgagggccacgacaaacctgtttttaatggagctggaaagcctcattccagcacctcttcaccaagtgtcccaaagacttctgctagcaggactcagaaatctgctgttgagcacaaagccaaaaaatctctgtcccatcctagccattccaggcctgggcccatggtcaccccacacaataaggctaagagtccaggtgtcaggcagccaggcagcagctctagctcagcccctgggcagcccagcacaggggttgctcgacccacagttagttctggccctgtgcctaggcgccagaatggcagctccagctcaggacctgagcgatcaatcagtgggtccaagaagccaaccaatgactcaaatccctctaggcggacagtcagtggtacatgtggccctggacaacctgcaagcagctcaggtggccctgggcgacccatcagtggttcagttagttctgcaagacccttgggcagctctcgtggccctggccggcctgtgagcagtccacatgaacttcgacgaccagtgagtggcttgggccccccggggcggtctgtcagtggccctgggagatccataagtggctcaattccagctggacggactgtcagtaattcagtcccaggaagaccagtgagcagcttgggacctgggcaaacagttagtagctcaggtcccactataaagcctaagtgcactgttgtctccgaaacaatttcttccaagaatatcattagccggtccagcaatggacagatgaatggaatgaagcctcccctatctggctacagagctgcccaaggtcctcaaaggcttcccttccctactggttacaaaaggcagcgagaatatgaagaggaagatgacgatgatgatgaatacgactctgaaatggaagattttattgaagatgaaggagagcctcaggaagaaatatccaagcacattagagaaatctttggttatgaccgaaaaaagtaagactaaagaagattcagataactatgacatcctttttttattttgaataattcatgtcatggggtaataaactaatagtggaggcactgaatacaattcttaattaggaacccttgggtgattgttatttaaataaacgtactct

SEQ ID NO: 20391 - DNA, 543 bp, Homo sapiens
  misc_feature 1..543: note = ENST00000543776
  source 1..543: mol_type = unassigned DNA
aagtagcccaaaccccggctcgagatccgtctgttcagctgttgtggcgccgccgttttggatctaagcgcctacccgtgacacccagagaacccaggcctgaaaaggtatagtttggcagtggggcctccaaaaaaagacccaaaagttaaaggtgtccaatcagcagctgtacaagcttttcttaaaaggaaagaagaggagctgagacgaaaagccttagaggagaaaaggagaaaagaggaactagtgaaaaagcgaattgagctcaaacatgacaagaaagcaagagctatggccaagaggacaaaggataatttccatggttacaatgggattcctattgaggaaaagtcaaagaagaggcaggcaacagaaagccataccagccaaggaaccgaccgagagtatgaaatggaagaagagaatgaattcctcgagtacaatcacgcagagtcagagcaggagtatgaggaagagcaagaacctcccaaagttgaaagcaaaccaaaggtcccccttaaaagtgccccaccacccatg

SEQ ID NO: 20392 - DNA, 446 bp, Homo sapiens
  misc_feature 1..446: note = ENST00000497734
  source 1..446: mol_type = unassigned DNA
caaacaagtgcggccatttcaccagcccaggctggcttctgctgttgactggctgtggcacctcaagcagcccctttcccctctagcctcagtttatcaccgcaagagctaccattcatctagcacaacctgaccatcctcacactggtcagttccaaccttcccaggaatcttctgtggccatgttcactccggttttacagaacagagaacagaagctcagagaagtgaagcaacttgcccagctatgagagacagagccaggatttgaaaccagatgaggacgctgaggcccagagagggaaagccacttgcctagggacacacagcggggagaggtggagcagggcctctatttcgagacccctgactccacacctggtgtttgtgccaagaccccaggctgcctcccaggtcctctgggacagcccctgccttctaccagg

SEQ ID NO: 20393 - DNA, 4630 bp, Homo sapiens
  misc_feature 1..4630: note = ENST00000373578
  source 1..4630: mol_type = unassigned DNA
gccggagcggccaggccgccgtctgcccgtcccgctggacgtcccgcggtccgccctcccgtgcgtccgtctgccggtgagcccgcccgcccgccggcccagaacagagaacagaagctcagagaagtgaagcaacttgcccagctatgagagacagagccaggatttgaaaccagatgaggacgctgaggcccagagagggaaagccacttgcctagggacacacagcggggagaggtggagcagggcctctatttcgagacccctgactccacacctggtgtttgtgccaagaccccaggctgcctcccaggtcctctgggacagcccctgccttctaccaggaccatgggtagcaacaagagcaagcccaaggatgccagccagcggcgccgcagcctggagcccgccgagaacgtgcacggcgctggcgggggcgctttccccgcctcgcagacccccagcaagccagcctcggccgacggccaccgcggccccagcgcggccttcgcccccgcggccgccgagcccaagctgttcggaggcttcaactcctcggacaccgtcacctccccgcagagggcgggcccgctggccggtggagtgaccacctttgtggccctctatgactatgagtctaggacggagacagacctgtccttcaagaaaggcgagcggctccagattgtcaacaacacagagggagactggtggctggcccactcgctcagcacaggacagacaggctacatccccagcaactacgtggcgccctccgactccatccaggctgaggagtggtattttggcaagatcaccagacgggagtcagagcggttactgctcaatgcagagaacccgagagggaccttcctcgtgcgagaaagtgagaccacgaaaggtgcctactgcctctcagtgtctgacttcgacaacgccaagggcctcaacgtgaagcactacaagatccgcaagctggacagcggcggcttctacatcacctcccgcacccagttcaacagcctgcagcagctggtggcctactactccaaacacgccgatggcctgtgccaccgcctcaccaccgtgtgccccacgtccaagccgcagactcagggcctggccaaggatgcctgggagatccctcgggagtcgctgcggctggaggtcaagctgggccagggctgctttggcgaggtgtggatggggacctggaacggtaccaccagggtggccatcaaaaccctgaagcctggcacgatgtctccagaggccttcctgcaggaggcccaggtcatgaagaagctgaggcatgagaagctggtgcagttgtatgctgtggtttcagaggagcccatttacatcgtcacggagtacatgagcaaggggagtttgctggactttctcaagggggagacaggcaagtacctgcggctgcctcagctggtggacatggctgctcagatcgcctcaggcatggcgtacgtggagcggatgaactacgtccaccgggaccttcgtgcagccaacatcctggtgggagagaacctggtgtgcaaagtggcggactttgggctggctcggctcattgaagacaatgagtacacggcgcggcaaggtgccaaattccccatcaagtggacggctccagaagctgccctctatggccgcttcaccatcaagtcggacgtgtggtccttcgggatcctgctgactgagctcaccacaaagggacgggtgccctaccctgggatggtgaaccgcgaggtgctggaccaggtggagcggggctaccggatgccctgcccgccggagtgtcccgagtccctgcacgacctcatgtgccagtgctggcggaaggagcctgaggagcggcccaccttcgagtacctgcaggccttcctggaggactacttcacgtccaccgagccccagtaccagcccggggagaacctctaggcacaggcgggcccagaccggcttctcggcttggatcctgggctgggtggcccctgtctcggggcttgccccactctgcctgcctgctgttggtcctctctctgtggggctgaattgccaggggcgaggcccttcctctttggtggcatggaaggggcttctggacctagggtggcctgagagggcggtgggtatgcgagaccagcacggtgactctgtccagctcccgctgtggccgcacgcctctccctgcactccctcctggagctctgtgggtctctggaagaggaaccaggagaagggctggggccggggctgagggtgcccttttccagcctcagcctactccgctcactgaactccttccccacttctgtgccacccccggtctatgtcgagagctggccaaagagcctttccaaagaggagcgatgggcccctggccccgcctgcctgccaccctgccccttgccatccattctggaaacacctgtaggcagaggctgccgagacagaccctctgccgctgcttccaggctgggcagcacaaggccttgcctggcctgatgatggtgggtgggtgggatgagtaccccctcaaaccctgccctccttagacctgagggacccttcgagatcatcacttccttgcccccatttcacccatggggagacagttgagagcggggatgtgacatgcccaaggccacggagcagttcagagtggaggcgggcttggaacccggtgctccctctgtcatcctcaggaaccaacaattcgtcggaggcatcatggaaagactgggacagcccaggaaacaaggggtctgaggatgcattcgagatggcagattcccactgccgctgcccgctcagcccagctgttgggaacagcatggaggcagatgtggggctgagctggggaatcagggtaaaaggtgcaggtgtggagagagaggcttcaatcggcttgtgggtgatgtttgaccttcagagccagccggctatgaaagggagcgagcccctcggctctggaggcaatcaagcagacatagaagagccaagagtccaggaggccctggtcctggcctccttccccgtactttgtcccgtggcatttcaattcctggccctgttctcctccccaagtcggcaccctttaactcatgaggagggaaaagagtgcctaagcgggggtgaaagaggacgtgttacccactgccatgcaccaggactggctgtgtaaccttgggtggcccctgctgtctctctgggctgcagagtctgccccacatgtggccatggcctctgcaactgctcagctctggtccaggccctgtggcaggacacacatggtgagcctagccctgggacatcaggagactgggctctggctctgttcggcctttgggtgtgtggtggattctccctgggcctcagtgtgcccatctgtaaaggggcagctgacagtttgtggcatcttgccaagggtccctgtgtgtgtgtatgtgtgtgcatgtgtgcgtgtctccatgtgcgtccatatttaacatgtaaaaatgtcccccccgctccgtcccccaaacatgttgtacatttcaccatggccccctcatcatagcaataacattcccactgccaggggttcttgagccagccaggccctgccagtggggaaggaggccaagcagtgcctgcctatgaaatttcaacttttcctttcatacgtctttattacccaagtcttctcccgtccattccagtcaaatctgggctcactcaccccagcgagctctcaaatccctctccaactgcctaaggccctttgtgtaaggtgtcttaatactgtcctttttttttttttaacagtgttttgtagatttcagatgactatgcagaggcctgggggacccctggctctgggccgggcctggggctccgaaattccaaggcccagacttgcggggggtgggggggtatccagaattggttgtaaatactttgcatattgtctgattaaacacaaacagacctcagaatctgatcaacagtttattgaacatctactgtgtgctggaaagcgagatggggcggaatgcgagaacaaactaccccttgaggggtctttgggcagcactagtagctggagggcttcaggccaaggcaggggtgacatcagattggagacagctacggcagaatgtggctgtttgtgaacatctgcacctgtgttagggggtgagcacctgggagaaggacaaggcacatcacaggacttccctgagcatgacaagttcaggactcaaatgtccgtggtggatggtagcagtgacattggggagtgggtggggctgtcaagcctgcctagaggagatcacaaatacacgacgagaataccgttgtgtgtgctcttcgtgtgtttcctaggagtgcagggcaggggtgctgggtcgatccacaaaagtcctgaaaacgctgaagaaaaatccaaagacccttcccctcctccctccttccccaccaccgaagcacacagtcttgaaggttgatttgcaaccgtctatacaaacacatttattttacacaaatatacatcagatcacacacctgtgcaccggagtcaactctggccacgacattgcttaattaaaaacaaatttcaaaaactgga

SEQ ID NO: 20394 - DNA, 4321 bp, Homo sapiens
  misc_feature 1..4321: note = ENST00000373567
  source 1..4321: mol_type = unassigned DNA
catcgaggttttgagaggctaactctcccaaaaaggaccatgggtagcaacaagagcaagcccaaggatgccagccagcggcgccgcagcctggagcccgccgagaacgtgcacggcgctggcgggggcgctttccccgcctcgcagacccccagcaagccagcctcggccgacggccaccgcggccccagcgcggccttcgcccccgcggccgccgagcccaagctgttcggaggcttcaactcctcggacaccgtcacctccccgcagagggcgggcccgctggccggtggagtgaccacctttgtggccctctatgactatgagtctaggacggagacagacctgtccttcaagaaaggcgagcggctccagattgtcaacaacacagagggagactggtggctggcccactcgctcagcacaggacagacaggctacatccccagcaactacgtggcgccctccgactccatccaggctgaggagtggtattttggcaagatcaccagacgggagtcagagcggttactgctcaatgcagagaacccgagagggaccttcctcgtgcgagaaagtgagaccacgaaaggtgcctactgcctctcagtgtctgacttcgacaacgccaagggcctcaacgtgaagcactacaagatccgcaagctggacagcggcggcttctacatcacctcccgcacccagttcaacagcctgcagcagctggtggcctactactccaaacacgccgatggcctgtgccaccgcctcaccaccgtgtgccccacgtccaagccgcagactcagggcctggccaaggatgcctgggagatccctcgggagtcgctgcggctggaggtcaagctgggccagggctgctttggcgaggtgtggatggggacctggaacggtaccaccagggtggccatcaaaaccctgaagcctggcacgatgtctccagaggccttcctgcaggaggcccaggtcatgaagaagctgaggcatgagaagctggtgcagttgtatgctgtggtttcagaggagcccatttacatcgtcacggagtacatgagcaaggggagtttgctggactttctcaagggggagacaggcaagtacctgcggctgcctcagctggtggacatggctgctcagatcgcctcaggcatggcgtacgtggagcggatgaactacgtccaccgggaccttcgtgcagccaacatcctggtgggagagaacctggtgtgcaaagtggcggactttgggctggctcggctcattgaagacaatgagtacacggcgcggcaaggtgccaaattccccatcaagtggacggctccagaagctgccctctatggccgcttcaccatcaagtcggacgtgtggtccttcgggatcctgctgactgagctcaccacaaagggacgggtgccctaccctgggatggtgaaccgcgaggtgctggaccaggtggagcggggctaccggatgccctgcccgccggagtgtcccgagtccctgcacgacctcatgtgccagtgctggcggaaggagcctgaggagcggcccaccttcgagtacctgcaggccttcctggaggactacttcacgtccaccgagccccagtaccagcccggggagaacctctaggcacaggcgggcccagaccggcttctcggcttggatcctgggctgggtggcccctgtctcggggcttgccccactctgcctgcctgctgttggtcctctctctgtggggctgaattgccaggggcgaggcccttcctctttggtggcatggaaggggcttctggacctagggtggcctgagagggcggtgggtatgcgagaccagcacggtgactctgtccagctcccgctgtggccgcacgcctctccctgcactccctcctggagctctgtgggtctctggaagaggaaccaggagaagggctggggccggggctgagggtgcccttttccagcctcagcctactccgctcactgaactccttccccacttctgtgccacccccggtctatgtcgagagctggccaaagagcctttccaaagaggagcgatgggcccctggccccgcctgcctgccaccctgccccttgccatccattctggaaacacctgtaggcagaggctgccgagacagaccctctgccgctgcttccaggctgggcagcacaaggccttgcctggcctgatgatggtgggtgggtgggatgagtaccccctcaaaccctgccctccttagacctgagggacccttcgagatcatcacttccttgcccccatttcacccatggggagacagttgagagcggggatgtgacatgcccaaggccacggagcagttcagagtggaggcgggcttggaacccggtgctccctctgtcatcctcaggaaccaacaattcgtcggaggcatcatggaaagactgggacagcccaggaaacaaggggtctgaggatgcattcgagatggcagattcccactgccgctgcccgctcagcccagctgttgggaacagcatggaggcagatgtggggctgagctggggaatcagggtaaaaggtgcaggtgtggagagagaggcttcaatcggcttgtgggtgatgtttgaccttcagagccagccggctatgaaagggagcgagcccctcggctctggaggcaatcaagcagacatagaagagccaagagtccaggaggccctggtcctggcctccttccccgtactttgtcccgtggcatttcaattcctggccctgttctcctccccaagtcggcaccctttaactcatgaggagggaaaagagtgcctaagcgggggtgaaagaggacgtgttacccactgccatgcaccaggactggctgtgtaaccttgggtggcccctgctgtctctctgggctgcagagtctgccccacatgtggccatggcctctgcaactgctcagctctggtccaggccctgtggcaggacacacatggtgagcctagccctgggacatcaggagactgggctctggctctgttcggcctttgggtgtgtggtggattctccctgggcctcagtgtgcccatctgtaaaggggcagctgacagtttgtggcatcttgccaagggtccctgtgtgtgtgtatgtgtgtgcatgtgtgcgtgtctccatgtgcgtccatatttaacatgtaaaaatgtcccccccgctccgtcccccaaacatgttgtacatttcaccatggccccctcatcatagcaataacattcccactgccaggggttcttgagccagccaggccctgccagtggggaaggaggccaagcagtgcctgcctatgaaatttcaacttttcctttcatacgtctttattacccaagtcttctcccgtccattccagtcaaatctgggctcactcaccccagcgagctctcaaatccctctccaactgcctaaggccctttgtgtaaggtgtcttaatactgtcctttttttttttttaacagtgttttgtagatttcagatgactatgcagaggcctgggggacccctggctctgggccgggcctggggctccgaaattccaaggcccagacttgcggggggtgggggggtatccagaattggttgtaaatactttgcatattgtctgattaaacacaaacagacctcagaatctgatcaacagtttattgaacatctactgtgtgctggaaagcgagatggggcggaatgcgagaacaaactaccccttgaggggtctttgggcagcactagtagctggagggcttcaggccaaggcaggggtgacatcagattggagacagctacggcagaatgtggctgtttgtgaacatctgcacctgtgttagggggtgagcacctgggagaaggacaaggcacatcacaggacttccctgagcatgacaagttcaggactcaaatgtccgtggtggatggtagcagtgacattggggagtgggtggggctgtcaagcctgcctagaggagatcacaaatacacgacgagaataccgttgtgtgtgctcttcgtgtgtttcctaggagtgcagggcaggggtgctgggtcgatccacaaaagtcctgaaaacgctgaagaaaaatccaaagacccttcccctcctccctccttccccaccaccgaagcacacagtcttgaaggttgatttgcaaccgtctatacaaacacatttattttacacaaatatacatcagatcacacacctgtgcaccggagtcaactctggccacgacattgcttaattaaaaacaaatttcaaaaactgga

SEQ ID NO: 20395 - DNA, 4304 bp, Homo sapiens
  misc_feature 1..4304: note = ENST00000373558
  source 1..4304: mol_type = unassigned DNA
gaccatgggtagcaacaagagcaagcccaaggatgccagccagcggcgccgcagcctggagcccgccgagaacgtgcacggcgctggcgggggcgctttccccgcctcgcagacccccagcaagccagcctcggccgacggccaccgcggccccagcgcggccttcgcccccgcggccgccgagcccaagctgttcggaggcttcaactcctcggacaccgtcacctccccgcagagggcgggcccgctggccggtggagtgaccacctttgtggccctctatgactatgagtctaggacggagacagacctgtccttcaagaaaggcgagcggctccagattgtcaacaacacgaggaaggtggatgtcagagagggagactggtggctggcccactcgctcagcacaggacagacaggctacatccccagcaactacgtggcgccctccgactccatccaggctgaggagtggtattttggcaagatcaccagacgggagtcagagcggttactgctcaatgcagagaacccgagagggaccttcctcgtgcgagaaagtgagaccacgaaaggtgcctactgcctctcagtgtctgacttcgacaacgccaagggcctcaacgtgaagcactacaagatccgcaagctggacagcggcggcttctacatcacctcccgcacccagttcaacagcctgcagcagctggtggcctactactccaaacacgccgatggcctgtgccaccgcctcaccaccgtgtgccccacgtccaagccgcagactcagggcctggccaaggatgcctgggagatccctcgggagtcgctgcggctggaggtcaagctgggccagggctgctttggcgaggtgtggatggggacctggaacggtaccaccagggtggccatcaaaaccctgaagcctggcacgatgtctccagaggccttcctgcaggaggcccaggtcatgaagaagctgaggcatgagaagctggtgcagttgtatgctgtggtttcagaggagcccatttacatcgtcacggagtacatgagcaaggggagtttgctggactttctcaagggggagacaggcaagtacctgcggctgcctcagctggtggacatggctgctcagatcgcctcaggcatggcgtacgtggagcggatgaactacgtccaccgggaccttcgtgcagccaacatcctggtgggagagaacctggtgtgcaaagtggcggactttgggctggctcggctcattgaagacaatgagtacacggcgcggcaaggtgccaaattccccatcaagtggacggctccagaagctgccctctatggccgcttcaccatcaagtcggacgtgtggtccttcgggatcctgctgactgagctcaccacaaagggacgggtgccctaccctgggatggtgaaccgcgaggtgctggaccaggtggagcggggctaccggatgccctgcccgccggagtgtcccgagtccctgcacgacctcatgtgccagtgctggcggaaggagcctgaggagcggcccaccttcgagtacctgcaggccttcctggaggactacttcacgtccaccgagccccagtaccagcccggggagaacctctaggcacaggcgggcccagaccggcttctcggcttggatcctgggctgggtggcccctgtctcggggcttgccccactctgcctgcctgctgttggtcctctctctgtggggctgaattgccaggggcgaggcccttcctctttggtggcatggaaggggcttctggacctagggtggcctgagagggcggtgggtatgcgagaccagcacggtgactctgtccagctcccgctgtggccgcacgcctctccctgcactccctcctggagctctgtgggtctctggaagaggaaccaggagaagggctggggccggggctgagggtgcccttttccagcctcagcctactccgctcactgaactccttccccacttctgtgccacccccggtctatgtcgagagctggccaaagagcctttccaaagaggagcgatgggcccctggccccgcctgcctgccaccctgccccttgccatccattctggaaacacctgtaggcagaggctgccgagacagaccctctgccgctgcttccaggctgggcagcacaaggccttgcctggcctgatgatggtgggtgggtgggatgagtaccccctcaaaccctgccctccttagacctgagggacccttcgagatcatcacttccttgcccccatttcacccatggggagacagttgagagcggggatgtgacatgcccaaggccacggagcagttcagagtggaggcgggcttggaacccggtgctccctctgtcatcctcaggaaccaacaattcgtcggaggcatcatggaaagactgggacagcccaggaaacaaggggtctgaggatgcattcgagatggcagattcccactgccgctgcccgctcagcccagctgttgggaacagcatggaggcagatgtggggctgagctggggaatcagggtaaaaggtgcaggtgtggagagagaggcttcaatcggcttgtgggtgatgtttgaccttcagagccagccggctatgaaagggagcgagcccctcggctctggaggcaatcaagcagacatagaagagccaagagtccaggaggccctggtcctggcctccttccccgtactttgtcccgtggcatttcaattcctggccctgttctcctccccaagtcggcaccctttaactcatgaggagggaaaagagtgcctaagcgggggtgaaagaggacgtgttacccactgccatgcaccaggactggctgtgtaaccttgggtggcccctgctgtctctctgggctgcagagtctgccccacatgtggccatggcctctgcaactgctcagctctggtccaggccctgtggcaggacacacatggtgagcctagccctgggacatcaggagactgggctctggctctgttcggcctttgggtgtgtggtggattctccctgggcctcagtgtgcccatctgtaaaggggcagctgacagtttgtggcatcttgccaagggtccctgtgtgtgtgtatgtgtgtgcatgtgtgcgtgtctccatgtgcgtccatatttaacatgtaaaaatgtcccccccgctccgtcccccaaacatgttgtacatttcaccatggccccctcatcatagcaataacattcccactgccaggggttcttgagccagccaggccctgccagtggggaaggaggccaagcagtgcctgcctatgaaatttcaacttttcctttcatacgtctttattacccaagtcttctcccgtccattccagtcaaatctgggctcactcaccccagcgagctctcaaatccctctccaactgcctaaggccctttgtgtaaggtgtcttaatactgtcctttttttttttttaacagtgttttgtagatttcagatgactatgcagaggcctgggggacccctggctctgggccgggcctggggctccgaaattccaaggcccagacttgcggggggtgggggggtatccagaattggttgtaaatactttgcatattgtctgattaaacacaaacagacctcagaatctgatcaacagtttattgaacatctactgtgtgctggaaagcgagatggggcggaatgcgagaacaaactaccccttgaggggtctttgggcagcactagtagctggagggcttcaggccaaggcaggggtgacatcagattggagacagctacggcagaatgtggctgtttgtgaacatctgcacctgtgttagggggtgagcacctgggagaaggacaaggcacatcacaggacttccctgagcatgacaagttcaggactcaaatgtccgtggtggatggtagcagtgacattggggagtgggtggggctgtcaagcctgcctagaggagatcacaaatacacgacgagaataccgttgtgtgtgctcttcgtgtgtttcctaggagtgcagggcaggggtgctgggtcgatccacaaaagtcctgaaaacgctgaagaaaaatccaaagacccttcccctcctccctccttccccaccaccgaagcacacagtcttgaaggttgatttgcaaccgtctatacaaacacatttattttacacaaatatacatcagatcacacacctgtgcaccggagtcaactctggccacgacattgcttaattaaaaacaaatttcaaaaactgga

SEQ ID NO: 20396 - DNA, 461 bp, Homo sapiens
  misc_feature 1..461: note = ENST00000472968
  source 1..461: mol_type = unassigned DNA
cggccgccgagcccaagctgttcggaggcttcaactcctcggacaccgtcacctccccgcagagggcgggcccgctggccggtggagtgaccacctttgtggccctctatgactatgagtctaggacggagacagacctgtccttcaagaaaggcgagcggctccagattgtcaacaacacagagggagactggtggctggcccactcgctcagcacaggacagacaggctacatccccagcaactacgtggcgccctccgactccatccaggctgaggagtgagtaccgtctctggctgcctctacccgtcgtccctggacactgccggtgcagagtgcctctcctgggctggggtgggaggtctggctgtccagcgccccagccatatccagggagaagcactgtgagtgggcagaagcctggacagtcagcaccatcctccgtcctcccacccccagg

SEQ ID NO: 20397 - DNA, 551 bp, Homo sapiens
  misc_feature 1..551: note = ENST00000489153
  source 1..551: mol_type = unassigned DNA
atgctgtggggactcacgctggccccaccacctccctgggcctccctcagccactagagccctgagcacagcacctaggaggatggtgggcaccgggcttgtggctgacggctcccttctcctttcctccctccttctgtccctgctcagagagggagactggtggctggcccactcgctcagcacaggacagacaggctacatccccagcaactacgtggcgccctccgactccatccaggctgaggagtggtattttggcaagatcaccagacgggagtcagagcggttactgctcaatgcagagaacccgagagggaccttcctcgtgcgagaaagtgagaccacgaaaggtgcctactgcctctcagtgtctgacttcgacaacgccaagggcctcaacgtgaagcactacaagatccgcaagctggacagcggcggcttctacatcacctcccgcacccagttcaacagcctgcagcagctggtggcctactactccaaacacgccgatggcctgtgccaccgcctcaccaccgtgtgccccacgt

SEQ ID NO: 20398 - DNA, 3300 bp, Homo sapiens
  misc_feature 1..3300: note = ENST00000477066
  source 1..3300: mol_type = unassigned DNA
acttccccctcccccctcccttcctctctcctcccttttccctcctttccttgtctccttcttcttcctcttctttcccccagcccccctcctccctgtccccctctctccctgctccacgcagtgtcccactgcccgcctttctctgcagctggctggtatggagggggctgccctgaggagccccagagtaagctggaagggaggggacagaggctggtgtcatttgtctctgtagccctaggaccggtctgaaccggttgctgggagaggaggagggggcggccagatcgattgcagcaaagagggaagagagcggcagagggagctcgcggggcttgcgtgctggaacacgccgatggcctgtgccaccgcctcaccaccgtgtgccccacgtccaagccgcagactcagggcctggccaaggatgcctgggagatccctcgggagtcgctgcggctggaggtcaagctgggccagggctgctttggcgaggtgtggatggggacctggaacggtaccaccagggtggccatcaaaaccctgaagcctggcacgatgtctccagaggccttcctgcaggaggcccaggtcatgaagaagctgaggcatgagaagctggtgcagttgtatgctgtggtttcagaggagcccatttacatcgtcacggagtacatgagcaaggggagtttgctggactttctcaagggggagacaggcaagtacctgcggctgcctcagctggtggacatggctgctcagatcgcctcaggcatggcgtacgtggagcggatgaactacgtccaccgggaccttcgtgcagccaacatcctggtgggagagaacctggtgtgcaaagtggcggactttgggctggctcggctcattgaagacaatgagtacacggcgcggcaaggtgccaaattccccatcaagtggacggctccagaagctgccctctatggccgcttcaccatcaagtcggacgtgtggtccttcgggatcctgctgactgagctcaccacaaagggacgggtgccctaccctgggatggtgaaccgcgaggtgctggaccaggtggagcggggctaccggatgccctgcccgccggagtgtcccgagtccctgcacgacctcatgtgccagtgctggcggaaggagcctgaggagcggcccaccttcgagtacctgcaggccttcctggaggactacttcacgtccaccgagccccagtaccagcccggggagaacctctaggcacaggcgggcccagaccggcttctcggcttggatcctgggctgggtggcccctgtctcggggcttgccccactctgcctgcctgctgttggtcctctctctgtggggctgaattgccaggggcgaggcccttcctctttggtggcatggaaggggcttctggacctagggtggcctgagagggcggtgggtatgcgagaccagcacggtgactctgtccagctcccgctgtggccgcacgcctctccctgcactccctcctggagctctgtgggtctctggaagaggaaccaggagaagggctggggccggggctgagggtgcccttttccagcctcagcctactccgctcactgaactccttccccacttctgtgccacccccggtctatgtcgagagctggccaaagagcctttccaaagaggagcgatgggcccctggccccgcctgcctgccaccctgccccttgccatccattctggaaacacctgtaggcagaggctgccgagacagaccctctgccgctgcttccaggctgggcagcacaaggccttgcctggcctgatgatggtgggtgggtgggatgagtaccccctcaaaccctgccctccttagacctgagggacccttcgagatcatcacttccttgcccccatttcacccatggggagacagttgagagcggggatgtgacatgcccaaggccacggagcagttcagagtggaggcgggcttggaacccggtgctccctctgtcatcctcaggaaccaacaattcgtcggaggcatcatggaaagactgggacagcccaggaaacaaggggtctgaggatgcattcgagatggcagattcccactgccgctgcccgctcagcccagctgttgggaacagcatggaggcagatgtggggctgagctggggaatcagggtaaaaggtgcaggtgtggagagagaggcttcaatcggcttgtgggtgatgtttgaccttcagagccagccggctatgaaagggagcgagcccctcggctctggaggcaatcaagcagacatagaagagccaagagtccaggaggccctggtcctggcctccttccccgtactttgtcccgtggcatttcaattcctggccctgttctcctccccaagtcggcaccctttaactcatgaggagggaaaagagtgcctaagcgggggtgaaagaggacgtgttacccactgccatgcaccaggactggctgtgtaaccttgggtggcccctgctgtctctctgggctgcagagtctgccccacatgtggccatggcctctgcaactgctcagctctggtccaggccctgtggcaggacacacatggtgagcctagccctgggacatcaggagactgggctctggctctgttcggcctttgggtgtgtggtggattctccctgggcctcagtgtgcccatctgtaaaggggcagctgacagtttgtggcatcttgccaagggtccctgtgtgtgtgtatgtgtgtgcatgtgtgcgtgtctccatgtgcgtccatatttaacatgtaaaaatgtcccccccgctccgtcccccaaacatgttgtacatttcaccatggccccctcatcatagcaataacattcccactgccaggggttcttgagccagccaggccctgccagtggggaaggaggccaagcagtgcctgcctatgaaatttcaacttttcctttcatacgtctttattacccaagtcttctcccgtccattccagtcaaatctgggctcactcaccccagcgagctctcaaatccctctccaactgcctaaggccctttgtgtaaggtgtcttaatactgtcctttttttttttttaacagtgttttgtagatttcagatgactatgcagaggcctgggggacccctggctctgggccgggcctggggctccgaaattccaaggcccagacttgcggggggtgggggggtatccagaattggttgtaaatactttgcatattgtctgattaaacacaaacagacctcagaatctg

SEQ ID NO: 20399 - DNA, 502 bp, Homo sapiens
  misc_feature 1..502: note = ENST00000467556
  source 1..502: mol_type = unassigned DNA
aaccctgaagcctggcacgatgtctccagaggccttcctgcaggaggcccaggtcatgaagaagctgaggcatgagaagctggtgcagttgtatgctgtggtttcagaggagcccatttacatcgtcacggagtacatgagcaaggggagtttgctggactttctcaagggggagacaggcaagtacctgcggctgcctcagctggtggacatggctgctcaggtgagtcagcccctcccgcctccccacacccttggtcctcaagcacccagacccatctggtgcagccagttctggcctcttgagtgccccctccaagaagcctgccttgattgcctccacactcactgatcttgccgcacgtatttaccaggtctgcttacaggtgccctgaggggtgattctgggcagcagaaggcccttacctgggcatcaggggtcactgacttactgtgggacctcgggcctcagttgtcgtctctgtaaaggtcatttagtcgc

SEQ ID NO: 20400 - DNA, 584 bp, Homo sapiens
  misc_feature 1..584: note = ENST00000477475
  source 1..584: mol_type = unassigned DNA
ttcagaggagcccatttacatcgtcacggagtacatgagcaaggggagtttgctggactttctcaagggggagacaggcaagtacctgcggctgcctcagctggtggacatggctgctcaggtctgcttacaggtgccctgaggggtgattctgggcagcagaaggcccttacctgggcatcaggggtcactgacttactgtgggacctcgggcctcagttgtcgtctctgtaaaggtcatttagtcgcttagcagacgtgttcatgcttgctgtaggcagtggtcaacaagcctttttttttttcatttaatcctcatcacgaccaggagtgacgaggattggctgttattcccattggacggatgagaaaactgaggctcagagaggggacttgggcagcaggcaggacctggcactcatctgtgtctgggtccgctggggcctctttccctggtcacctcgctttcctggctgcatcggatctcgtgcctcccctttgacctttgccttctgccctctgctctgtgccctgtgctccctactcccgcagagcactgctcctgctttcgatgccaacagcat

SEQ ID NO: 20401 - DNA, 559 bp, Homo sapiens
  misc_feature 1..559: note = ENST00000493775
  source 1..559: mol_type = unassigned DNA
ttgcctgaagaagtgtggggagggtggggaaggggtggttggctctccagccccagagtgctctgtggccctgggagggcatgggtggcacctgagccaggctcccacggttccgcctgcagatcgcctcaggcatggcgtacgtggagcggatgaactacgtccaccgggaccttcgtgcagccaacatcctggtgggagagaacctggtgtgcaaagtggcggactttgggctggctcggctcattgaagacaatgagtacacggcgcggcaaggtgccaaattccccatcaagtggacggctccagaagctgccctctatggccgcttcaccatcaagtcggacgtgtggtccttcgggatcctgctgactgagctcaccacaaagggacgggtgccctaccctggtaagaaggtcctcatggcctgtctgtggtccctgaatccctctgccctggtggccttgggcaagtcatgactcctgctgggcctgtttccccacccgtaaaacaaagaagttgagcgtctgatgttaggctctctcgatggtccatgctc

SEQ ID NO: 20402 - DNA, 3851 bp, Homo sapiens
  misc_feature 1..3851: note = ENST00000358208
  source 1..3851: mol_type = unassigned DNA
atccctgctttgcagatgaggacgctgaggcccagagagggaaagccacttgcctagggacacacagcggggagaggtggagcagggcctctatttcgagacccctgactccacacctggtgtttgtgccaagaccccaggctgcctcccaggtcctctgggacagcccctgccttctaccaggaccatgggtagcaacaagagcaagcccaaggatgccagccagcggcgccgcagcctggagcccgccgagaacgtgcacggcgctggcgggggcgctttccccgcctcgcagacccccagcaagccagcctcggccgacggccaccgcggccccagcgcggccttcgcccccgcggccgccgagcccaagctgttcggaggcttcaactcctcggacaccgtcacctccccgcagagggcgggcccgctggccggtggagtgaccacctttgtggccctctatgactatgagtctaggacggagacagacctgtccttcaagaaaggcgagcggctccagattgtcaacaacacagagggagactggtggctggcccactcgctcagcacaggacagacaggctacatccccagcaactacgtggcgccctccgactccatccaggctgaggagtggtattttggcaagatcaccagacgggagtcagagcggttactgctcaatgcagagaacccgagagggaccttcctcgtgcgagaaagtgagaccacgaaaggtgcctactgcctctcagtgtctgacttcgacaacgccaagggcctcaacgtgaagcactacaagatccgcaagctggacagcggcggcttctacatcacctcccgcacccagttcaacagcctgcagcagctggtggcctactactccaaacacgccgatggcctgtgccaccgcctcaccaccgtgtgccccacgtccaagccgcagactcagggcctggccaaggatgcctgggagatccctcgggagtcgctgcggctggaggtcaagctgggccagggctgctttggcgaggtgtggatggggacctggaacggtaccaccagggtggccatcaaaaccctgaagcctggcacgatgtctccagaggccttcctgcaggaggcccaggtcatgaagaagctgaggcatgagaagctggtgcagttgtatgctgtggtttcagaggagcccatttacatcgtcacggagtacatgagcaaggggagtttgctggactttctcaagggggagacaggcaagtacctgcggctgcctcagctggtggacatggctgctcagatcgcctcaggcatggcgtacgtggagcggatgaactacgtccaccgggaccttcgtgcagccaacatcctggtgggagagaacctggtgtgcaaagtggcggactttgggctggctcggctcattgaagacaatgagtacacggcgcggcaaggtgccaaattccccatcaagtggacggctccagaagctgccctctatggccgcttcaccatcaagtcggacgtgtggtccttcgggatcctgctgactgagctcaccacaaagggacgggtgccctaccctgggatggtgaaccgcgaggtgctggaccaggtggagcggggctaccggatgccctgcccgccggagtgtcccgagtccctgcacgacctcatgtgccagtgctggcggaaggagcctgaggagcggcccaccttcgagtacctgcaggccttcctggaggactacttcacgtccaccgagccccagtaccagcccggggagaacctctaggcacaggcgggcccagaccggcttctcggcttggatcctgggctgggtggcccctgtctcggggcttgccccactctgcctgcctgctgttggtcctctctctgtggggctgaattgccaggggcgaggcccttcctctttggtggcatggaaggggcttctggacctagggtggcctgagagggcggtgggtatgcgagaccagcacggtgactctgtccagctcccgctgtggccgcacgcctctccctgcactccctcctggagctctgtgggtctctggaagaggaaccaggagaagggctggggccggggctgagggtgcccttttccagcctcagcctactccgctcactgaactccttccccacttctgtgccacccccggtctatgtcgagagctggccaaagagcctttccaaagaggagcgatgggcccctggccccgcctgcctgccaccctgccccttgccatccattctggaaacacctgtaggcagaggctgccgagacagaccctctgccgctgcttccaggctgggcagcacaaggccttgcctggcctgatgatggtgggtgggtgggatgagtaccccctcaaaccctgccctccttagacctgagggacccttcgagatcatcacttccttgcccccatttcacccatggggagacagttgagagcggggatgtgacatgcccaaggccacggagcagttcagagtggaggcgggcttggaacccggtgctccctctgtcatcctcaggaaccaacaattcgtcggaggcatcatggaaagactgggacagcccaggaaacaaggggtctgaggatgcattcgagatggcagattcccactgccgctgcccgctcagcccagctgttgggaacagcatggaggcagatgtggggctgagctggggaatcagggtaaaaggtgcaggtgtggagagagaggcttcaatcggcttgtgggtgatgtttgaccttcagagccagccggctatgaaagggagcgagcccctcggctctggaggcaatcaagcagacatagaagagccaagagtccaggaggccctggtcctggcctccttccccgtactttgtcccgtggcatttcaattcctggccctgttctcctccccaagtcggcaccctttaactcatgaggagggaaaagagtgcctaagcgggggtgaaagaggacgtgttacccactgccatgcaccaggactggctgtgtaaccttgggtggcccctgctgtctctctgggctgcagagtctgccccacatgtggccatggcctctgcaactgctcagctctggtccaggccctgtggcaggacacacatggtgagcctagccctgggacatcaggagactgggctctggctctgttcggcctttgggtgtgtggtggattctccctgggcctcagtgtgcccatctgtaaaggggcagctgacagtttgtggcatcttgccaagggtccctgtgtgtgtgtatgtgtgtgcatgtgtgcgtgtctccatgtgcgtccatatttaacatgtaaaaatgtcccccccgctccgtcccccaaacatgttgtacatttcaccatggccccctcatcatagcaataacattcccactgccaggggttcttgagccagccaggccctgccagtggggaaggaggccaagcagtgcctgcctatgaaatttcaacttttcctttcatacgtctttattacccaagtcttctcccgtccattccagtcaaatctgggctcactcaccccagcgagctctcaaatccctctccaactgcctaaggccctttgtgtaaggtgtcttaatactgtcctttttttttttttaacagtgttttgtagatttcagatgactatgcagaggcctgggggacccctggctctgggccgggcctggggctccgaaattccaaggcccagacttgcggggggtgggggggtatccagaattggttgtaaatactttgcatattgtctgattaaacacaaacagacctcagaatctgatcaacagtt

SEQ ID NO: 20403 - DNA, 7058 bp, Homo sapiens
  misc_feature 1..7058: note = ENST00000615049
  source 1..7058: mol_type = unassigned DNA
acactcgctctcgcacactcggtgacacgcccgcgcgcgcgctcacccacacgcccggccgccggcgccctcccagctggtccaccccggcggggcccgcgcccccggcccgcccgcctggcaccgcgccccggggctggggccgagcgaggagcccgcgaggcggcgagagggcgagcgccaggcaggccggcccggggcccccgccccccgcgcccccgcccgatggggaacgctccgtcccaagatccggagcggagcagcccccccatgctgtctgcggacgatgcggagtacccgcgggagtaccggaccctggggggcgggggcggcgggggcagcgggggccggcgcttctccaacgtggggctggtgcacacgtccgagcggcggcacacggtgatcgcggcccagagtctggaggcgctcagcgggctccagaaggcggacgccgaccgcaagcgtgatgccttcatggaccacctgaagagcaagtacccacagcacgccctggccctgcgaggccagcaggacaggatgcgagagcagccaaactactggagtttcaagacccgcagctcacgccacactcagggagcccagcccgggctggcagaccaggcggcaaagctgtcctacgcctccgccgagtcgctggagaccatgtcggaggccgagctgcccctgggcttcagcaggatgaaccgcttccgacagagcctgcctctctcccgctcggccagccagaccaagctgcgctccccaggggtgctgttcctgcagttcggggaggagactcggcgcgtgcacatcacgcacgaggtcagcagcctggacacgctgcacgcactcatcgcgcacatgttcccgcagaagctcaccatgggcatgcttaagtcgcccaataccgccatcctcatcaaagacgaggctcgcaacgtcttctacgagctggaggacgtccgggacatccaggaccgcagtattatcaagatctacagaaaggagcccctctacgctgccttccctggctcacatctcaccaacggggacctccggagagagatggtgtacgcatcgcgggagtcctcgcccacgcggcgcctcaacaacctgtcaccagcgccgcacctggcatccggctcgccgccgcccgggctgccgtcggggctgccgtccgggctgcagtccggttcgccgtcgcgttcgcgcctatcgtacgccggggggcgcccgccttcgtacgccggcagcccggtgcaccacgcggccgagaggctgggaggcgccccggccgcccagggcgtcagccccagccccagcgccatcctggagcggcgcgacgtgaagccggacgaggacctggcgagcaaggcgggcggcatggtgctggtgaaaggcgagggcctctatgctgacccctacgggctgctgcacgagggccgtctgagcctggccgcggccgccggcgacccgttcgcctacccgggcgccggcggcctctacaagcgcggctcggtgcgctcgctcagcacctactcggccgccgcgctgcagtccgatctggaggactccctgtacaaggcggcgggcggcggcggcccgctgtacggcgacggctacggcttccgcctgccgccttcgtcaccgcagaagctggccgacgtggcagcaccccccggaggtcccccgccaccgcacagcccctactcggggccgcccagccgcggctcgccagtgcgccagtccttccgcaaggactcgggctcctcgtccgtctttgccgagagtcctggagggaagacccgcagcgcggggagcgcctcgacggccggagctcccccttcggagctcttccctgggcctggggaacgctcgctggttgggttcgggccgccagtgccagccaaggacacggagaccagggagcgcatggaggccatggagaagcagattgccagcctcacaggcctggtgcagagcgccttactgcgaggctctgagcctgagacccccagcgagaagattgaaggctccaatggagcagccaccccctcagcaccctgtgggtcaggcggccggagcagcggggccaccccggtgtccggcccgcccccgccctcggccagcagcacccccgcaggtcagcctaccgccgttagccggctgcagatgcagcttcacctgcgaggcctgcagaacagcgccagtgacttgcgcggccagctccagcagttgcgcaagctccagctacagaaccaggagtcggtgcgcgcgctgctgaagcgcacggaggcagagctgagcatgcgcgtgtcggaggcggcgcggcggcaggaggacccgctgcagcggcagcgcaccctggtggaagaggaacggctgcgctatctcaacgacgaggagcttattacccagcagctcaatgacctggagaaatcggtggagaagatccagagagacgtgtcccacaaccaccggctggtgcccggccctgagctggaggagaaggcactggtgctgaagcagctcggggagacgctgacagagctcaaggctcacttcccgggcctgcagagcaagatgcgggtggtgctgcgcgtggaggtggaggcggtgaagttcctgaaggaggagccccagcgcctggatgggctcctcaagcgctgccgcggggtcacggacacgctggcccagatccgaaggcaagtggatgagggtgtgtggccaccccccaacaatctcctgagtcagtcccccaagaaggtgacggcagagactgacttcaacaagagcgtggacttcgaaatgccaccccccagccccccgctgaacctgcatgagctgagcgggccagctgaaggagcctctcttacccccaaggggggcaaccccaccaaaggcctggacactcctggcaagagaagcgtggacaaagctgtgtctgttgaggctgcagagcgagactgggaggagaagcgggcagccctgacccagtacagtgccaaggacatcaaccggctgctggaagagacacaggcagagctgctcaaggccatccctgacctggactgtgccagcaaggcccatccaggcccggcccccactccagatcacaagccccccaaggccccccacggccagaaggcagccccccgaacggagcccagtgggaggaggggctcagatgagttgaccgtgccccgataccgcacagagaagccctccaagtcgcccccaccgccccctccccgccggagcttcccctcctcccatggcctgaccaccacacgtaccggagaggtggtggtcaccagcaagaaggactcggccttcatcaagaaggctgagtccgaggagctggaggtgcagaagccccaggtgaagctgcgccgggctgtgtctgaggtggcccgcccagcctccacaccacccatcatggcctcggccatcaaggacgaggatgacgaggatcgcatcatcgcagagctagagagtggcggaggcagtgtaccacccatgaaggtggtgactccgggggcctctcggctgaaggcggcccagggccaggcgggcagccccgacaaaagcaaacatggcaagcagagggccgagtacatgcggatccaggcccagcagcaggccactaaaccatctaaagagatgagcgggtcgaatgagacctcgagcccagtctcagaaaagccctcggcttccagaacctctatccctgtattgacttcctttggggcaaggaattcttccatctccttctagaagcccctcaccccgctgccccgcctgtccccctccctcactcctgccatttctcccctctcttccttcatctccaccccaccccaccctactctccagacgccctgaggggtgtgccctgaagaggagggtgcggccctcctcagcgacccctacccatcatctgttggtgtttttggttttgtttttttttttttttttaacaattaacttttaattatctttttttaaacagtaaaactaaaaaccaaacacaccaccttccttgatcccagctggcctctcgctggccgcacctgtcacatctctccttcttctctttcaccactctttcccccagtccatcctgaagctcctgcacccccttcccgccttcccctcacttcccaagaatactccaaacaaactctgaaccacggagacttggagcagtgggagacccctctcccgtttctcgataccttcctggaggaacgcggggacatcggaccaacccatacatcaagccagagagcggggcttagggagactggccttggagatgccccactccctgtctaagctccgacaagactgtgacttcctctgtggctgctctgcctcctcccactcacacccaagtgggcctggagtagagacggacaggctggagacgaggccggagtttgagaggcctcagggtgggtgtgaggccatggagtctgtatccctggggaggcgctggcctcctgggccttgccgtccagtggggagtggagggcagaggccctttggtctgctggctgtggagggtgggttgcacggacagccggatatcggggacactgccttgggagagggcggcccggacgggtatttggtacttttagtttcctgatttagcactttaaatggcattaacttattgaatggggatggggtgggcaagagtgaggggcctagaaaaccaggttttgtggcttgcagttgggggaagggtctggtttgagggaaatgggagggtcgagaggggcttgacggggagcactgaagacacctgggacccgcaggtggggtgacttgaacttcagtcatcctcttggcaatttgagggttttcccaggaaaggatgagacgtagtttttcaatggggctctggtgaccctggtgagatgtctgaaggtccctgaggcctgaccatccagccagcgcccctggcctgtggacgccctgcctgccctgcagaggcggttggcagtgccgcctggcttttggccgggtcctggggaggcagagagaggccaattttggttctcactcctggccccccagagggcacagtgaggagccggtagggagaggataggagaagaggaggaggaggagcggggtccccggccgcaggattcccacttggagcacaaagtgaagtaagcacaggggagggggactagaatcagtcccccatagcaagcacagaaaggaggagctgcgcagaaggcagagccccccagaccctggggcctggctggggaaggtccgcacctggggagagctgggagctgttgaaggtttggggggaggggaaacgggttgtgtttcttcatttctttttttgtttttgcctttgttggttcatccttgttttctagctttggatcatttttgtaccaaggcgagcaagcctttttgaaaaataacaaaagaggaaaaaaaaaatccctcctggaaaaaaaaaaaaaccctggaaaatagaaaaaaaaaaaaggacctcataaatgatgcaattacttttaattgcaggcaactctttacatttaagtgaagtgtcttaacattttatattgttttaaaaatatatttacatattatatatataatatacgtaatataaatatatataaatatttaaaaaagaaaaaaaaaagaaaaccacggcactctccctggccactgttttggcgggggaggggggctggggggcgggcacgtcggcctggcttctgtggtcccagtgaaatggtctggtttgatttggctgtacagagaccccctgacttgggaggggaggggggagtggtgccccctcctccctccactccattactctctgcttgctacttcgcttgcccccagctcccaccctcagccctgtgactggaatgtgtgccccaccgtcattgtcctgagttgaatgtccctttgtgggggaggtggggggggcagtgtccatccacgaaggggcagaaggagggagccacgtgccccgccccacccgctcgggtgaagcccagtgggatttgcatctttctttctctttggttcctgcacatttatgggctgggaggcatccgtgtggaattgcgtgcagcctgtgtgtgtgctggcacaagcccatgcactgtgtgtgcagacgcatggggcctgcacccacaggcatggccgagcacatgtgtgggggaaggcgtgggcacataggtgcatgtaacctgtttgggcattggcacgtgcctacctgcatgttagcgtgagaggagctttgtgtgtgagaacatgtgtaatgtgtgtgcagacatgccgagagccagagacttgtgtgtgggccacgtacatgtggatagagacgcatacatggaggtgcatgtaatctgtgtctccgagtgtgtgtgtgcaggtatgtgtgctggtgcagacccaagtgtgtgggtgtgcctctgtgtgcgtgtgttccatcatccctgcaccactggctccagatcccttcctgagcccccgtccccgctggccctctcacagcctgcagcacatcagtgcccccagctgcatgcgcctcgctgctctgtccatcagtgtgtgcttgaccaagagaaaactaagacgtctcgggggacccctgtacctggtcctctcagcccccgcccactgtgctgtgttactcgcatgggggatttcctgccccttccacaatatgctgtttccccaggagcctcaggcctgaggctctgagtggggtccccagggggccccccggggtgagccccggctccacaccctgccccatccaccctgtagggcccatgttggtgtagcagtgatggcttctgtggatattctgtgacctctgtcggtgtaacttgacaatttctaaatggaaaagggttgctgtgttttctctgtctctcttttttaatgtccttttttcttctcccccgctccctgctctctttccttttcagtttttctagccaagtgtttggggctttaataaaacttgtttctttttcctctcctggatctccttc

SEQ ID NO: 20404 - DNA, 4644 bp, Homo sapiens
  misc_feature 1..4644: note = ENST00000631564
  source 1..4644: mol_type = unassigned DNA
ggcggggcccgcgcccccggcccgcccgcctggcaccgcgccccggggctggggccgagcgaggagcccgcgaggcggcgagagggcgagcgccaggcaggccggcccggggcccccgccccccgcgcccccgcccgatggggaacgctccgtcccaagatccggagcggagcagcccccccatgctgtctgcggacgatgcggagtacccgcgggagtaccggaccctggggggcgggggcggcgggggcagcgggggccggcgcttctccaacgtggggctggtgcacacgtccgagcggcggcacacggtgatcgcggcccagagtctggaggcgctcagcgggctccagaaggcggacgccgaccgcaagcgtgatgccttcatggaccacctgaagagcaagtacccacagcacgccctggccctgcgaggccagcaggacaggatgcgagagcaggttggcggctggaccgtggaccccgtatgcctcctcagctccctctgctcccacctccatggcgactccgccccctccggggctggccagccggcccagcagccaaactactggagtttcaagacccgcagctcacgccacactcagggagcccagcccgggctggcagaccaggcggcaaagctgtcctacgcctccgccgagtcgctggagaccatgtcggaggccgagctgcccctgggcttcagcaggatgaaccgcttccgacagagcctgcctctctcccgctcggccagccagaccaagctgcgctccccaggggtgctgttcctgcagttcggggaggagactcggcgcgtgcacatcacgcacgaggtcagcagcctggacacgctgcacgcactcatcgcgcacatgttcccgcagaagctcaccatgggcatgcttaagtcgcccaataccgccatcctcatcaaagacgaggctcgcaacgtcttctacgagctggaggacgtccgggacatccaggaccgcagtattatcaagatctacagaaaggagcccctctacgctgccttccctggctcacatctcaccaacggggacctccggagagagatggtgtacgcatcgcgggagtcctcgcccacgcggcgcctcaacaacctgtcaccagcgccgcacctggcatccggctcgccgccgcccgggctgccgtcggggctgccgtccgggctgcagtccggttcgccgtcgcgttcgcgcctatcgtacgccggggggcgcccgccttcgtacgccggcagcccggtgcaccacgcggccgagaggctgggaggcgccccggccgcccagggcgtcagccccagccccagcgccatcctggagcggcgcgacgtgaagccggacgaggacctggcgagcaaggcgggcggcatggtgctggtgaaaggcgagggcctctatgctgacccctacgggctgctgcacgagggccgtctgagcctggccgcggccgccggcgacccgttcgcctacccgggcgccggcggcctctacaagcgcggctcggtgcgctcgctcagcacctactcggccgccgcgctgcagtccgatctggaggactccctgtacaaggcggcgggcggcggcggcccgctgtacggcgacggctacggcttccgcctgccgccttcgtcaccgcagaagctggccgacgtggcagcaccccccggaggtcccccgccaccgcacagcccctactcggggccgcccagccgcggctcgccagtgcgccagtccttccgcaaggactcgggctcctcgtccgtctttgccgagagtcctggagggaagacccgcagcgcggggagcgcctcgacggccggagctcccccttcggagctcttccctgggcctggggaacgctcgctggttgggttcgggccgccagtgccagccaaggacacggagaccagggagcgcatggaggccatggagaagcagattgccagcctcacaggcctggtgcagagcgccttactgcgaggctctgagcctgagacccccagcgagaagattgaaggctccaatggagcagccaccccctcagcaccctgtgggtcaggcggccggagcagcggggccaccccggtgtccggcccgcccccgccctcggccagcagcacccccgcaggtcagcctaccgccgttagccggctgcagatgcagcttcacctgcgaggcctgcagaacagcgccagtgacttgcgcggccagctccagcagttgcgcaagctccagctacagaaccaggagtcggtgcgcgcgctgctgaagcgcacggaggcagagctgagcatgcgcgtgtcggaggcggcgcggcggcaggaggacccgctgcagcggcagcgcaccctggtggaagaggaacggctgcgctatctcaacgacgaggagcttattacccagcagctcaatgacctggagaaatcggtggagaagatccagagagacgtgtcccacaaccaccggctggtgcccggccctgagctggaggagaaggcactggtgctgaagcagctcggggagacgctgacagagctcaaggctcacttcccgggcctgcagagcaagatgcgggtggtgctgcgcgtggaggtggaggcggtgaagttcctgaaggaggagccccagcgcctggatgggctcctcaagcgctgccgcggggtcacggacacgctggcccagatccgaaggcaagtggatgagggtgtgtggccaccccccaacaatctcctgagtcagtcccccaagaaggtgacggcagagactgacttcaacaagagcgtggacttcgaaatgccaccccccagccccccgctgaacctgcatgagctgagcgggccagctgaaggagcctctcttacccccaaggggggcaaccccaccaaaggcctggacactcctggcaagagaagcgtggacaaagctgtgtctgttgaggctgcagagcgagactgggaggagaagcgggcagccctgacccagtacagtgccaaggacatcaaccggctgctggaagagacacaggcagagctgctcaaggccatccctgacctggactgtgccagcaaggcccatccaggcccggcccccactccagatcacaagccccccaaggccccccacggccagaaggcagccccccgaacggagcccagtgggaggaggggctcagatgagttgaccgtgccccgataccgcacagagaagccctccaagtcgcccccaccgccccctccccgccggagcttcccctcctcccatggcctgaccaccacacgtaccggagaggtggtggtcaccagcaagaaggactcggccttcatcaagaaggctgagtccgaggagctggaggtgcagaagccccaggtgaagctgcgccgggctgtgtctgaggtggcccgcccagcctccacaccacccatcatggcctcggccatcaaggacgaggatgacgaggatcgcatcatcgcagagctagagagtggcggaggcagtgtaccacccatgaaggtggtgactccgggggcctctcggctgaaggcggcccagggccaggcgggcagccccgacaaaagcaaacatggcaagcagagggccgagtacatgcggatccaggcccagcagcaggccactaaaccatctaaagagatgagcgggtcgaatgagacctcgagcccagtctcagaaaagccctcggcttccagaacctctatccctgtattgacttcctttggggcaaggaattcttccatctccttctagaagcccctcaccccgctgccccgcctgtccccctccctcactcctgccatttctcccctctcttccttcatctccaccccaccccaccctactctccagacgccctgaggggtgtgccctgaagaggagggtgcggccctcctcagcgacccctacccatcatctgttggtgtttttggttttgtttttttttttttttttaacaattaacttttaattatctttttttaaacagtaaaactaaaaaccaaacacaccaccttccttgatcccagctggcctctcgctggccgcacctgtcacatctctccttcttctctttcaccactctttcccccagtccatcctgaagctcctgcacccccttcccgccttcccctcacttcccaagaatactccaaacaaactctgaaccacggagacttggagcagtgggagacccctctcccgtttctcgataccttcctggaggaacgcggggacatcggaccaacccatacatcaagccagagagcggggcttagggagactggccttggagatgccccactccctgtctaagctccgacaagactgtgacttcctctgtggctgctctgcctcctcccactcacacccaagtgggcctggagtagagacggacaggctggagacgaggccggagtttgagaggcctcagggtgggtgtgaggccatggagtctgtatccctggggaggcgctggcctcctgggccttgccgtccagtggggagtggagggcagaggccctttggtctgctggctgtggagggtgggttgcacggacagccggatatcggggacactgccttgggagagggcggcccggacggg

SEQ ID NO: 20405 - DNA, 4635 bp, Homo sapiens
  misc_feature 1..4635: note = ENST00000632724
  source 1..4635: mol_type = unassigned DNA
gttcccgcagaagctcaccatgggcatgcttaagtcgcccaataccgccatcctcatcaaagacgaggctcgcaacgtcttctacgagctggaggacgtccgggacatccaggaccgcagtattatcaagatctacagaaaggagcccctctacgctgccttccctggctcacatctcaccaacggggacctccggagagagatggtgtacgcatcgcgggagtcctcgcccacgcggcgcctcaacaacctgtcaccagcgccgcacctggcatccggctcgccgccgcccgggctgccgtcggggctgccgtccgggctgcagtccggttcgccgtcgcgttcgcgcctatcgtacgccggggggcgcccgccttcgtacgccggcagcccggtgcaccacgcggccgagaggctgggaggcgccccggccgcccagggcgtcagccccagccccagcgccatcctggagcggcgcgacgtgaagccggacgaggacctggcgagcaaggcgggcggcatggtgctggtgaaaggcgagggcctctatgctgacccctacgggctgctgcacgagggccgtctgagcctggccgcggccgccggcgacccgttcgcctacccgggcgccggcggcctctacaagcgcggctcggtgcgctcgctcagcacctactcggccgccgcgctgcagtccgatctggaggactccctgtacaaggcggcgggcggcggcggcccgctgtacggcgacggctacggcttccgcctgccgccttcgtcaccgcagaagctggccgacgtggcagcaccccccggaggtcccccgccaccgcacagcccctactcggggccgcccagccgcggctcgccagtgcgccagtccttccgcaaggactcgggctcctcgtccgtctttgccgagagtcctggagggaagacccgcagcgcggggagcgcctcgacggccggagctcccccttcggagctcttccctgggcctggggaacgctcgctggttgggttcgggccgccagtgccagccaaggacacggagaccagggagcgcatggaggccatggagaagcagattgccagcctcacaggcctggtgcagagcgccttactgcgaggctctgagcctgagacccccagcgagaagattgaaggctccaatggagcagccaccccctcagcaccctgtgggtcaggcggccggagcagcggggccaccccggtgtccggcccgcccccgccctcggccagcagcacccccgcaggtcagcctaccgccgttagccggctgcagatgcagcttcacctgcgaggcctgcagaacagcgccagtgacttgcgcggccagctccagcagttgcgcaagctccagctacagaaccaggagtcggtgcgcgcgctgctgaagcgcacggaggcagagctgagcatgcgcgtgtcggaggcggcgcggcggcaggaggacccgctgcagcggcagcgcaccctggtggaagaggaacggctgcgctatctcaacgacgaggagcttattacccagcagctcaatgacctggagaaatcggtggagaagatccagagagacgtgtcccacaaccaccggctggtgcccggccctgagctggaggagaaggcactggtgctgaagcagctcggggagacgctgacagagctcaaggctcacttcccgggcctgcagagcaagatgcgggtggtgctgcgcgtggaggtggaggcggtgaagttcctgaaggaggagccccagcgcctggatgggctcctcaagcgctgccgcggggtcacggacacgctggcccagatccgaaggcaagtggatgagggtgtgtggccaccccccaacaatctcctgagtcagtcccccaagaaggtgacggcagagactgacttcaacaagagcgtggacttcgaaatgccaccccccagccccccgctgaacctgcatgagctgagcgggccagctgaaggagcctctcttacccccaaggggggcaaccccaccaaaggcctggacactcctggcaagagaagcgtggacaaagctgtgtctgttgaggctgcagagcgagactgggaggagaagcgggcagccctgacccagtacagtgccaaggacatcaaccggctgctggaagagacacaggcagagctgctcaaggccatccctgacctggactgtgccagcaaggcccatccaggcccggcccccactccagatcacaagccccccaaggccccccacggccagaaggcagccccccgaacggagcccagtgggaggaggggctcagatgagttgaccgtgccccgataccgcacagagaagccctccaagtcgcccccaccgccccctccccgccggagcttcccctcctcccatggcctgaccaccacacgtaccggagaggtggtggtcaccagcaagaaggactcggccttcatcaagaaggctgagtccgaggagctggaggtgcagaagccccaggtgaagctgcgccgggctgtgtctgaggtggcccgcccagcctccacaccacccatcatggcctcggccatcaaggacgaggatgacgaggatcgcatcatcgcagagctagagagtggcggaggcagtgtaccacccatgaaggtggtgactccgggggcctctcggctgaaggcggcccagggccaggcgggcagccccgacaaaagcaaacatggcaagcagagggccgagtacatgcggatccaggcccagcagcaggtctaatgagcaggcgcggaggctgtgtggagagtggacatacctcacctgtgggtgtttactgcccttgtggcctggtcagaggctgcagggtggctcctggacccagatgttgtgagagacccttagtgcactcgtttgatttagttaatatttatgagcagctcctgtatgacaggcccattctgggtgtgagggtgggggctgtgatatgtccagatgctctcacttaaagaaggttctagactcagaggcaagacgttagagaaggttctagactcagaggcaagaggttagagatgggtgagtccatctctttttcagatgagggggcagctcagaggaggagaggggcttcccaaaggtgcacagcaaggtggcatcacagccaggatcgggacctaggaatcttggaacccttccctgcactggccctgggacagccctgggcacccaaggccctgcctccctactggctcccaggagaatttctcaaaaagcagccctccagccccccgcagcctctccacagctcccacctgcctcctcatggcccccagacaccctgcgagccccacctccagatctttttcctgccactgccagggatgagttccccttgtcctgtccgggctggaccctcctgggtgcccagcagagcagctgacactgacagagctttcgctggggccaggcatgcgcattatctcatctcacactcaccacactgaggaaggtctattacccccatgtgacgggggcggaaactgaggcttaatccaaggccacacggctagcaagtggggggcaggacacaagtccagactgcctccctccccaccacaaagtgcttcagcctctccagcagccccttccctcagctctaatgatgttgcactgtttcccaccctagtccctccctccccagagcccagctcctccgctgtggtgtcagcctcatgcctttatggcccagcctccaccccatctccggggttgcctgggtctccagtgacatcgagatgggctcttttcacccccctcccccactgctctgcagcatgtggccttgtagaccccccccacacctgcatagggctgtgcagaccctctgttcctcagcatcctctccccagcctccacctggagcctctgggctcctttctgggtgactccctctattttttgagacggagtcttgctctgtctcccaggctggagtccagtggtgtgatctcagctcactgcagcctccgcctcctgggttcaagtgattctcgtgcctcagcctcccgagcagctgagactacaggctaattaccacactggctaatttttgtatttttagtagagacggggtttcaccatgttggccaggctggtctcaaactcctgagctcaggtgatcctcccacctcagcctcccaaagtgctgggattacaggcgtgagccattgcaccctgcctgggcgactctcctttgcctgcctcttcccttcctgtgccccactcctcagcctcttctcctcacaccatgccttcctctcctcaggcaccaggtgcactgcttagtccctgcccccacccaggtctccattctgagctccagtcacccacacacgcttccccgggcatccccaggctcctcgaatgcgtgtgtccagacataatgctcccccgaccacgctgccccagccggtacgaggctgccccagctgctgtctccctcaggaagggtcgcccacccccagccttcccaagcccctccgtgcccctgtctcacttccagtgctccagtagcctttcttataaacatggcttctttcttgtaaagtaataaatgtttacagtggaaa

SEQ ID NO: 20406 - DNA, 5204 bp, Homo sapiens
  misc_feature 1..5204: note = ENST00000631905
  source 1..5204: mol_type = unassigned DNA
cagccccttctccccaagcaaccccagctctctccatctctctctcgccctcagcatccccacccgacccctttccctccaagcctcctctctccctcttgcttccttttctgtccctttctttcatccctcccttctctcccatctcccttctctaactctctccaacctctctctccctcagctcacttcccctcagtttccgccccacctgctctgcccccacttccatttccttgtccaagttccttcaactgcctggagtccagtgggtgccttgagaggctggagagccggcctggcgcccccgccggcagcatgagaggtgcctgggtgcatctgcactcgggggcggcgtctagcctcagaccctgccgctgcggggctggcgcagctccgaaaagctccccgcgctctcctggagggcggcgtggagacggcagcagtgacagcgagggcggcgtctccttcgcaggggtgctgttcctgcagttcggggaggagactcggcgcgtgcacatcacgcacgaggtcagcagcctggacacgctgcacgcactcatcgcgcacatgttcccgcagaagctcaccatgggcatgcttaagtcgcccaataccgccatcctcatcaaagacgaggctcgcaacgtcttctacgagctggaggacgtccgggacatccaggaccgcagtattatcaagatctacagaaaggagcccctctacgctgccttccctggctcacatctcaccaacggggacctccggagagagatggtgtacgcatcgcgggagtcctcgcccacgcggcgcctcaacaacctgtcaccagcgccgcacctggcatccggctcgccgccgcccgggctgccgtcggggctgccgtccgggctgcagtccggttcgccgtcgcgttcgcgcctatcgtacgccggggggcgcccgccttcgtacgccggcagcccggtgcaccacgcggccgagaggctgggaggcgccccggccgcccagggcgtcagccccagccccagcgccatcctggagcggcgcgacgtgaagccggacgaggacctggcgagcaaggcgggcggcatggtgctggtgaaaggcgagggcctctatgctgacccctacgggctgctgcacgagggccgtctgagcctggccgcggccgccggcgacccgttcgcctacccgggcgccggcggcctctacaagcgcggctcggtgcgctcgctcagcacctactcggccgccgcgctgcagtccgatctggaggactccctgtacaaggcggcgggcggcggcggcccgctgtacggcgacggctacggcttccgcctgccgccttcgtcaccgcagaagctggccgacgtggcagcaccccccggaggtcccccgccaccgcacagcccctactcggggccgcccagccgcggctcgccagtgcgccagtccttccgcaaggactcgggctcctcgtccgtctttgccgagagtcctggagggaagacccgcagcgcggggagcgcctcgacggccggagctcccccttcggagctcttccctgggcctggggaacgctcgctggttgggttcgggccgccagtgccagccaaggacacggagaccagggagcgcatggaggccatggagaagcagattgccagcctcacaggcctggtgcagagcgccttactgcgaggctctgagcctgagacccccagcgagaagattgaaggctccaatggagcagccaccccctcagcaccctgtgggtcaggcggccggagcagcggggccaccccggtgtccggcccgcccccgccctcggccagcagcacccccgcaggtcagcctaccgccgttagccggctgcagatgcagcttcacctgcgaggcctgcagaacagcgccagtgacttgcgcggccagctccagcagttgcgcaagctccagctacagaaccaggagtcggtgcgcgcgctgctgaagcgcacggaggcagagctgagcatgcgcgtgtcggaggcggcgcggcggcaggaggacccgctgcagcggcagcgcaccctggtggaagaggaacggctgcgctatctcaacgacgaggagcttattacccagcagctcaatgacctggagaaatcggtggagaagatccagagagacgtgtcccacaaccaccggctggtgcccggccctgagctggaggagaaggcactggtgctgaagcagctcggggagacgctgacagagctcaaggctcacttcccgggcctgcagagcaagatgcgggtggtgctgcgcgtggaggtggaggcggtgaagttcctgaaggaggagccccagcgcctggatgggctcctcaagcgctgccgcggggtcacggacacgctggcccagatccgaaggcaagtggatgagggtgtgtggccaccccccaacaatctcctgagtcagtcccccaagaaggtgacggcagagactgacttcaacaagagcgtggacttcgaaatgccaccccccagccccccgctgaacctgcatgagctgagcgggccagctgaaggagcctctcttacccccaaggggggcaaccccaccaaaggcctggacactcctggcaagagaagcgtggacaaagctgtgtctgttgaggctgcagagcgagactgggaggagaagcgggcagccctgacccagtacagtgccaaggacatcaaccggctgctggaagagacacaggcagagctgctcaaggccatccctgacctggactgtgccagcaaggcccatccaggcccggcccccactccagatcacaagccccccaaggccccccacggccagaaggcagccccccgaacggagcccagtgggaggaggggctcagatgagttgaccgtgccccgataccgcacagagaagccctccaagtcgcccccaccgccccctccccgccggagcttcccctcctcccatggcctgaccaccacacgtaccggagaggtggtggtcaccagcaagaaggactcggccttcatcaagaaggctgagtccgaggagctggaggtgcagaagccccaggtgaagctgcgccgggctgtgtctgaggtggcccgcccagcctccacaccacccatcatggcctcggccatcaaggacgaggatgacgaggatcgcatcatcgcagagctagagagtggcggaggcagtgtaccacccatgaaggtggtgactccgggggcctctcggctgaaggcggcccagggccaggcgggcagccccgacaaaagcaaacatggcaagcagagggccgagtacatgcggatccaggcccagcagcaggtctaatgagcaggcgcggaggctgtgtggagagtggacatacctcacctgtgggtgtttactgcccttgtggcctggtcagaggctgcagggtggctcctggacccagatgttgtgagagacccttagtgcactcgtttgatttagttaatatttatgagcagctcctgtatgacaggcccattctgggtgtgagggtgggggctgtgatatgtccagatgctctcacttaaagaaggttctagactcagaggcaagacgttagagaaggttctagactcagaggcaagaggttagagatgggtgagtccatctctttttcagatgagggggcagctcagaggaggagaggggcttcccaaaggtgcacagcaaggtggcatcacagccaggatcgggacctaggaatcttggaacccttccctgcactggccctgggacagccctgggcacccaaggccctgcctccctactggctcccaggagaatttctcaaaaagcagccctccagccccccgcagcctctccacagctcccacctgcctcctcatggcccccagacaccctgcgagccccacctccagatctttttcctgccactgccagggatgagttccccttgtcctgtccgggctggaccctcctgggtgcccagcagagcagctgacactgacagagctttcgctggggccaggcatgcgcattatctcatctcacactcaccacactgaggaaggtctattacccccatgtgacgggggcggaaactgaggcttaatccaaggccacacggctagcaagtggggggcaggacacaagtccagactgcctccctccccaccacaaagtgcttcagcctctccagcagccccttccctcagctctaatgatgttgcactgtttcccaccctagtccctccctccccagagcccagctcctccgctgtggtgtcagcctcatgcctttatggcccagcctccaccccatctccggggttgcctgggtctccagtgacatcgagatgggctcttttcacccccctcccccactgctctgcagcatgtggccttgtagaccccccccacacctgcatagggctgtgcagaccctctgttcctcagcatcctctccccagcctccacctggagcctctgggctcctttctgggtgactccctctattttttgagacggagtcttgctctgtctcccaggctggagtccagtggtgtgatctcagctcactgcagcctccgcctcctgggttcaagtgattctcgtgcctcagcctcccgagcagctgagactacaggctaattaccacactggctaatttttgtatttttagtagagacggggtttcaccatgttggccaggctggtctcaaactcctgagctcaggtgatcctcccacctcagcctcccaaagtgctgggattacaggcgtgagccattgcaccctgcctgggcgactctcctttgcctgcctcttcccttcctgtgccccactcctcagcctcttctcctcacaccatgccttcctctcctcaggcaccaggtgcactgcttagtccctgcccccacccaggtctccattctgagctccagtcacccacacacgcttccccgggcatccccaggctcctcgaatgcgtgtgtccagacataatgctcccccgaccacgctgccccagccggtacgaggctgccccagctgctgtctccctcaggaagggtcgcccacccccagccttcccaagcccctccgtgcccctgtctcacttccagtgctccagtagcctttcttataaacatggcttctttcttgtaaagtaataaatgtttacagtgg

SEQ ID NO: 20407 - DNA, 5225 bp, Homo sapiens
  misc_feature 1..5225: note = ENST00000631691
  source 1..5225: mol_type = unassigned DNA
gcattgcagcaaagggcaccggcggcggcggccgcggctgcggaggcggccgggggagagaagagcccgggcgggtgggagtaggggccctccctccccagccggacgcaggacctggggctggggaccccgcacgtacacctgtggccgcagcagccaaactactggagtttcaagacccgcagctcacgccacactcagggagcccagcccgggctggcagaccaggcggcaaagctgtcctacgcctccgccgagtcgctggagaccatgtcggaggccgagctgcccctgggcttcagcaggatgaaccgcttccgacagagcctgcctctctcccgctcggccagccagaccaagctgcgctccccaggggtgctgttcctgcagttcggggaggagactcggcgcgtgcacatcacgcacgaggtcagcagcctggacacgctgcacgcactcatcgcgcacatgttcccgcagaagctcaccatgggcatgcttaagtcgcccaataccgccatcctcatcaaagacgaggctcgcaacgtcttctacgagctggaggacgtccgggacatccaggaccgcagtattatcaagatctacagaaaggagcccctctacgctgccttccctggctcacatctcaccaacggggacctccggagagagatggtgtacgcatcgcgggagtcctcgcccacgcggcgcctcaacaacctgtcaccagcgccgcacctggcatccggctcgccgccgcccgggctgccgtcggggctgccgtccgggctgcagtccggttcgccgtcgcgttcgcgcctatcgtacgccggggggcgcccgccttcgtacgccggcagcccggtgcaccacgcggccgagaggctgggaggcgccccggccgcccagggcgtcagccccagccccagcgccatcctggagcggcgcgacgtgaagccggacgaggacctggcgagcaaggcgggcggcatggtgctggtgaaaggcgagggcctctatgctgacccctacgggctgctgcacgagggccgtctgagcctggccgcggccgccggcgacccgttcgcctacccgggcgccggcggcctctacaagcgcggctcggtgcgctcgctcagcacctactcggccgccgcgctgcagtccgatctggaggactccctgtacaaggcggcgggcggcggcggcccgctgtacggcgacggctacggcttccgcctgccgccttcgtcaccgcagaagctggccgacgtggcagcaccccccggaggtcccccgccaccgcacagcccctactcggggccgcccagccgcggctcgccagtgcgccagtccttccgcaaggactcgggctcctcgtccgtctttgccgagagtcctggagggaagacccgcagcgcggggagcgcctcgacggccggagctcccccttcggagctcttccctgggcctggggaacgctcgctggttgggttcgggccgccagtgccagccaaggacacggagaccagggagcgcatggaggccatggagaagcagattgccagcctcacaggcctggtgcagagcgccttactgcgaggctctgagcctgagacccccagcgagaagattgaaggctccaatggagcagccaccccctcagcaccctgtgggtcaggcggccggagcagcggggccaccccggtgtccggcccgcccccgccctcggccagcagcacccccgcaggtcagcctaccgccgttagccggctgcagatgcagcttcacctgcgaggcctgcagaacagcgccagtgacttgcgcggccagctccagcagttgcgcaagctccagctacagaaccaggagtcggtgcgcgcgctgctgaagcgcacggaggcagagctgagcatgcgcgtgtcggaggcggcgcggcggcaggaggacccgctgcagcggcagcgcaccctggtggaagaggaacggctgcgctatctcaacgacgaggagcttattacccagcagctcaatgacctggagaaatcggtggagaagatccagagagacgtgtcccacaaccaccggctggtgcccggccctgagctggaggagaaggcactggtgctgaagcagctcggggagacgctgacagagctcaaggctcacttcccgggcctgcagagcaagatgcgggtggtgctgcgcgtggaggtggaggcggtgaagttcctgaaggaggagccccagcgcctggatgggctcctcaagcgctgccgcggggtcacggacacgctggcccagatccgaaggcaagtggatgagggtgtgtggccaccccccaacaatctcctgagtcagtcccccaagaaggtgacggcagagactgacttcaacaagagcgtggacttcgaaatgccaccccccagccccccgctgaacctgcatgagctgagcgggccagctgaaggagcctctcttacccccaaggggggcaaccccaccaaaggcctggacactcctggcaagagaagcgtggacaaagctgtgtctgttgaggctgcagagcgagactgggaggagaagcgggcagccctgacccagtacagtgccaaggacatcaaccggctgctggaagagacacaggcagagctgctcaaggccatccctgacctggactgtgccagcaaggcccatccaggcccggcccccactccagatcacaagccccccaaggccccccacggccagaaggcagccccccgaacggagcccagtgggaggaggggctcagatgagttgaccgtgccccgataccgcacagagaagccctccaagtcgcccccaccgccccctccccgccggagcttcccctcctcccatggcctgaccaccacacgtaccggagaggtggtggtcaccagcaagaaggactcggccttcatcaagaaggctgagtccgaggagctggaggtgcagaagccccaggtgaagctgcgccgggctgtgtctgaggtggcccgcccagcctccacaccacccatcatggcctcggccatcaaggacgaggatgacgaggatcgcatcatcgcagagctagaggtgtttgagagaagctcagtgtcttccctcccccccacgccccgccgccagctgatccccaccttgctgtccccccaggacctggggccccccgggggctcagccccaggccctacacggaagagtggcggaggcagtgtaccacccatgaaggtggtgactccgggggcctctcggctgaaggcggcccagggccaggcgggcagccccgacaaaagcaaacatggcaagcagagggccgagtacatgcggatccaggcccagcagcaggtctaatgagcaggcgcggaggctgtgtggagagtggacatacctcacctgtgggtgtttactgcccttgtggcctggtcagaggctgcagggtggctcctggacccagatgttgtgagagacccttagtgcactcgtttgatttagttaatatttatgagcagctcctgtatgacaggcccattctgggtgtgagggtgggggctgtgatatgtccagatgctctcacttaaagaaggttctagactcagaggcaagacgttagagaaggttctagactcagaggcaagaggttagagatgggtgagtccatctctttttcagatgagggggcagctcagaggaggagaggggcttcccaaaggtgcacagcaaggtggcatcacagccaggatcgggacctaggaatcttggaacccttccctgcactggccctgggacagccctgggcacccaaggccctgcctccctactggctcccaggagaatttctcaaaaagcagccctccagccccccgcagcctctccacagctcccacctgcctcctcatggcccccagacaccctgcgagccccacctccagatctttttcctgccactgccagggatgagttccccttgtcctgtccgggctggaccctcctgggtgcccagcagagcagctgacactgacagagctttcgctggggccaggcatgcgcattatctcatctcacactcaccacactgaggaaggtctattacccccatgtgacgggggcggaaactgaggcttaatccaaggccacacggctagcaagtggggggcaggacacaagtccagactgcctccctccccaccacaaagtgcttcagcctctccagcagccccttccctcagctctaatgatgttgcactgtttcccaccctagtccctccctccccagagcccagctcctccgctgtggtgtcagcctcatgcctttatggcccagcctccaccccatctccggggttgcctgggtctccagtgacatcgagatgggctcttttcacccccctcccccactgctctgcagcatgtggccttgtagaccccccccacacctgcatagggctgtgcagaccctctgttcctcagcatcctctccccagcctccacctggagcctctgggctcctttctgggtgactccctctattttttgagacggagtcttgctctgtctcccaggctggagtccagtggtgtgatctcagctcactgcagcctccgcctcctgggttcaagtgattctcgtgcctcagcctcccgagcagctgagactacaggctaattaccacactggctaatttttgtatttttagtagagacggggtttcaccatgttggccaggctggtctcaaactcctgagctcaggtgatcctcccacctcagcctcccaaagtgctgggattacaggcgtgagccattgcaccctgcctgggcgactctcctttgcctgcctcttcccttcctgtgccccactcctcagcctcttctcctcacaccatgccttcctctcctcaggcaccaggtgcactgcttagtccctgcccccacccaggtctccattctgagctccagtcacccacacacgcttccccgggcatccccaggctcctcgaatgcgtgtgtccagacataatgctcccccgaccacgctgccccagccggtacgaggctgccccagctgctgtctccctcaggaagggtcgcccacccccagccttcccaagcccctccgtgcccctgtctcacttccagtgctccagtagcctttcttataaacatggcttctttcttgtaaagtaataaatgtttacagtgg

SEQ ID NO: 20408 - DNA, 1150 bp, Homo sapiens
  misc_feature 1..1150: note = ENST00000631684
  source 1..1150: mol_type = unassigned DNA
gtccgaggagctggaggtgcagaagccccaggtgaagctgcgccgggctgtgtctgaggtggcccgcccagcctccacaccacccatcatggcctcggccatcaaggacgaggatgacgaggatcgcatcatcgcagagctagaggtgtttgagagaagctcagtgtcttccctcccccccacgccccgccgccagctgatccccaccttgctgtccccccaggacctggggccccccgggggctcagccccaggccctacacggaaggctgccccaggtcccagggccttctgcgtcccaaggatcatcttgacagagtgtgcccccaaccctccctccccgccagaggccagacttgaggaactgggacccaggacagctcccaccccaagacctcagaccctggctgacagcacgaggggctgggatggcccacagtccccaccaggggtagtgggggagacttctgggccgaggagcagcttcatgccccggaaggagggggcagctctgaagagactgggtggaggaggcagcagcctagaggatggaggagccagagtacagtgtcctcagggaccagcccaggatgggactccagagacctctactgctgacacctacccagaggagatcctcaaggactctggacatgatgcccaaacctgcagtagggagcatcagggccaggctgctgccaactcaggccgcaccacgtggggcgccactgcccagcagatggacagcttggaggagacgctccgggagctggaagccaccctgagcaacatgggcacaggccctgccatggggtcccctggcagccccccacccctacccctccgcccccaggtggctgcccgcttttcatcctcctctgctgccttcctcctccatttccagagtcagacagagtagggggcagcagaaatgccaggccagccccctcctcccaccggccttctctcagctcttaccactctcctgggagcctggtgccagagcagggtttgcaggcagagtccgggggaggctgggaagccggcctacccaggggccggccaatccccagccttggcaagaaccagggcctcccgcttctgctctgtatctgtaaaccaacaaataaagttctctccccaccttcca

SEQ ID NO: 20409 - DNA, 453 bp, Homo sapiens
  misc_feature 1..453: note = ENST00000631897
  source 1..453: mol_type = unassigned DNA
ggcacagagcagtgcgaggaacctctaggatgagctgtatggaaggggcgcctcctgggctggccatgcccttggcactttggcccctcccatccaagccctgcccctttccggctctgggagcccatcctgaggggcccagtggacaaggccttttgcccctggccgaccctctgcatcctgcggcagcatcgggcaacggagccgggcgagcgtgaggttgccctctctgccttcccagtcagcaccccccacttccaggctgccccaggtcccagggccttctgcgtcccaaggatcatcttgacagagtgtgcccccaaccctccctccccgccagaggccagacttgaggaactgggacccaggacagctcccaccccaagacctcagaccctggctgacagcacgaggggctgggatggcccacagtccccaccaggggtagtgggg

SEQ ID NO: 20410 - DNA, 1316 bp, Homo sapiens
  misc_feature 1..1316: note = ENST00000613116
  source 1..1316: mol_type = unassigned DNA
cgcccgagtccttcgccgctcactggcctctctccgaaccctttctccccttcccctttcttgagcttccgctccctcgctgaacctccacttcctcaccaaggccttatccctcgcccgtgaccccctcattgagccctccttctccttccctgagtccccatcgccctcctggagccccagtcacccactgagcccctccgtcgtcagtatccctcggggcagttccagttccttcctgccctgcatccctttccctgagtcagcgagagcccttcccccaagtcctctcagctcctccctcctgagccccaacagtctccccggccctgcttggcagatggtcccacctgtcaggagcttggcatcgccgagtccgctcctcaagcaggcccaggggccgtcagctacagaaccaggagtcggtgcgcgcgctgctgaagcgcacggaggcagagctgagcatgcgcgtgtcggaggcggcgcggcggcaggaggacccgctgcagcggcagcgcaccctggtggaagaggaacggctgcgctatctcaacgacgaggagcttattacccagcagctcaatgacctggagaaatcggtggagaagatccagagagacgtgtcccacaaccaccggctggtgcccggccctgagctggaggagaaggcactggtgctgaagcagctcggggagacgctgacagagctcaaggctcacttcccgggcctgcagagcaagatgcgggtggtgctgcgcgtggaggtggaggcggtgaagttcctgaaggaggagccccagcgcctggatgggctcctcaagcgctgccgcggggtcacggacacgctggcccagatccgaaggcaagtggatgagggtgtgtggccaccccccaacaatctcctgagtcagtcccccaagaaggtgacggcagagactgacttcaacaagagcgtggacttcgaaatgccaccccccagccccccgctgaacctgcatgagctgagcgggccagctgaaggagcctctcttacccccaaggggggcaaccccaccaaaggcctggacactcctggcaagagaagcgtggacaaagctgtgtctgttgaggtgctggggccagggattgtgggtggggccatgagccaggttcacacattcttacgaccatccttcctagagtggggagtgccaatcctgtgggtctttttccttgggggaggagggccagtgccctaatggaagcctaagaagcataatgagggtgacattagccctcctagacagaaagcgtattataaagctacaataatcaaa

SEQ ID NO: 20411 - DNA, 1431 bp, Homo sapiens
  misc_feature 1..1431: note = ENST00000632117
  source 1..1431: mol_type = unassigned DNA
acgcgtccccatgcagccctggcagtgcctccggcgctttgccctggcctggtgggagaggacggcggagggcagagcccgctctcccagggaggaggctggaccgagggaccctgggggccgaggggagccagatccggagcggagcagcccccccatgctgtctgcggacgatgcggagtacccgcgggagtaccggaccctggggggcgggggcggcgggggcagcgggggccggcgcttctccaacgtggggctggtgcacacgtccgagcggcggcacacggtgatcgcggcccagagtctggaggcgctcagcgggctccagaaggcggacgccgaccgcaagcgtgatgccttcatggaccacctgaagagcaagtacccacagcacgccctggccctgcgaggccagcaggacaggatgcgagagcaggttggcggctggaccgtggaccccgtatgcctcctcagctccctctgctcccacctccatggcgactccgccccctccggggctggccagccggcccagacccgcagctcacgccacactcagggagcccagcccgggctggcagaccaggcggcaaagctgtcctacgcctccgccgagtcgctggagaccatgtcggaggccgagctgcccctgggcttcagcaggatgaaccgcttccgacagagcctgcctctctcccgctcggccagccagaccaagctgcgctccccaggggtgctgttcctgcagttcggggaggagactcggcgcgtgcacatcacgcacgaggtcagcagcctggacacgctgcacgcactcatcgcgcacatgttcccgcagaagctcaccatgggcatgcttaagtcgcccaataccgccatcctcatcaaagacgaggctcgcaacgtcttctacgagctggaggacgtccgggacatccaggaccgcagtattatcaagatctacagaaaggagcccctctacgctgccttccctggctcacatctcaccaacggggacctccggagagagatggtgtacgcatcgcgggagtcctcgcccacgcggcgcctcaacaacctgtcaccagcgccgcacctggcatccggctcgccgccgcccgggctgccgtcggggctgccgtccgggctgcagtccggttcgccgtcgcgttcgcgcctatcgtacgccggggggcgcccgccttcgtacgccggcagcccggtgcaccacgcggccgagaggctgggaggcgccccggccgcccagggcgtcagccccagccccagcgccatcctggagcggcgcgacgtgaagccggacgaggacctggcgagcaaggcgggcggcatggtgctggtgaaaggcgagggcctctatgctgacccctacgggctgctgcacgagggccgtctgagcctggccgcggccgc

SEQ ID NO: 20412 - DNA, 7058 bp, Homo sapiens; identical to SEQ ID NO: 20403
  misc_feature 1..7058: note = ENST00000617146
  source 1..7058: mol_type = unassigned DNA

SEQ ID NO: 20413 - DNA, 4644 bp, Homo sapiens; identical to SEQ ID NO: 20404
  misc_feature 1..4644: note = ENST00000621492
  source 1..4644: mol_type = unassigned DNA

SEQ ID NO: 20414 - DNA, 4635 bp, Homo sapiens; identical to SEQ ID NO: 20405
  misc_feature 1..4635: note = ENST00000622190
  source 1..4635: mol_type = unassigned DNA

SEQ ID NO: 20415 - DNA, 5204 bp, Homo sapiens; identical to SEQ ID NO: 20406
  misc_feature 1..5204: note = ENST00000622519
  source 1..5204: mol_type = unassigned DNA

SEQ ID NO: 20416 - DNA, 5225 bp, Homo sapiens; identical to SEQ ID NO: 20407
  misc_feature 1..5225: note = ENST00000621763
  source 1..5225: mol_type = unassigned DNA

SEQ ID NO: 20417 - DNA, 1150 bp, Homo sapiens
  misc_feature 1..1150: note = ENST00000613927
  source 1..1150: mol_type = unassigned DNA
gtccgaggagctggaggtgcagaagccccaggtgaagctgcgccgggctgtgtctgaggtggcccgcccagcctccacaccacccatcatggcctcggccatcaaggacgaggatgacgaggatcgcatcatcgcagagctagaggtgtttgagagaagctcagtgtcttccctcccccccacgccccgccgccagctgatccccaccttgctgtccccccaggacctggggccccccgggggctcagccccaggccctacacggaaggctgccccaggtcccagggccttctgcgtcccaaggatcatcttgacagagtgtgcccccaaccctccctccccgccagaggccagacttgaggaactgggacccaggacagctcccaccccaagacctcagaccctggctgacagcacgaggggctgggatggcccacagtccccaccaggggtagtgggggagacttctgggccgaggagcagcttcatgccccggaaggagggggcagctctgaagagactgggtggaggaggcagcagcctagaggatggaggagccagagtacagtgtcctcagggaccagcccaggatgggactccagagacctctactgctgacacctacccagaggagatcctcaaggactctggacatgatgcccaaacctgcagtagggagcatcagggccaggctgctgccaactcaggccgcaccacgtggggcgccactgcccagcagatggacagcttggaggagacgctccgggagctggaagccaccctgagcaacatgggcacaggccctgccatggggtcccctggcagccccccacccctacccctccgcccccaggtggctgcccgcttttcatcctcctctgctgccttcctcctccatttccagagtcagacagagtagggggcagcagaaatgccaggccagccccctcctcccaccggccttctctcagctcttaccactctcctgggagcctggtgccagagcagggtttgcaggcagagtccgggggaggctgggaagccggcctacccaggggccggccaatccccagccttggcaagaaccagggcctcccccttctgctctgtatctgtaaaccaacaaataaagttctctccccaccttcca

SEQ ID NO: 20418 - DNA, 453 bp, Homo sapiens; identical to SEQ ID NO: 20409
  misc_feature 1..453: note = ENST00000621275
  source 1..453: mol_type = unassigned DNA

SEQ ID NO: 20419 - DNA, 1316 bp, Homo sapiens; identical to SEQ ID NO: 20410
  misc_feature 1..1316: note = ENST00000612208
  source 1..1316: mol_type = unassigned DNA

SEQ ID NO: 20420 - DNA, 1431 bp, Homo sapiens; identical to SEQ ID NO: 20411
  misc_feature 1..1431: note = ENST00000612431
  source 1..1431: mol_type = unassigned DNA

SEQ ID NO: 20421 - DNA, 23331 bp, Homo sapiens
  misc_feature 1..23331: note = ENST00000355086
  source 1..23331: mol_type = unassigned DNA
cgggacccttgagcgccggagccgacagctggaggcaggaagggagggttgtggcgcccgagctgggcgcgttcccagcgcctgccctccgccgctggccctgtcccgggcgcccggtgcgggtctcgaacaatggtgcggagcgccggcgcgagccccgcgcccgcccagcggccgtagaggaagtggccgggctcccggcgaggtgggcagggagacgtcccccgccactcgctggctggagtttgcctgcgcgtccggcctctcccccggggatcccctgggattaccgacggagctcaatttcgagagtatggtgccagcgcccgggctaatctagtcctctctactcgctctttttcccctcctcctcctacttctcctctccctcctcccttccctcgggtcggcgctgcctctggattgcctgcgtgtgggagtacaactctgcctctccaaggagaacgggttgtgaccactgaacaaaacttgcccattgaaagcaaacccggaacagctggataatgtccaccccgagccgattcaagaaggacaaagagatcatagccgagtatgaaagtcaagtcaaagaaattcgagctcaactggtagaacaacaaaaatgcctggagcagcaaacggagatgcgagttcagcttctccaggatctgcaagatttcttccgaaaaaaagctgaaattgagacggaatattcccggaatctagagaagttagcagaaaggttcatggcaaaaacaagaagcactaaggatcatcaacaatacaagaaagaccagaacctgttgtctccagtgaactgctggtatttgctcctgaaccaagtaaggagagaaagcaaagaccatgcaaccttgagtgacatctatctgaacaatgtgattatgcggttcatgcagataagtgaggattctaccaggatgtttaaaaagagcaaagagattgcattccaacttcatgaggatttaatgaaggttcttaatgagctttatacggtgatgaaaacataccatatgtatcatgcagagagcatcagtgcagagagcaagctgaaagaggccgaaaaacaagaggaaaagcaaattgggagatctggtgatccagtcttccatattcgactagaggagagacatcaacggcgaagctctgtaaagaaaattgaaaaaatgaaagaaaaaagacaagcaaaatattcagaaaataagctaaaatcaattaaggcacggaacgaatatctcctaacacttgaagccaccaatgcctcagttttcaagtactatattcatgatctttctgatttaattgattgctgtgatcttggctaccatgcaagtctgaacagagccctaagaacatatctgtctgcggagtacaaccttgaaacctccagacatgagggcttagacattattgagaatgcagttgataatttagagcccaggagcgataagcagagattcatggagatgtaccctgctgcgttctgtccaccaatgaagtttgagtttcagtctcacatgggtgatgaggtgtgccaggtcagtgcccagcagccagtccaggcagagctcatgctcaggtaccaacagttgcagtcccgccttgccacgctcaaaatcgagaatgaagaggttaagaaaacgactgaagccaccttgcagacgatacaagatatggtcaccatcgaggactatgatgtttctgaatgcttccagcacagtcgttccacagaatcagtgaagtccactgtctctgaaacctacctgagtaaacccagcatcgccaagagaagagccaaccagcaggaaactgaacagttctacttcatgaaactcagagaatatttggaaggcagtaatctcatcacaaaacttcaagccaaacatgacttgctgcagaggaccctgggagaaggtcatagagctgaatatatgactacaaggcctccaaatgttccccctaagccccagaaacacaggaagtccaggccccgctcacagtataatactaagttgtttaatggggatttggaaacattcgtcaaggactcaggacaggttattcccctcattgtggaaagctgtattcggttcatcaatctctatggtcttcagcatcaggggattttcagagtgtctggttcccaggtggaagtcaatgatattaaaaattcatttgagagaggtgaaaatcctttggctgatgaccagagtaaccatgatattaactcagttgctggcgttctgaagctctatttccgtgggctggaaaaccccctctttcctaaggaaagatttaacgatctgatttcttgtatcagaatagataatctctatgagagggcgcttcacatccgcaaactcctcctgactttgcccaggtcggtccttatagtgatgaggtacctctttgccttcctcaatcatctatcacagtacagcgatgagaatatgatggacccttataacctggccatttgctttggcccaacattgatgcctgtcccagaaatacaggatcaagtgtcttgccaggcacatgtgaatgaaattatcaaaaccatcatcatccaccatgagactattttcccagatgctaaagagctggatggccctgtttatgagaaatgtatggctggagatgactattgcgacagcccatacagtgagcacggtacattggaggaagtggaccaagatgctggtacagagccccacacaagtgaagatgaatgtgagccaatagaagcaatagccaagtttgactatgttgggcggtctgccagagaactatccttcaagaagggtgcctccctgctgctgtatcaccgtgcatctgaggactggtgggaaggcaggcacaacgggattgacgggctggtgcctcaccagtatatagtggtgcaggatatggatgatacgttttcagacactctgagccaaaaagccgacagtgaggccagcagtgggccagtcacggaagacaagtcctcatccaaggacatgaactccccgacagaccgtcatcctgacggctatttagccaggcaacgaaaaagaggagagccaccccctccagtaaggcgtcctggcaggaccagtgatggccattgcccgctccaccctccacatgccctttctaactcctcagttgacctagggtccccaagccttgccagtcacccccggggcctgctgcagaaccgtggcctcaacaatgacagtcctgagcggaggcgcaggcctggccatggcagcctgaccaacatcagccggcacgactccctcaagaagatcgacagccctcccattagaaggtccacgtcatcagggcaatacacgggcttcaatgaccacaagccactggacccagagacaattgctcaggatattgaagaaacgatgaacacagctttgaatgaactccgagaactggagagacagagcacagcaaagcatgcccctgatgtggtgctggataccctggagcaagtgaaaaactctcccacccctgccacttccacggaatctctcagccctttgcacaacgttgccctcaggagctccgagcctcagattcgacgtagcacgagctcctccagtgacacaatgagtactttcaagcctatggtggcacccagaatgggcgtgcagctgaagcctccagcccttaggccaaaacctgctgttcttccaaaaacaaatcctaccataggacctgccccacctccccagggtccaacagacaagtcatgcacaatgtaaaaaccagccaagcaaggccataaagggaggtgacttaaaaaagaaaatggattagtgacaaaagtcactgatccataactttccttagttttgtgcttataactggagatcttttggcttttctatgttgtcgaatgtaatgtctgagactagctaaattaacacgggcatttgtattttgtaatttttttaaataactggacatatgtcattttaaggacaatagaaacacttagacttacttgaaaatccaatgctgcaccacttgtaatgaaggcaacaccgctctccacattgtacagagcttcaggtttaatgtagcccagctgagtcagaaaggttgtgacctgaaggcagaagaacccgaatgccacacctcattggagtatagccagtgttggtctgtggcacttgggctgaaaggtgataatggcattgcgtggtagctgacaatgagcaccttcggttccatgtggagcggggtttagctcatgcaaaagacttgcaattgtctccatgggacgatcccagtgggactgtcagcccacagctcgagtgggttggatgcttgcctctttcctaacagttatttccccgggtccagcttaaagactcgatggaaggaggtagaacctctgctgttactgcttgaacttaacctgggaaaggagaggaagacaccatctccaaagctattaatgtcactccttttgcgagcatgattaggccccggagatttccaagtccccccatctacacttacaaacgattagaagggtttaattttaaagactttctggttacactactccacgaactcctccaaagatccgttattcaataactgcctagaaaatgtttccatctcctctaaatccctgtgttctcctctgtggaaatgaaggcagcaagaagcacctgaggccttggttcatgcagtgttctcttttgactaaatcacctaggttcctttaaacatgctacaaagcccaggcatggtggtgcacacctgtactcccagctactcgggtggtttacacaggaggatggctttgggcctagtagttcgagtccagcctgggcagcatagtgtgagaccctgtctcttaaaaaaaaaaaaaatgctacaaagtcctgatgatcctaaatttgaaatcccaactgtcctctccatttgtctttgagccaaccctgaactggccctggtacctgagtaagagccatgcagggccatcagcagaacatggccttgtggttctcacccagttgtgtacctcacaaccacaacttctttttctttgtcccttttcccctttttggttttggttttgtatgtgggctctatgtaactcccatagtcagctgaactctcaattggagaccctctttctctggcatcctagcacacaggcaattttttaagcctatatttatgctacattttcccccatcttaagaaaatttgctttgatttccattctcctactagcagcagctgatatcacctgtagacctatgagcattttatctattctatcattgaagttactgataaagatttttgttgttgttgttgttgttgggagaaatggatttcccacaactaatccctctggcccaccattaatttccttcttggtttcatttcaaactggcagccaattgcacgcccatctaagagctacacagtgtagattttacttcatcagcccattggtgaatgcatcgtgcagaaaagaactgggatctgtactaaaatcaagatcattactttgatctctacctcagtttgccagtgtagtcattctattgcaggaagagattaaattgatgagatattgttactttcagagtcacactgctgattgcttgcctggggcctaatttcacaaatgaatagtgacttttttcccatgtatttctaggtatggtaaacttttaaacctccaaattttcagagccatactttttgcccattttgaaaaagaagcccaggacagcaccttgtctagcccctccccatttctcctgagcttttggggtccttcagcacccttggacaccgtggagatccagccaagactgagctttgaatagcactagcccttttaaacaatcctcacaaattccttaggaatttaaactttccaaaataatcccccacttttttttttttttttttttttttttgagttggagtcttgctctgtcgcccaggccagagtacagtggtgcaatctcggctccctgcaacctccatctcccgggttcaagcaattctcctgagtagctgggattacaggcgccaccaccacgcccagctaatttttgtatttttagtagagatggggtgtcaccatgttggccaggctggtctcaaactcctgacctcaggtgacccaccagcctcagcctcccaaagtgctgggattacagatgtgagccaccatgcccggccattccaccacttctttaaaatagtaagaattcttaaaaaccatattccttgtttgatggaagagtaagatgttaacagagggcatcaaagggccagaggtgtctttgaatttattttttttcaatgtcttttctgagcttcagccttagcttttcagatcttcctcctacctgttcatttattcagccttctatctggtcatcctccccagcggctcctctctctgatgtgtccacctacggtggaacgaggattgcctttctgtgctccccatcaggactttgctgtcttggccggcaggagtcgtgctgctgcagagcctcacaggctgtgccttgtttcaggaaacagctcctaatactctcccatcactcactttacctgtctccatcttatttccctatactcctattgtcagcttgagactttttttttttttcaattccaaatgaagggtatgacctcagagtgagtgaggactcagtaaagactcacctctccttacttggtttattaaatgtcttcagattccagagataagacaaggtggccacttcacaaagaatccagaatcatgctcagtaaagctcattaaaagccactgcagctgagaaggttcacagcccttctttatagccacagaggcagcacacaggggaggtgggaagacacagggaaacgagagaagaaggataatgaggccttgaggtgttctgcccccaatttcaaggagcttatcaggcttcatgtgcaatttggggaggggagctttttgatggtgggtaaataatggctctacaaagattacctgactccactgacacaagaatatgtattctcagctgatataactgtgtgttcacatcccatccatagaactcactgaaggagattcatcaagtcagccttttggactgggttggggtttggggagtggatttggggatagagagaaaggtgtacttagtacacattttctaatgggcgttacgtgaactgtttgaacctgctgagtggcgctttgtagagctccatgttcacgttcagtgtcaacaccattcaacagctttgcacatcttcgtacaacataatctggctttggtgccccttgagccacctgtagaataatttatagcagggtcccacaatctactgcaatgatcgtgaacagttatcagtggatatagtgctccaagagtcaaattgtatccgttaagggttttctaacttttgctatcccccccgcgaccaaaaaaagggggggtttataatttaaagaaaaggaaaagaggcgtgggttggtagttgtgtccttaacatttaggaatgacatagcctctggagtctacaaactgaagaaactttcatctgatcagccttggaaatccaaagttaaagagcctatgtgtctcttgaggcgggggttagaggattcaaatttgggatgatgctcattgattcctgaccatagcagtgagaggccattttttgtgcaggaaatgtgcttaggactcagtcttgttttcgattatccaccacagaaaccctgagacacagagcagcttagaagtctctacccaggcgtaaatagagctccctactccagaccacctgccacccacctcccaagttgagaacacaagctccagctgggctggagagtcaggcttggtgcagggtgactttggcgaagttttgtcagatccataaagcaaactggaatttgagctttcacttaccctagtatacgttcttaaaaaaaaaaaaaagtctatgtggtataatcgagatggatacctgtgtctttaaattacgtagggaattttgtatgtttaaataattgtactgggttccataatgcttatcttagaaactttagtaaaagaaaatatatgaaccgtgcatttgtgaatgccccccttagagcattcatccaagttcagtgtgtagtgtgatggttattatagatatttaaagtatagtaagtggctgtgtaacaggagagactgctgtttacctacgtactgaagggtaactgctgcccgcgtaattaaatcagtattgtcctttcctgtcggtttgatcaattgcggtaccggtagcttcctgcttgtgactgttacctaattgtgtcaatgtacatctgtagtatgtacatgtgaaagtgcctttctattttagaggagttttagccttgctcttgtaccgttgccccgctctgtgccccacccccacctcctcctcccaattcctgctgcccactcgagtgtttcgaagcttcctccctgtcccccaccttccccatccccgccttcctgtgcctcggtgctcagtaatgtcccatctcacctccctgtcggtcctcagactgtctcgttttccttgtagacgtgattgtgcctttctcacccctgtgtcctcccatcccaccgcatcagtcccccgctcatgtgctgctgacagcatcgcattcgcccgtgctctgtactgcctctcaccatttcattccctcctctctgaggtgaaaataaagggggatgcttttacagtctggaaagaaaaaaaatgttttgttaatctgttgtgacaatgcacttttatgtatagtactgtacatttttggcatgtaccattacaggcttcagtatacagtcaggtttgttcttcacggtgtatctttataataaataagatagttctggctgcctttgtctgcttccagtttgatgtgcatctctgtggtgtctttgttcctttcctttcattcatcactactttctccttgacagctagcttgcattaaataatgtgaaacttttacctttaaaatatttttttatctcactttcatttcttgttcatttggaaatagggtgtcctgcacagggccctgcccatgaagctgtggtttttcagtcatggtttggaggctcaatgtgtagtcagagaaaagagtcttggcagacacttaactgagaagctgagagtgtacaagcctcctaaacatacaccagattgaaatctttcttttgagaaagactctagttaaccacggcaagcccatctttggtttcatttgaataaattgaaaaataatccttaggttatttttctgtgcttagaactccccgtgtattggtatttttctttacttttttttttttttttttgagacgaatctctctgtgtcacccaggctgtagtgcagtggtgcaatctcagctcactgcaacctccccctcctggattcaagcgattctcctgcctcagcctcctaagtagctgtaattacaggcacccgccaccacacccagctacttttcgtatttttagtggaaacggggtttcaccatgttggccaggctggtctcaaactcctgacctaaagtgatctatctacctgcctcagcctcccaagtgctgggattacaggtgtgagccattgcatctggccaggtatttttctttaaatataaaaaaaagataacttgaggtctagcaatatgtagtagatagctttgtaaaacaatgtaagttgtgcaagattgaatattgataagatataaagtttaaaaaatgacaggcaaatcaaggaaaaacactttttattaaagtgcagaatactaacaaaagtgtgcaaatcattagtgtaacagttctcacgagctgacacactgatgtatccaccacccagtttaagcaatagcacattatcagcatcccagaagctactgtgctcatgcctctgtgaatgtatcagtatcctgactaatcacaccatggtgtagttttgcctgtcatcttagctttctataaatgggttcatacagtatgtagattttgtgtctggctccttttgttgaaatgtatgtttgtaagagtcgtcattgttagtaaaatagtggtttttccatttttactgctatatagaattccattacatgaatatgctcaatattatatttattttagtatttcctgattaaactttgggtagtatatgcagatatctttaaacatggagaaatgaatggggggtgagggacccacctgtcaaaggaattgttttcccaaactatgacggaataatgttgaactaacctgttgaccggaaggcctactcaaaggcaaggatacttttctttctttccaaaaaagcactgtctgatatggagactggaaatattcatagatgacactgaaactagttgaagctttacttgatgcttatcaagtcatgttctcttacccgatgctggatgctttttcttcaatgcctactttaggaccacagagttggatttagaggctagcccaccaggaacaaatgcccaaatcagtctgtagagttgttccaggaaagactccaccatcctgctaccctcaaatcttaagctcctcagcctgccacgaccatctcctgttgagaaaattgcgcctgcctccccatctctcactcccgaaccagagtcccaacggggtgtaactggtcgtcagttcccacagttcatatgcctgcaccctgtaagaatcttagaaaggcagagcaagggtgtttgctggcttctgccttgagtagttgggactcctaaaaaggaaaattccccaagtttgacctagaatgtcaaaaaggtcctaaaagcacagaatgatggtaaattctatccacaggccatatagccctggaaaatattgggaaactgaggcatgggttggtaatttattgaagtttagtaaacgaatttgaattaattaggaccagataatcaatttttggcttacttatactatagtataagcaaataagtatttaaactttagtataaatatttttgctcacttaataatcacggtgaggttcatcacctcttcagtagccttttatctgtttctacatagtaaatagaaaacttgccttctataataaaaacaaaatagtttttctatcaaggtcagtctcagcaagagaaatgggactgggctggatatcaacacatgtgcttgtgtgcatgtgcacgtgtgtgggtgggagggtgcggaggggttgggaagagagattgctcctcccgcagtgctgaaacaacatgccttgttcagtattaacatcttgaaggcagttatggcagcatgatccaggagatcgtcagctctaggatatttgcgatccaattctggcgacttatggatggatccttcacacccaacagctgtctatcaggggtgcttccgagggtcactgggtttcttttagctgcttggctgtgcagctgaagttaggacttttgatgaattaccctctcaatgatggtgtattgttctaatcttctgtctctgacatacccaaggaaccccttgtgtaaaaatcatgtccctctaaatgcaagtggatgattgtgccaataagccaggagagaaggaaacatcttcagtggtccagtggcacattcaaaattgtacaatgacatgacattaactcaaaaatgaagtttgaggttctgggcctttgatggactgcatctattaaaaacaaaaagtggtgtctcatgcctgtaatcccagcactttgagaggccaaggcaggaggatcaaaaaatgcgaatttttatatttttttgtgagatcccatctctaccaaaaaaaaaaaaaatacaaaaattagccagacatagtagtacatgcctatagtactaggtacttgggaggctgaggcaggaagattgcttgagcccagatgtttgaggctgcaataagctatgattgcaccactgcactccaacctgggtggaagagtgagaagctatctcaaaaaaaaaaaaaaaaaaaaaaaaaacatggtcaagatttgtaatagaaattgccatttgaattttggtctgtaagcccaaagattgttactgtgttagtaactaaatattacgagatgcattaggaaaagaaggaaaagaaattttaagtaagccaaaaatctattatatagtcataagtcaaactcagttactagacttcaacaaataccaacccatgcctccatttcccaaacagaaataataatatgaacatcttagtatattgtcttctaatccttacattatgttatttttaagcagagtcaaactcatattctgtatataattgtatatacattgggtttttctcccttatagcaattcacactaggagtctcagtcaacatgattttttaatggctgtataatattctagcgtatgaacacatcattatttaaccattttcctgtcactgagtgagcctgtttgaaggttttgtttttttttcaattgaatgttatgttgtggtgagcagctctgtatataataattaattgtctgtgtttggatcataaagttagcattgactccaaaaagtgaaatcactgggtcagaggatgcaattatctgtaaggctcatgacaaatattgccgacctgttttccagcaaagttgtacaaatttacatccctgccagtaatgcataacagtacacgagtataaaacatggtcatgtttctttaccagtgtactaggtgagtgataggctcaatgcaaattcttagcagtttgttaatgtgcacacccacatttccagagtacaaatctctatttcactcacctctgtgtcctaaacttcagatgactctttattgtttcagctaaacatcagcaaacagagattttcctcaggcaccttaagctcaacagacccaaaaattaaacccactttgtttcattccaaaaaatattctgcagcccctctacatcctccaatctgttccgctgcctatctctgctctaagctaattctgtgcaccattccccttgccacaacgattgccgtagcttccacggtggtgtggctgtgcccactgtctcctccttgaaatgattatctacactgctgccaataaatcatctttctcaaaaacaaaatgagaaacctaacaaacaatcattgaaaatgtaccatgtactgacatcgttttcctcaacacgttgcatgtcaatagccaacatgtattgagtaccagactccatgctacaaatgttaaccctcataagaaagccaagagagccacagttattatcatcatctttatccgtaagaaaattaagccgcaggagttaaacacttgccctggtcacacagctagatagtgacagagcaggatttgattccacgccatctggtgctggaggctatgctcataaccactgctgcattctgacctctgtaacatgctcatgtcattaccctgctcaaaagccacacgtgggtccccactgctgcaggacggcatactactgtgtcttattcatctttgtatcttcaagcctaatgcatcactaactaaatagcaaatcggcggaactgaaatgaattcaatgtctgccgctttgacctcagcctgccatttcagccttcctgctcaccacctcctcttcggaacctttagtttcagccatagcaagctacctttctttgaaaatgtgatgctgtgtgctccctccgcatatacttcatgtcattcctcagcctaaaatgtcccctacttcatcctgacaactgcctgttgaaattatattcatcattccaaacccaacaaaatggttacatccttcatgaagggttccccaaacctcccagctggcattaattgttctgttacattttgttttcattaaatcaggctcccttccggggatctagctgtgaatgagacacacagggctcctggtctcatggagtgtacttcctggtatgatttaaaaaaaaaaaaaaaaaaaaaaaaaccactacataagccaacagctaaaccggcaaaataatttcaggtgttgataactgctacaaaaagcaaaagtgaaataaacagggtgatagaatttagagtgtctaggagaagcattttagatgggacagcttgaatgccaccttggatgtggtagcatttgagctaagacctgaataatgagaaggaaccagccatgtgaaaaggaagagaaagacccaagcagaaggaactgcacatgggaaaacaggaccatgctcacgtggttaaagagtcaaacacattcactgtgactgtaccaccataagcaagaagccctggagatgaaaataaaggccagaatgtggacagagatcagattttggaggccaaagtaaggtacttaaaattagccgggcttggtggtgcacaactgtaatcccacctactcgggaggctgaagcaggggaattgcttgaacccatgagacggaggttgcagtgacccgagattgtgccactgcactacagcctgggcggcacagtgagactccatctcaaaaaaaaaaaaaaaagtaaggtacttagatgtcattctaagttcaaggaaagccattggaagtttccaaaaaggaacatgacagcatctatatttttagaagatgaccctcaaaaccacaatgagatatcacctcatacccattaggatggccactctcaaatgatcaaactccagaaaataacaagtattggccagggtgtagagaaactgacacccttgtgcactgttggtgggaatgtaaaatggtagagccactaaggaaaacagtgtggaagttcctcaaaaaattaaaaataaaaccctcatatgatccaccaagcccacttctgggtacatatccaaaagaattgaaaacagaagagatatttgcacactcatgttcacgcagcttaattcacaatagccacaagagagaagcaacccatgaatggatgaatgggtaaagaaaatgtgccatacacataaaatagaatattatgcagccttaaaaaagaaggaattcctgtcatatgccacaatatggatgaaacttaaggatactaagctaagtgaaatgagccaatcaataaaggacaaacattgcatgattttacttctatgagatatctaaagtagtcaaactcttataaacagaaagcagaatggtgattgccagggatcgggatgaggaagaaaatggaaattgttgttcagtgtttacagggtttcagttttgcaagataaaaagttctaaagatctgttgtccaacaatatgcatgcagataacatcatattaaacatggttaagatagtaaattttatactatgtaattttttaaccacaattttaaacatcactgtagatgttgtagttgtgtttggggtccacgggtggggaggagcttgggaaggaatggcatgagggaagtgagagaccacaattaaggagcaacacaggagatgagggtggcttggactagatagccaggtagaaggagaggaagggatgaaccgggggttcgtttcagagtcaaaatcaagatttgctaataaattaaatatgggaataaagaaagaaaagaatcaagagtggctcctagtatttgtttgagcaaatgggtggaatatattgatatatacttaaaaagaatgactggggaaaggaagaagttggccaggatgtacaaccaagtattcacgtttgaatttatttaatttaagataggtattagacttccaagtggagaagtctaggaggcagatggacttgaagctcaggggaggatttctggccagaaggtgtaaatttgatatttaaagctatgggactcccggaaagagaaagagaaaggaaggtacagagcacataaccaagccctgggaagcccagcttgggagagcttgggtggagtgaggagctggcagaggagacagaaggagcagccagggcggaggaggaaaaccaggaggagcatgtaatgtgatcagtacccagggaagaaatgattgccatttctagtgtgcatttgttaacataaatatgataataaaaatagttaacatttgttaaatatatatatttttttctttttctttttcttttttttgagacagagtctcactctgtcacccaggctggagtgcagtggcatgatcttggctcaccgcaacctctgcctcccaggctcaagtgatcctcccacctcagcctcccaagtacgagggattacaggtgcatgcaaccatgcccagctagtttttgtatttttttgtagagacggggtttcaccatgttgcttgttaaggccgggcacggtggctcacgcctgtaatgccagcactttgggaggccgagacaggcggatcacctgaggtcaggagtttgagaccagcctggccaacatggcgaaaccccatctctactaaaaatacaaaaaaattagccgggtgtggtggcgcccgcctatagtcccagctgttcgggaggctgaggcaggagaattgcttgaaccagggaggtggaggttgcagtgagccaaggtcacgccacggcactccagcttgggtgatagagtgggactccgtctcaaaataaataaataaataaatatattaaaaaataaacaagttcaggcttgttaaatattttttatgtttgtttgtttgctttgttttttttgagacgtagtcccgctccgtctcccaggctggagtgcagtggcgcgacctcggctcaccacgacctcggctcaccgcaacctctgcctcccggtttcaagcgattctcctgcctcagcctccagagcagctgggactacaagtgcgcacaaccacacccagctaatttttttgtatttttagtacagccggggtttcgccatgttggccaggctggtcttgaactcctgacctcaggtgatccacccgcctcggtctcccaaactgttggcattacaggcatgagccaccacgcctggctgagttaaatattttctatgtgccaagcactgtgctaactgctttcatattatcggatttagtcctgtaagaccggaatcattattatccccatttttcagattaaaacaaacaaacaaaagctgaggtttaaagaaattatctcttgtaaaatcacacagctaacaattgagccagtatctggacctagatctattgcctacagagccgcacgtttaactactgttatcttgcctccttattgctccacacacttgaaatataaatttttaaagacattttattcttttttgtcttcatcagaatttattgaatcctgattattttttccttaatgttgattttgtagactcatttgcaggaagaacaatgtcaggtggagagaaggaattgaatgaatatttttaataaatttgtagatgttaatatgatttacttatttgcaattttcatagctatatgatattctatcccatttccagtgtttttgctcttttagtagcaaatactctgaatctctgcatatgttactcattttctatcatcctattccttgtgatggatacccaagggtactcatctacaggatgaaagggtatgagcacgtttctaggtgccctgaccccaagattaggggttttgttagaggcaaagctaaaaggaaatgataaaataaatgaatatttatagaagttaaatctattaatctagccttattacaccgagtacaacagggaataataagccatctatctgaacgtgcacggttagggcctcaaggaaagtgggctcagcaatgagtgttggtacacatggaaaatcacatttgccatgttttctatggctttgggctgctgctgcatcactgcagtttaataggaggaggctggtgaaaatgttaccaactgccaggggtcaatggcgaaagaacacatttctctaggaaagattaccttctctgaagaagtgatagggggaataaggcataaaattatctgacctgagagaccttaacagctaggcctgcactgctcatgctttgggaccagaaagcggatggtttgatatggtagctgcacttctaaaaaaaaaagggggcattcttggcaggagaaagggtgttacatggaaagatcagcgatagtacacacgccttcccatagagtgaggtggctttcccacccctcaacactccttcagacccccactgtaacaaagggatgtgtctacctctaaattcatcatttactgaacaaataactcatgagggttaccatatgtctgacactgtaggaagagctgaagcagggcctaaaacactatagtgcaagtatctgtttacacatctgtatgagagtaattgatgctagctgctgtaacaaacaaccccccaaactcagtaacacaatcaagctgtatttctccttcacatcatagcctggtgtgggtcaggtaggtgactcagggttctaggctccttccatttttttgtcgctgccacactggaaatgggatagaatatcgtatagctatgagaattgcaaataagtaaattatattaacatgtacaaatttattaaaaatactctttcaattccttctctctgcctgacattgttcttcctggaaatgagtctacaaaatcaacattaaggaaaaaatgatcaggattcaataaattctggatagaaaaaagaataaaatgtctttaaaaatttatatttcaagtgtgtgggggcaataaagaggccagataatagtagttaaatgtggggctctgtaggcaatagatctaggtcagatactggctcaattgttagctgtgtgatttcacaagagataactgatgctagctgctgtaacaaacaaccccccaaactcagtaacacaatcaagctgaatttctccttcacatcacaacttggtgtggatcgggcaggtgactcagggttctgggctccttccattttttttgttgctgccaccttagtacgtggccaccatgaagaggaagagaaagcacttgcaatgatgtgaggttttctgtcttggtatggaggagacatgaatcactactgtacatgtccaagtcacatggcaagggaggccaggaaatgtcatcttcctataatgcaagaaaaagaacccagggccgggcacagtggctcacgcctataatccccacaatttgggaggctgaggcaagaggattgcttgagcccagagcaattaaacactgcctggtgcatagttagtgctcaagaattgtgctataatcaatgttactaaattatctaggattagatgtttctaaattaaaactatttcctgctttgtatttgtcctttattccaaaaacttaaaaatttctcatttctggtttgtcagggatgaaatactaaagcaacttcatggattgtgatttcaagtatatgaaaagtttaagacccaattgcttttgaaggagattcatctagaaaaaccagggattcaaacccaacacatcgggtgctaaagtctaccctcttagttgacatagaattaaattaaaatcagtattgattggattatgctttgataaaaatgtaacttcatttaagtctagtaaataattaggattatgaggtcaggagtttgagaccagcctggccaatatggtgaaaccccgtctctactaatgatacgaaaattagccgggcatggtggcgtgcacctgtagtcccagctactcgggaggctgaggcagaagtatcacttgaacccgggaggtggacgttgcagtgagccaagatcgcaccactgcactccagcctgggtgacagggtgagactccatcttaagaagaaaaaaaaagcaattacttttgcaccaacctaataaaaatgaaaaatcccaatgaaaatgcatgaatatcatgtgccttgacaacttacggagcatttggaacatgtcaaacagtaatcagaggtcaggttgaggaaaaaatgataagaaccctctctgccccaccattcacatcattcagtggatctatgtactaaatctagccagtgggttgtgagcaaaaatgatctgtgtcacttgtgggttaaaatataaaagagtgctaggcacactggctcgcacctgtaatcccagcactttgggaggctaagtgggaggatcgcttgagcctaggagttcaagaccagcctgggcaacatagcaagaccccatccctacaaaacagttttttaaaaaactagctgtagggcaggcacggtggttcacacctgtaatcccagaactttagaaggccgaggtgggtggatcacttgaggtcaggagttcaggaccaacctgaccaacatggtgaaaccccatctctactaaaaatacaaaattagccaggcgtggtggcgcatgcctgtaatcccagctactcaggaggctgaggcaggagacttgctttaacccaggaagcggaggttgcagtgagccaagattgcaccattgcactccaacctgggcaacaaaagtgaaactccatctcaacaaacaaacaaacaaacaaacagtagctggttgtggtggtgtgtgactgtgatcccagctacttgggaggctgaagtgaaaggatcgcttgagcctgggaggtagacgctgcagtgagctgagatcatacctctgcacttcagcctgggtgacagagtgagatcctgtctcaaaaaataataacaataacgtatgagagaggattcaagctttccaagcagtctcttcccctgccatggcactcatagaagcctcccgttaagatggcagagctgtaatgctagaaaagcacagactgttaagtcactgcatggaggatggtcatcctggagaattgtttggactcgagtggactctacaacagcaggaaataaactactgttatatcaagctactgacattgagaattaggttgcatagttatgccacagcataatgtagcctttcctgatgcatacaattacttttcctttcttttttcttttccctggagttcataattacctttgtttcatttgcttagctttctatttacataaataggtaaaaattccttctcaaaaatcttttacagaagtgttctcaaactcaatgcattgaaacatgctatagtttataaatcttggatccatcacttaaagaggcatttgacctgtttcagtatggataagttgttctctaagtctactgcatagctgagagcctaagatctctggggactcactccacttttctcttgagttggttccactatttcctggaacctcatacagccatctcagctagtcatgactgacctagatttaacacagtatatccttaatcagcttcctgattgagagtgtattttgagacattccatgtctagaaagtgtctttatctcacatgtaattgtgatagtctggctgagtataaaatcttacttaggatgttaacttaaaatcaatgtggtcaaggaaaggaggaaaaatatgtcctcctagtaattcccagtgtaagtggaaatgacccagccctagatttacttggctttagtttccatcaccatagatttctcaatcaaaaggcaaatatatctcatatgtcggaagattaatgtatgaataatcagtaccactggcatatggctactctcctattttccttacccctttgtcttcacaaggaagcccagactctgtttgccagtggctgggtcctggggccgataacttcaagctaaacattcaatatcagtatggtaggtgaggaagattttctcagagtggctcattatctggaaagtgtaagaatgaggtggcagaaagaggtagaaacagcatgaaaaggcagagccaaggagagatcgacaaacaagaaggattgtgcccatatttctctattctctctagcattatgaatcatttcccctcaggattttggagatgttgcatcagtgttgctaccgaacattccaaagccattctaattctgttactttgtatgttcttttttttccctatacataatttactattgcatgtttttctcagggtttctgaaatttcagaatatcctgatgtggatctattttgattcattgtactgaagaccatttcagcccatcttacactttgattctggaaagtcttcttttccctggagcttataattacttttatttcatttgcttagctttctatgtacataagtagataaaaattaattcattctcaaaatcttccacagaaatgctttcaaactcaatgcattaaaaacatgctatagtttataaaccttcttggatctatcaaggaagatttatttgattattttatctcctccattccatctgttttcttataattcctaatatttggaggttggacctcatgaactgatcctataattttactaattttcctccagtttttcatctatttgactttttgctctattttcagggaaatatcctcaactttatctgctaactcttctgttaagtactttatttctgctctcatgcttttaatttccaaaagctctttttgtgagctggctgttcatttttttatagaatcctgtccttatttgacaggtcctatatatttttttattttgagattattagtgatagttcttctaagttttcttctctctgcacactgtatttcctctaagttgcttttttaaatttttgacctgtgtttgctttgctttcgtttatgttacaggctttcctaaaattcctggtgatccttggctatctgctcgaatttaaaaacaagcactaaagaagggcactaaaaaacagattgtcatagcagtattatccataatagccaaatgatagaagcaatgcaaatgtccatcaacagagggacaaatgaataagcaaatgtggtatattgatacaatggaatactattctgtaatgaagatgggaaagaacggagtactgatacacgctacaacatgggtaaactgaaaacattattacgtgaaataagccagtcataaaccacatattgtgtatattttatccataagaaatgttcagaataggcaaatctataaaaatacaaagtagatttgtagttgctgagggctgggaaaagggtttggggagagaaatgactgctaatgggagtatgggatgttcttttggggctgataaaatgttccaaaattcattgtgtgataactacacatctgtaaatatactaaaaaccactgaattgtatccaataaagtactaaattgtatgatatatg

SEQ ID NO: 20422 - DNA, 2976 bp, Homo sapiens
  misc_feature 1..2976: note = ENST00000537556
  source 1..2976: mol_type = unassigned DNA
ggaacagctggataatgtccaccccgagccgattcaagaaggacaaagagatcatagccgagtatgaaagtcaagtcaaagaaattcgagctcaactggtagaacaacaaaaatgcctggagcagcaaacggagatgcgagttcagcttctccaggatctgcaagatttcttccgaaaaaaagctgaaattgagacggaatattcccggaatctagagaagttagcagaaaggttcatggcaaaaacaagaagcactaaggatcatcaacaatacaagaaagaccagaacctgttgtctccagtgaactgctggtatttgctcctgaaccaagtaaggagagaaagcaaagaccatgcaaccttgagtgacatctatctgaacaatgtgattatgcggttcatgcagataagtgaggattctaccaggatgtttaaaaagagcaaagagattgcattccaacttcatgaggatttaatgaaggttcttaatgagctttatacggtgatgaaaacataccatatgtatcatgcagagagcatcagtgcagagagcaagctgaaagaggccgaaaaacaagaggaaaagcaaattgggagatctggtgatccagtcttccatattcgactagaggagagacatcaacggcgaagctctgtaaagaaaattgaaaaaatgaaagaaaaaagacaagcaaaatattcagaaaataagctaaaatcaattaaggcacggaacgaatatctcctaacacttgaagccaccaatgcctcagttttcaagtactatattcatgatctttctgatttaattgattgctgtgatcttggctaccatgcaagtctgaacagagccctaagaacatatctgtctgcggagtacaaccttgaaacctccagacatgagggcttagacattattgagaatgcagttgataatttagagcccaggagcgataagcagagattcatggagatgtaccctgctgcgttctgtccaccaatgaagtttgagtttcagtctcacatgggtgatgaggtgtgccaggtcagtgcccagcagccagtccaggcagagctcatgctcaggtaccaacagttgcagtcccgccttgccacgctcaaaatcgagaatgaagaggttaagaaaacgactgaagccaccttgcagacgatacaagatatggtcaccatcgaggactatgatgtttctgaatgcttccagcacagtcgttccacagaatcagtgaagtccactgtctctgaaacctacctgagtaaacccagcatcgccaagagaagagccaaccagcaggaaactgaacagttctacttcatgaaactcagagaatatttggaaggcagtaatctcatcacaaaacttcaagccaaacatgacttgctgcagaggaccctgggagaaggtgagttatccaaaatgtatgggaagatgacctggatgatacatcgtatcatgtatatattccagaaagagtatgaattgtatatttgtgctttaagaagcagaggacactctgtgtttagatttggttttgtttgtatatgtcatgattaagttctcctggcacgattttcttctaaagcatggtgctaaccttgaggaagcgtagtgaaatctagggagggctggaaagtcaataccgagctcctagggagggatcttcagagtgtggtgctcctgatcgtagaaaagtctggaaacactgcccctcccctacctgctgaccccccagtctcttcttccttcccttctcagacttctgcacccttccaaccccacccctgtttgttttaatgggcgagtatttgttgttccatctgttgcctgtttagactctggaaaccagttaaaccagtttgggtgatttttttctttcagcaggcattggctgtagttgagaaacaatcttaaagtataagtagattgctatgtctaataatagtaacaaaacaacagcaacagctaacacttgaaaggctttctctgtgccaggctttgttctgagttgtatattttactgtgcactaataatttctccgtttttacaaatgaggaaactgaggggaggcatgagaatacaggcaaaggggactgtataaatgttaatgtttctctttgtctttatgaaatttaaaaggaaaaaaataaatacaagccaagttcctgtcttaagtgcttcatagtctgtaactttatcttttattcacactagaccctgccagaagttagaaaaagtaaaagagaatgtggaagggagtgggaaatgagaggactgagttgtgtgagtaactcaggtcaaaaaagagattgcgcctcttagacctaaattcttgcctcccacaattctggaaccttccttaaccataaagtttctatcaccttatctcctggtttccaccaaagaactcatcatcctcagggaatgaccacatggagaaaggttatcatgacctaagaaccatgtctgacacagttaggatgaaaaggccaattacacctagaaggaaaaaaaaaaaacaacgcaaactactaaaaagtgtcattaaaaaataaaataaccaaatacaatgtatgaaccttcacacactagattaaattagatactgaatcaaaaagcaaaagttatgaaagacattttaagaacaattagggaagttgaaatacagactgtatattaaataatattattgaattagtgttaattttcctagatatgataatggtattgtgattataaagaagaacattcttattcttaagaaatgcttgctaaagtgtcatgatgtctgcaacttaccttcaaatggttctaaaaaaaaaaagagggagagagaaagaaggtacagtcaatgtggcaaacattaacagccggaaaatctacatgaaggggataaggatacttcctgtactgctcttttaactcttctgtaggtttgaactttaaaaaaaaaaaaaa

SEQ ID NO: 20423 - DNA, 5652 bp, Homo sapiens
  misc_feature 1..5652: note = ENST00000543397
  source 1..5652: mol_type = unassigned DNA
cttgctgttaatgaacttggttaaacatggtcaagtgtatgtatgtatatattatcagtactggccttctctatctaagaggaatagcaagaaatttagagacattatttggacattgatttctactaactccactgaattagattcagccttcactttttgggaaatgcacggacactgggaaagatgaaatgaagaagttttccagcatgatgttcttgtctttggagcttagccttacttaggtcttagaacaaaaacaagtcggtagttattagttactgtatctcattttccaaaacacacgtttctttgttacagtcatttacacatatttttgcatgccacatttttgcttttgagcttttgctgaatcactaaatgaccacctttcatgttcctaatgtattaaaattatcagaggattctttgaggattaaatgtgtcagtaagggtattattttgaacaatgcgtaaaaggtgaaggccagctgaagaggcctttttgttgtgaacagaataatatactggaatctgaggactgcactgttatgaatggattatttggctatggaaagaagttatttttaggcacagcatccctataagccctgaagctatgtgttttacaaactagaaattatgcactaaataaaaattaccagatgtcagtctctgtatgtgccaaatggcaaatgtgtaatggttcagagcctggaagaaatgatgcttatttctttgccattcaaactcaaaagggatagctgaggtagagtgctgttgaaaaaattgcagtgtttccagctacccaaagatgttacgaattgttatctgaaaggctttcattctttcccctcatggctcgttgtgtgtttgtggcattacaaatgtaacccacatatttattctaatttattacattctttcctgaggctcctcttgttcttttaaagggtcagcagataacttattttaagaatcaacctggacacagtattctaacaaaggtccaatacagagctaaataaataataggagtcatagccagacacagtgactcacgcctgtaatcccaacattttgggaggccaaggcgggtggattacctggtggtgcatgcctgtagtctcagctactcaggaggctgaggcaggagaatcacttgaacccgggacgcagaggttacagtgaaccgagattgcgccactgcactccagcctgggcaacagagcgagacctctatctcaaaaataaataaataaatacatttaaaatatatatatatatatatatatatatatatatatatatatatatatatatatatatatttatatatatttcgtgacttatatcttgcacataccagcatacctcattaattttaatgtaaccatccattggcttctcttctctccttagaaattcgagctcaactggtagaacaacaaaaatgcctggagcagcaaacggagatgcgagttcagcttctccaggatctgcaagatttcttccgaaaaaaagctgaaattgagacggaatattcccggaatctagagaagttagcagaaaggttcatggcaaaaacaagaagcactaaggatcatcaacaatacaagaaagaccagaacctgttgtctccagtgaactgctggtatttgctcctgaaccaagtaaggagagaaagcaaagaccatgcaaccttgagtgacatctatctgaacaatgtgattatgcggttcatgcagataagtgaggattctaccaggatgtttaaaaagagcaaagagattgcattccaacttcatgaggatttaatgaaggttcttaatgagctttatacggtgatgaaaacataccatatgtatcatgcagagagcatcagtgcagagagcaagctgaaagaggccgaaaaacaagaggaaaagcaaattgggagatctggtgatccagtcttccatattcgactagaggagagacatcaacggcgaagctctgtaaagaaaattgaaaaaatgaaagaaaaaagacaagcaaaatattcagaaaataagctaaaatcaattaaggcacggaacgaatatctcctaacacttgaagccaccaatgcctcagttttcaagtactatattcatgatctttctgatttaattgattgctgtgatcttggctaccatgcaagtctgaacagagccctaagaacatatctgtctgcggagtacaaccttgaaacctccagacatgagggcttagacattattgagaatgcagttgataatttagagcccaggagcgataagcagagattcatggagatgtaccctgctgcgttctgtccaccaatgaagtttgagtttcagtctcacatgggtgatgaggtgtgccaggtcagtgcccagcagccagtccaggcagagctcatgctcaggtaccaacagttgcagtcccgccttgccacgctcaaaatcgagaatgaagaggttaagaaaacgactgaagccaccttgcagacgatacaagatatggtcaccatcgaggactatgatgtttctgaatgcttccagcacagtcgttccacagaatcagtgaagtccactgtctctgaaacctacctgagtaaacccagcatcgccaagagaagagccaaccagcaggaaactgaacagttctacttcatgaaactcagagaatatttggaaggcagtaatctcatcacaaaacttcaagccaaacatgacttgctgcagaggaccctgggagaaggtcatagagctgaatatatgactacaagccgaggacgaagaaactcgcacacaagacatcaggactcaggacaggttattcccctcattgtggaaagctgtattcggttcatcaatctctatggtcttcagcatcaggggattttcagagtgtctggttcccaggtggaagtcaatgatattaaaaattcatttgagagaggtgaaaatcctttggctgatgaccagagtaaccatgatattaactcagttgctggcgttctgaagctctatttccgtgggctggaaaaccccctctttcctaaggaaagatttaacgatctgatttcttgtatcagaatagataatctctatgagagggcgcttcacatccgcaaactcctcctgactttgcccaggtcggtccttatagtgatgaggtacctctttgccttcctcaatcatctatcacagtacagcgatgagaatatgatggacccttataacctggccatttgctttggcccaacattgatgcctgtcccagaaatacaggatcaagtgtcttgccaggcacatgtgaatgaaattatcaaaaccatcatcatccaccatgagactattttcccagatgctaaagagctggatggccctgtttatgagaaatgtatggctggagatgactattgcgacagcccatacagtgagcacggtacattggaggaagtggaccaagatgctggtacagagccccacacaagtgaagatgaatgtgagccaatagaagcaatagccaagtttgactatgttgggcggtctgccagagaactatccttcaagaagggtgcctccctgctgctgtatcaccgtgcatctgaggactggtgggaaggcaggcacaacgggattgacgggctggtgcctcaccagtatatagtggtgcaggatatggatgatacgttttcagacactctgagccaaaaagccgacagtgaggccagcagtgggccagtcacggaagacaagtcctcatccaaggacatgaactccccgacagaccgtcatcctgacggctatttagccaggcaacgaaaaagaggagagccaccccctccagtaaggcgtcctggcaggaccagtgatggccattgcccgctccaccctccacatgccctttctaactcctcagttgacctagggtccccaagccttgccagtcacccccggggcctgctgcagaaccgtggcctcaacaatgacagtcctgagcggaggcgcaggcctggccatggcagcctgaccaacatcagccggcacgactccctcaagaagatcgacagccctcccattagaaggtccacgtcatcagggcaatacacgggcttcaatgaccacaagccactggacccagagacaattgctcaggatattgaagaaacgatgaacacagctttgaatgaactccgagaactggagagacagagcacagcaaagcatgcccctgatgtggtgctggataccctggagcaagtgaaaaactctcccacccctgccacttccacggaatctctcagccctttgcacaacgttgccctcaggagctccgagcctcagattcgacgtagcacgagctcctccagtgacacaatgagtactttcaagcctatggtggcacccagaatgggcgtgcagctgaagcctccagcccttaggccaaaacctgctgttcttccaaaaacaaatcctaccataggacctgccccacctccccagggtccaacagacaagtcatgcacaatgtaaaaaccagccaagcaaggccataaagggaggtgacttaaaaaagaaaatggattagtgacaaaagtcactgatccataactttccttagttttgtgcttataactggagatcttttggcttttctatgttgtcgaatgtaatgtctgagactagctaaattaacacgggcatttgtattttgtaatttttttaaataactggacatatgtcattttaaggacaatagaaacacttagacttacttgaaaatccaatgctgcaccacttgtaatgaaggcaacaccgctctccacattgtacagagcttcaggtttaatgtagcccagctgagtcagaaaggttgtgacctgaaggcagaagaacccgaatgccacacctcattggagtatagccagtgttggtctgtggcacttgggctgaaaggtgataatggcattgcgtggtagctgacaatgagcaccttcggttccatgtggagcggggtttagctcatgcaaaagacttgcaattgtctccatgggacgatcccagtgggactgtcagcccacagctcgagtgggttggatgcttgcctctttcctaacagttatttccccgggtccagcttaaagactcgatggaaggaggtagaacctctgctgttactgcttgaacttaacctgggaaaggagaggaagacaccatctccaaagctattaatgtcactccttttgcgagcatgattaggccccggagatttccaagtccccccatctacacttacaaacgattagaagggtttaattttaaagactttctggttacactactccacgaactcctccaaagatccgttattcaataactgcctagaaaatgtttccatctcctctaaatccctgtgttctcctctgtggaaatgaaggcagcaagaagcacctgaggccttggttcatgcagtgttctcttttgactaaatcacctaggttcctttaaacatgctacaaagcccaggcatggtggtgcacacctgtactcccagctactcgggtggtttacacaggaggatggctttgggcctagtagttcgagtccagcctgggcagcatagtgtgagaccctgtctctt

SEQ ID NO: 20424 - DNA, 360 bp, Homo sapiens
  misc_feature 1..360: note = ENST00000542381
  source 1..360: mol_type = unassigned DNA
tgaaaacataccatatgtatcatgcagagagcatcagtgcagagagcaagctgaaagaggccgaaaaacaagaggaaaagcaaattgggagatctggtgatccagtcttccatattcgactagaggagagacatcaacggcgaagctctgtaaagaaaattgaaaaaatgaaagaaaaaagacaagcaaaatattcagaaaataagctaaaatcaattaaggcacggaacgaatatctcctaacacttgaagccaccaatgcctcagttttcaagtactatattcatgatctttctgatttaattgatgtgagtacttgaagtttttgtcttttccatattaaaatgaaattaacaataa

SEQ ID NO: 20425 - DNA, 368 bp, Homo sapiens
  misc_feature 1..368: note = ENST00000537585
  source 1..368: mol_type = unassigned DNA
atttgctttggcccaacattgatgcctgtcccagaaatacaggatcaagtgtcttgccaggcacatgtgaatgaaattatcaaaaccatcatcatccaccatgagactattttcccagatgctaaagagctggatggccctgtttatgagaaatgtatggctggagatgactattgcgacagcccatacagtgagcacggtacattggaggaagtggaccaagatgctggtacagagccccacacaagtgaagatggtatgctctccccttatgctattataaagccagtctttatatccctattgtaaacaattgcttgtattaacattttagaggcaaagcacagtggctcctacctataatccca

SEQ ID NO: 20426 - DNA, 836 bp, Homo sapiens
  misc_feature 1..836: note = ENST00000542841
  source 1..836: mol_type = unassigned DNA
ccagcagtgggccagtcacggaagacaagtcctcatccaaggacatgaactccccgacagaccgtcatcctgacggctatttagccaggtaagtagagcctgggaatcaggcccctaagcctccgctcctcctggggccatgaggagccactgcacctcagccttgcagtactgcccggtgtgataagctcttctgttttctccctgtttctgtgaatgtctaggcaacgaaaaagaggagagccaccccctccagtaaggcgtcctggcaggaccagtgatggccattgcccgctccaccctccacatgccctttctaactcctcagttgacctagggtccccaagccttgccagtcacccccggggcctgctgcagaaccgtggcctcaacaatgacagtcctgagcggaggcgcaggcctggccatggcagcctgaccaacatcagccggcacgactccctcaagaagatcgacagccctcccattagaaggtccacgtcatcagggcaatacacgggcttcaatgaccacaagccactggacccagagacaattgctcaggatattgaagaaacgatgaacacagctttgaatgaactccgagaactggagagacagagcacagcaaagcatgcccctgatgtggtgctggataccctggagcaagtgaaaaactctcccacccctgccacttccacggaatctctcagccctttgcacaacgttgccctcaggagctccgagcctcagattcgacgtagcacgagctcctccagtgacacaatgagtactttcaagcctatggtggcacccagaatgggcgtgcagctgaa

SEQ ID NO: 20427 - DNA, 8406 bp, Homo sapiens
  misc_feature 1..8406: note = ENST00000631006
  source 1..8406: mol_type = unassigned DNA
gttgtgaccactgaacaaaacttgcccattgaaagcaaacccggaacagctggataatgtccaccccgagccgattcaagaaggacaaagagatcatagccgagtatgaaagtcaagtcaaagaaattcgagctcaactggtagaacaacaaaaatgcctggagcagcaaacggagatgcgagttcagcttctccaggatctgcaagatttcttccgaaaaaaagctgaaattgagacggaatattcccggaatctagagaagttagcagaaaggttcatggcaaaaacaagaagcactaaggatcatcaacaatacaagaaagaccagaacctgttgtctccagtgaactgctggtatttgctcctgaaccaagtaaggagagaaagcaaagaccatgcaaccttgagtgacatctatctgaacaatgtgattatgcggttcatgcagataagtgaggattctaccaggatgtttaaaaagagcaaagagattgcattccaacttcatgaggatttaatgaaggttcttaatgagctttatacggtgatgaaaacataccatatgtatcatgcagagagcatcagtgcagagagcaagctgaaagaggccgaaaaacaagaggaaaagcaaattgggagatctggtgatccagtcttccatattcgactagaggagagacatcaacggcgaagctctgtaaagaaaattgaaaaaatgaaagaaaaaagacaagcaaaatattcagaaaataagctaaaatcaattaaggcacggaacgaatatctcctaacacttgaagccaccaatgcctcagttttcaagtactatattcatgatctttctgatttaattgattgctgtgatcttggctaccatgcaagtctgaacagagccctaagaacatatctgtctgcggagtacaaccttgaaacctccagacatgagggcttagacattattgagaatgcagttgataatttagagcccaggagcgataagcagagattcatggagatgtaccctgctgcgttctgtccaccaatgaagtttgagtttcagtctcacatgggtgatgaggtgtgccaggtcagtgcccagcagccagtccaggcagagctcatgctcaggtaccaacagttgcagtcccgccttgccacgctcaaaatcgagaatgaagaggttaagaaaacgactgaagccaccttgcagacgatacaagatatggtcaccatcgaggactatgatgtttctgaatgcttccagcacagtcgttccacagaatcagtgaagtccactgtctctgaaacctacctgagtaaacccagcatcgccaagagaagagccaaccagcaggaaactgaacagttctacttcatgaaactcagagaatatttggaaggcagtaatctcatcacaaaacttcaagccaaacatgacttgctgcagaggaccctgggagaaggtcatagagctgaatatatgactacaagccgaggacgaagaaactcgcacacaagacatcaggactcaggacaggttattcccctcattgtggaaagctgtattcggttcatcaatctctatggtcttcagcatcaggggattttcagagtgtctggttcccaggtggaagtcaatgatattaaaaattcatttgagagaggtgaaaatcctttggctgatgaccagagtaaccatgatattaactcagttgctggcgttctgaagctctatttccgtgggctggaaaaccccctctttcctaaggaaagatttaacgatctgatttcttgtatcagaatagataatctctatgagagggcgcttcacatccgcaaactcctcctgactttgcccaggtcggtccttatagtgatgaggtacctctttgccttcctcaatcatctatcacagtacagcgatgagaatatgatggacccttataacctggccatttgctttggcccaacattgatgcctgtcccagaaatacaggatcaagtgtcttgccaggcacatgtgaatgaaattatcaaaaccatcatcatccaccatgagactattttcccagatgctaaagagctggatggccctgtttatgagaaatgtatggctggagatgactattgcgacagcccatacagtgagcacggtacattggaggaagtggaccaagatgctggtacagagccccacacaagtgaagatgaatgtgagccaatagaagcaatagccaagtttgactatgttgggcggtctgccagagaactatccttcaagaagggtgcctccctgctgctgtatcaccgtgcatctgaggactggtgggaaggcaggcacaacgggattgacgggctggtgcctcaccagtatatagtggtgcaggatatggatgatacgttttcagacactctgagccaaaaagccgacagtgaggccagcagtgggccagtcacggaagacaagtcctcatccaaggacatgaactccccgacagaccgtcatcctgacggctatttagccaggcaacgaaaaagaggagagccaccccctccagtaaggcgtcctggcaggaccagtgatggccattgcccgctccaccctccacatgccctttctaactcctcagttgacctagggtccccaagccttgccagtcacccccggggcctgctgcagaaccgtggcctcaacaatgacagtcctgagcggaggcgcaggcctggccatggcagcctgaccaacatcagccggcacgactccctcaagaagatcgacagccctcccattagaaggtccacgtcatcagggcaatacacgggcttcaatgaccacaagccactggacccagagacaattgctcaggatattgaagaaacgatgaacacagctttgaatgaactccgagaactggagagacagagcacagcaaagcatgcccctgatgtggtgctggataccctggagcaagtgaaaaactctcccacccctgccacttccacggaatctctcagccctttgcacaacgttgccctcaggagctccgagcctcagattcgacgtagcacgagctcctccagtgacacaatgagtactttcaagcctatggtggcacccagaatgggcgtgcagctgaagcctccagcccttaggccaaaacctgctgttcttccaaaaacaaatcctaccataggacctgccccacctccccagggtccaacagacaagtcatgcacaatgtaaaaaccagccaagcaaggccataaagggaggtgacttaaaaaagaaaatggattagtgacaaaagtcactgatccataactttccttagttttgtgcttataactggagatcttttggcttttctatgttgtcgaatgtaatgtctgagactagctaaattaacacgggcatttgtattttgtaatttttttaaataactggacatatgtcattttaaggacaatagaaacacttagacttacttgaaaatccaatgctgcaccacttgtaatgaaggcaacaccgctctccacattgtacagagcttcaggtttaatgtagcccagctgagtcagaaaggttgtgacctgaaggcagaagaacccgaatgccacacctcattggagtatagccagtgttggtctgtggcacttgggctgaaaggtgataatggcattgcgtggtagctgacaatgagcaccttcggttccatgtggagcggggtttagctcatgcaaaagacttgcaattgtctccatgggacgatcccagtgggactgtcagcccacagctcgagtgggttggatgcttgcctctttcctaacagttatttccccgggtccagcttaaagactcgatggaaggaggtagaacctctgctgttactgcttgaacttaacctgggaaaggagaggaagacaccatctccaaagctattaatgtcactccttttgcgagcatgattaggccccggagatttccaagtccccccatctacacttacaaacgattagaagggtttaattttaaagactttctggttacactactccacgaactcctccaaagatccgttattcaataactgcctagaaaatgtttccatctcctctaaatccctgtgttctcctctgtggaaatgaaggcagcaagaagcacctgaggccttggttcatgcagtgttctcttttgactaaatcacctaggttcctttaaacatgctacaaagcccaggcatggtggtgcacacctgtactcccagctactcgggtggtttacacaggaggatggctttgggcctagtagttcgagtccagcctgggcagcatagtgtgagaccctgtctcttaaaaaaaaaaaaaatgctacaaagtcctgatgatcctaaatttgaaatcccaactgtcctctccatttgtctttgagccaaccctgaactggccctggtacctgagtaagagccatgcagggccatcagcagaacatggccttgtggttctcacccagttgtgtacctcacaaccacaacttctttttctttgtcccttttcccctttttggttttggttttgtatgtgggctctatgtaactcccatagtcagctgaactctcaattggagaccctctttctctggcatcctagcacacaggcaattttttaagcctatatttatgctacattttcccccatcttaagaaaatttgctttgatttccattctcctactagcagcagctgatatcacctgtagacctatgagcattttatctattctatcattgaagttactgataaagatttttgttgttgttgttgttgttgggagaaatggatttcccacaactaatccctctggcccaccattaatttccttcttggtttcatttcaaactggcagccaattgcacgcccatctaagagctacacagtgtagattttacttcatcagcccattggtgaatgcatcgtgcagaaaagaactgggatctgtactaaaatcaagatcattactttgatctctacctcagtttgccagtgtagtcattctattgcaggaagagattaaattgatgagatattgttactttcagagtcacactgctgattgcttgcctggggcctaatttcacaaatgaatagtgacttttttcccatgtatttctaggtatggtaaacttttaaacctccaaattttcagagccatactttttgcccattttgaaaaagaagcccaggacagcaccttgtctagcccctccccatttctcctgagcttttggggtccttcagcacccttggacaccgtggagatccagccaagactgagctttgaatagcactagcccttttaaacaatcctcacaaattccttaggaatttaaactttccaaaataatcccccacttttttttttttttttttttttttttgagttggagtcttgctctgtcgcccaggccagagtacagtggtgcaatctcggctccctgcaacctccatctcccgggttcaagcaattctcctgagtagctgggattacaggcgccaccaccacgcccagctaatttttgtatttttagtagagatggggtgtcaccatgttggccaggctggtctcaaactcctgacctcaggtgacccaccagcctcagcctcccaaagtgctgggattacagatgtgagccaccatgcccggccattccaccacttctttaaaatagtaagaattcttaaaaaccatattccttgtttgatggaagagtaagatgttaacagagggcatcaaagggccagaggtgtctttgaatttattttttttcaatgtcttttctgagcttcagccttagcttttcagatcttcctcctacctgttcatttattcagccttctatctggtcatcctccccagcggctcctctctctgatgtgtccacctacggtggaacgaggattgcctttctgtgctccccatcaggactttgctgtcttggccggcaggagtcgtgctgctgcagagcctcacaggctgtgccttgtttcaggaaacagctcctaatactctcccatcactcactttacctgtctccatcttatttccctatactcctattgtcagcttgagactttttttttttttcaattccaaatgaagggtatgacctcagagtgagtgaggactcagtaaagactcacctctccttacttggtttattaaatgtcttcagattccagagataagacaaggtggccacttcacaaagaatccagaatcatgctcagtaaagctcattaaaagccactgcagctgagaaggttcacagcccttctttatagccacagaggcagcacacaggggaggtgggaagacacagggaaacgagagaagaaggataatgaggccttgaggtgttctgcccccaatttcaaggagcttatcaggcttcatgtgcaatttggggaggggagctttttgatggtgggtaaataatggctctacaaagattacctgactccactgacacaagaatatgtattctcagctgatataactgtgtgttcacatcccatccatagaactcactgaaggagattcatcaagtcagccttttggactgggttggggtttggggagtggatttggggatagagagaaaggtgtacttagtacacattttctaatgggcgttacgtgaactgtttgaacctgctgagtggcgctttgtagagctccatgttcacgttcagtgtcaacaccattcaacagctttgcacatcttcgtacaacataatctggctttggtgccccttgagccacctgtagaataatttatagcagggtcccacaatctactgcaatgatcgtgaacagttatcagtggatatagtgctccaagagtcaaattgtatccgttaagggttttctaacttttgctatcccccccgcgaccaaaaaaagggggggtttataatttaaagaaaaggaaaagaggcgtgggttggtagttgtgtccttaacatttaggaatgacatagcctctggagtctacaaactgaagaaactttcatctgatcagccttggaaatccaaagttaaagagcctatgtgtctcttgaggcgggggttagaggattcaaatttgggatgatgctcattgattcctgaccatagcagtgagaggccattttttgtgcaggaaatgtgcttaggactcagtcttgttttcgattatccaccacagaaaccctgagacacagagcagcttagaagtctctacccaggcgtaaatagagctccctactccagaccacctgccacccacctcccaagttgagaacacaagctccagctgggctggagagtcaggcttggtgcagggtgactttggcgaagttttgtcagatccataaagcaaactggaatttgagctttcacttaccctagtatacgttcttaaaaaaaaaaaaaagtctatgtggtataatcgagatggatacctgtgtctttaaattacgtagggaattttgtatgtttaaataattgtactgggttccataatgcttatcttagaaactttagtaaaagaaaatatatgaaccgtgcatttgtgaatgccccccttagagcattcatccaagttcagtgtgtagtgtgatggttattatagatatttaaagtatagtaagtggctgtgtaacaggagagactgctgtttacctacgtactgaagggtaactgctgcccgcgtaattaaatcagtattgtcctttcctgtcggtttgatcaattgcggtaccggtagcttcctgcttgtgactgttacctaattgtgtcaatgtacatctgtagtatgtacatgtgaaagtgcctttctattttagaggagttttagccttgctcttgtaccgttgccccgctctgtgccccacccccacctcctcctcccaattcctgctgcccactcgagtgtttcgaagcttcctccctgtcccccaccttccccatccccgccttcctgtgcctcggtgctcagtaatgtcccatctcacctccctgtcggtcctcagactgtctcgttttccttgtagacgtgattgtgcctttctcacccctgtgtcctcccatcccaccgcatcagtcccccgctcatgtgctgctgacagcatcgcattcgcccgtgctctgtactgcctctcaccatttcattccctcctctctgaggtgaaaataaagggggatgcttttacagtctggaaagaaaaaaaatgttttgttaatctgttgtgacaatgcacttttatgtatagtactgtacatttttggcatgtaccattacaggcttcagtatacagtcaggtttgttcttcacggtgtatctttataataaataagatagttctggc

SEQ ID NO: 20428 - DNA, 802 bp, Homo sapiens
  misc_feature 1..802: note = ENST00000462445
  source 1..802: mol_type = unassigned DNA
tttcctaatcaagaagttggcgtgcagctgggagagctagactaagttggtcatgatgcagaagctactcaaatgcagtcggcttgtcctggctcttgccctcatcctggttctggaatcctcagttcaagaaagacgagaatccaggacttgaatcgtatcttcccactttctgaggactactctggatcaggcttcggctccggctccggctctggatcaggatctgggagtggcttcctaacggaaatggaacaggattaccaactagtagacgaaagtgatgctttccatgacaaccttaggtctcttgacaggaatctgccctcagacagccaggacttgggtcaacatggattagaagaggattttatgttataaaagaggattttcccaccttgacaccaggcaatgtagttagcatattttatgtaccatggttatatgattaatcttgggacaaagaattttatagaaatttttaaacatctgaaaaagaagcttaagttttatcatccttttttttctcatgaattcttaaaggattatgctttaatgctgttatctattttattgttcttgaaaatacctgcattttttggtatcatgttcaaccaacatcattatgaaattaattagattcccatggccataaaatggctttaaagaatatatatatatttttaaagtagcttgagaagcaaattggcaggtaatatttcatacctaaattaagactctgacttggattgtgaattataatgatatgccccttttcttataaaaacaaaaaaaaaaataa

SEQ ID NO: 20429 - DNA, 1208 bp, Homo sapiens
  misc_feature 1..1208: note = ENST00000242465
  source 1..1208: mol_type = unassigned DNA
gaagttggcgtgcagctgggagagctagactaagttggtcatgatgcagaagctactcaaatgcagtcggcttgtcctggctcttgccctcatcctggttctggaatcctcagttcaaggttatcctacgcggagagccaggtaccaatgggtgcgctgcaatccagacagtaattctgcaaactgccttgaagaaaaaggaccaatgttcgaactacttccaggtgaatccaacaagatcccccgtctgaggactgacctttttccaaagacgagaatccaggacttgaatcgtatcttcccactttctgaggactactctggatcaggcttcggctccggctccggctctggatcaggatctgggagtggcttcctaacggaaatggaacaggattaccaactagtagacgaaagtgatgctttccatgacaaccttaggtctcttgacaggaatctgccctcagacagccaggacttgggtcaacatggattagaagaggattttatgttataaaagaggattttcccaccttgacaccaggcaatgtagttagcatattttatgtaccatggttatatgattaatcttgggacaaagaattttatagaaatttttaaacatctgaaaaagaagcttaagttttatcatccttttttttctcatgaattcttaaaggattatgctttaatgctgttatctattttattgttcttgaaaatacctgcattttttggtatcatgttcaaccaacatcattatgaaattaattagattcccatggccataaaatggctttaaagaatatatatatatttttaaagtagcttgagaagcaaattggcaggtaatatttcatacctaaattaagactctgacttggattgtgaattataatgatatgccccttttcttataaaaacaaaaaaaaaaataatgaaacacagtgaatttgtagagtgggggtatttgacatattttacagggtggagtgtactatatactattacctttgaatgtgtttgcagagctagtggatgtgtttgtctacaagtatgattgctgttacataacaccccaaattaactcccaaattaaaacacagttgtgctgtcaatacctcatactgctttacctttttttcctggatatctgtgtattttcaaatgttactatatattaaagcagaaatataaccaaaggttaa

SEQ ID NO: 20430 - DNA, 1874 bp, Homo sapiens
  misc_feature 1..1874: note = ENST00000378533
  source 1..1874: mol_type = unassigned DNA
cccggccttcgcccgcccgctagcacgcagtcccttggtctcttcggtctcctgccgcccccgggaagcgcgctgcgctgccgaggcgagctaagcgcccgctcgccatggggagccccgcacatcggcccgcgctgctgctgctgctgccgcctctgctgctgctgctgctgctgcgcgtcccgcccagccgcagcttcccaggatcgggagactcaccactagaagacgatgaagtcgggtattcacaccctagatataaagataccccgtggtgctcccccatcaaggtgaagtatggggatgtgtactgcagggcccctcaaggaggatactacaaaacagccctgggaaccaggtgcgacattcgctgccagaagggctacgagctgcatggctcttccctactgatctgccagtcaaacaaacgatggtctgacaaggtcatctgcaaacaaaagcgatgtcctacccttgccatgccagcaaatggagggtttaagtgtgtagatggtgcctactttaactcccggtgtgagtattattgttcaccaggatacacgttgaaaggggagcggaccgtcacatgtatggacaacaaggcctggagcggccggccagcctcctgtgtggatatggaacctcctagaatcaagtgcccaagtgtgaaggaacgcattgcagaacccaacaaactgacagtccgggtgtcctgggagacacccgaaggaagagacacagcagatggaattcttactgatgtcattctaaaaggcctccccccaggctccaactttccagaaggagaccacaagatccagtacacagtctatgacagagctgagaataagggcacttgcaaatttcgagttaaagtaagagtcaaacgctgtggcaaactcaatgccccagagaatggttacatgaagtgctccagcgacggtgataattatggagccacctgtgagttctcctgcatcggcggctatgagctccagggtagccctgcccgagtatgtcaatccaacctggcttggtctggcacggagcccacctgtgcagccatgaacgtcaatgtgggtgtcagaacggcagctgcacttctggatcagttttatgagaaaaggagactcctcattgtgtccacacccacagcccgaaacctcctttaccggctccagctaggaatgctgcagcaagcacagtgtggccttgatcttcgacacatcaccgtggtggagctggtgggtgtgttcccgactctcattggcaggataggagcaaagattatgcctccagccctagcgctgcagctcaggctgttgctgcgaatcccactctactccttcagtatggtgctagtggataagcatggcatggacaaagagcgctatgtctccctggtgatgcctgtggccctgttcaacctgattgacacttttcccttgagaaaagaagagatggtcctacaagccgaaatgagccagacctgtaacacctgacatgatggttcctctcttggcaattcctcttcattgtctacatagtgacatgcacacgggaaagccttaaaaatatccttgatgtacagattttatttgtaattttaaaagtctattttattatgagctttctttgcacttaaaaattagcatgctgctttttgtacttggaagtgtttcaaaaaattatatgaccatatttactctttctaactttctttactccatcatggctgcttgattttgtagagaaattagaacccataaccatacacaggctatcaacatgttattcaatgtgacacctaactcttttctattttgttttttaagtaagacttttattaataaaacaaaatgttttggagcaaa

SEQ ID NO: 20431 - DNA, 760 bp, Homo sapiens
  misc_feature 1..760: note = ENST00000479015
  source 1..760: mol_type = unassigned DNA
ggcggctatgagctccagggtagccctgcccgagtatgtcaatccaacctggcttggtctggcacggagcccacctgtgcagccatgaacgtcaatgtgggtgtcagaacggcagctgcacttctggatcagttttatgagaaaaggagactcctcattgtgtccacacccacagcccgaaacctcctttaccggctccagctaggaatgctgcaggctgttgctgcgaatcccactctactccttcagtatggtgctagtggataagcatggcatggacaaagagcgctatgtctccctggtgatgcctgtggccctgttcaacctgattgacacttttcccttgagaaaagaagagatggtcctacaagccgaaatgagccagacctgtaacacctgacatgatggttcctctcttggcaattcctcttcattgtctacatagtgacatgcacacgggaaagccttaaaaatatccttgatgtacagattttatttgtaattttaaaagtctattttattatgagctttctttgcacttaaaaattagcatgctgctttttgtacttggaagtgtttcaaaaaattatatgaccatatttactctttctaactttctttactccatcatggctgcttgattttgtagagaaattagaacccataaccatacacaggctatcaacatgttattcaatgtgacacctaactcttttctattttgttttttaagtaagacttttattaataaaacaaaatg

SEQ ID NO: 20432 - DNA, 469 bp, Homo sapiens
  misc_feature 1..469: note = ENST00000461865
  source 1..469: mol_type = unassigned DNA
agcacagtgtggccttgatcttcgacacatcaccgtggtggagctggtgggtgtgttcccgactctcattggcaggataggagcaaagattatgcctccagccctagcgctgcagctcagtttcataacccttacaaagttggagccatggattttagtctctgaataatgatgtattaaagaagcagaattcaacaaccaaaaggctgttgctgcgaatcccactctactccttcagtatggtgctagtggataagcatggcatggacaaagagcgctatgtctccctggtgatgcctgtggccctgttcaacctgattgacacttttcccttgagaaaagaagagatggtcctacaagccgaaatgagccagacctgtaacacctgacatgatggttcctctcttggcaattcctcttcattgtctacatagtgacatgcacacgggaaagccttaaaaatatcctt

SEQ ID NO: 20433 - DNA, 1725 bp, Homo sapiens
  misc_feature 1..1725: note = ENST00000432886
  source 1..1725: mol_type = unassigned DNA
agaggcgagaggaggagttttccagcccggccttcgcccgcccgctagcacgcagtcccttggtctcttcggtctcctgccgcccccgggaagcgcgctgcgctgccgaggcgagctaagcgcccgctcgccatggggagccccgcacatcggcccgcgctgctgctgctgctgccgcctctgctgctgctgctgctgctgcgcgtcccgcccagccgcagcttcccaggatcgggagactcaccactagaagacgatgaagtcgggtattcacaccctagatataaagataccccgtggtgctcccccatcaaggtgaagtatggggatgtgtactgcagggcccctcaaggaggatactacaaaacagccctgggaaccaggtgcgacattcgctgccagaagggctacgagctgcatggctcttccctactgatctgccagtcaaacaaacgatggtctgacaaggtcatctgcaaacatatggaacctcctagaatcaagtgcccaagtgtgaaggaacgcattgcagaacccaacaaactgacagtccgggtgtcctgggagacacccgaaggaagagacacagcagatggaattcttactgatgtcattctaaaaggcctccccccaggctccaactttccagaaggagaccacaagatccagtacacagtctatgacagagctgagaataagggcacttgcaaatttcgagttaaagtaagagtcaaacgctgtggcaaactcaatgccccagagaatggttacatgaagtgctccagcgacggtgataattatggagccacctgtgagttctcctgcatcggcggctatgagctccagggtagccctgcccgagtatgtcaatccaacctggcttggtctggcacggagcccacctgtgcagccatgaacgtcaatgtgggtgtcagaacggcagctgcacttctggatcagttttatgagaaaaggagactcctcattgtgtccacacccacagcccgaaacctcctttaccggctccagctaggaatgctgcagcaagcacagtgtggccttgatcttcgacacatcaccgtggtggagctggtgggtgtgttcccgactctcattggcaggataggagcaaagattatgcctccagccctagcgctgcagctcaggctgttgctgcgaatcccactctactccttcagtatggtgctagtggataagcatggcatggacaaagagcgctatgtctccctggtgatgcctgtggccctgttcaacctgattgacacttttcccttgagaaaagaagagatggtcctacaagccgaaatgagccagacctgtaacacctgacatgatggttcctctcttggcaattcctcttcattgtctacatagtgacatgcacacgggaaagccttaaaaatatccttgatgtacagattttatttgtaattttaaaagtctattttattatgagctttctttgcacttaaaaattagcatgctgctttttgtacttggaagtgtttcaaaaaattatatgaccatatttactctttctaactttctttactccatcatggctgcttgattttgtagagaaattagaacccataaccatacacaggctatcaacatgttattcaatgtgacacctaactcttttctattttgttttttaagtaagacttttattaataaaacaaaatgttttggagcaaattt

SEQ ID NO: 20434 - DNA, 1842 bp, Homo sapiens
  misc_feature 1..1842: note = ENST00000544439
  source 1..1842: mol_type = unassigned DNA
agaggcgagaggaggagttttccagcccggccttcgcccgcccgctagcacgcagtcccttggtctcttcggtctcctgccgcccccgggaagcgcgctgcgctgccgaggcgagctaagcgcccgctcgccatggggagccccgcacatcggcccgcgctgctgctgctgctgccgcctctgctgctgctgctgctgctgcgcgtcccgcccagccgcagcttcccagataccccgtggtgctcccccatcaaggtgaagtatggggatgtgtactgcagggcccctcaaggaggatactacaaaacagccctgggaaccaggtgcgacattcgctgccagaagggctacgagctgcatggctcttccctactgatctgccagtcaaacaaacgatggtctgacaaggtcatctgcaaacaaaagcgatgtcctacccttgccatgccagcaaatggagggtttaagtgtgtagatggtgcctactttaactcccggtgtgagtattattgttcaccaggatacacgttgaaaggggagcggaccgtcacatgtatggacaacaaggcctggagcggccggccagcctcctgtgtggatatggaacctcctagaatcaagtgcccaagtgtgaaggaacgcattgcagaacccaacaaactgacagtccgggtgtcctgggagacacccgaaggaagagacacagcagatggaattcttactgatgtcattctaaaaggcctccccccaggctccaactttccagaaggagaccacaagatccagtacacagtctatgacagagctgagaataagggcacttgcaaatttcgagttaaagtaagagtcaaacgctgtggcaaactcaatgccccagagaatggttacatgaagtgctccagcgacggtgataattatggagccacctgtgagttctcctgcatcggcggctatgagctccagggtagccctgcccgagtatgtcaatccaacctggcttggtctggcacggagcccacctgtgcagccatgaacgtcaatgtgggtgtcagaacggcagctgcacttctggatcagttttatgagaaaaggagactcctcattgtgtccacacccacagcccgaaacctcctttaccggctccagctaggaatgctgcagcaagcacagtgtggccttgatcttcgacacatcaccgtggtggagctggtgggtgtgttcccgactctcattggcaggataggagcaaagattatgcctccagccctagcgctgcagctcaggctgttgctgcgaatcccactctactccttcagtatggtgctagtggataagcatggcatggacaaagagcgctatgtctccctggtgatgcctgtggccctgttcaacctgattgacacttttcccttgagaaaagaagagatggtcctacaagccgaaatgagccagacctgtaacacctgacatgatggttcctctcttggcaattcctcttcattgtctacatagtgacatgcacacgggaaagccttaaaaatatccttgatgtacagattttatttgtaattttaaaagtctattttattatgagctttctttgcacttaaaaattagcatgctgctttttgtacttggaagtgtttcaaaaaattatatgaccatatttactctttctaactttctttactccatcatggctgcttgattttgtagagaaattagaacccataaccatacacaggctatcaacatgttattcaatgtgacacctaactcttttctattttgttttttaagtaagacttttattaataaaacaaaatgttttggagcaaattt

SEQ ID NO: 20435 - DNA, 1780 bp, Homo sapiens
  misc_feature 1..1780: note = ENST00000538295
  source 1..1780: mol_type = unassigned DNA
agaggcgagaggaggagttttccagcccggccttcgcccgcccgctagcacgcagtcccttggtctcttcggtctcctgccgcccccgggaagcgcgctgcgctgccgaggcgagctaagcgcccgctcgccatggggagccccgcacatcggcccgcgctgctgctgctgctgccgcctctgctgctgctgctgctgctgcgcgtcccgcccagccgcagcttcccaggatcgggagactcaccactagaagacgatgaagtcgggtattcacaccctagatataaagataccccgtggtgctcccccatcaaggtgaagtatggggatgtgtactgcagggcccctcaaggaggatactacaaaacagccctgggaaccaggtgcgacattcgctgccagaagggctacgagctgcatggctcttccctactgatctgccagtcaaacaaacgatggtctgacaaggtcatctgcaaacaaaagcgatgtcctacccttgccatgccagcaaatggagggtttaagtgtgtagatggtgcctactttaactcccggtgtgagtattattgttcaccaggatacacgttgaaaggggagcggaccgtcacatgtatggacaacaaggcctggagcggccggccagcctcctgtgtggatatggaacctcctagaatcaagtgcccaagtgtgaaggaacgcattgcagaacccaacaaactgacagtccgggtgtcctgggagacacccgaaggaagagacacagcagatggaattcttactgatgtcattctaaaaggcctccccccaggctccaactttccagaaggagaccacaagatccagtacacagtctatgacagagctgagaataagggcacttgcaaatttcgagttaaagtaagagtcaaacgctgtggcaaactcaatgccccagagaatggttacatgaagtgctccagcgacggtgataattatggagccacctgtgagttctcctgcatcggcggctatgagctccagggtagccctgcccgagtatgtcaatccaacctggcttggtctggcacggagcccacctgtgcagccatgaacgtcaatgtgggtgtcagaacggcagctgcacttctggatcagttttatgagaaaaggagactcctcattgtgtccacacccacagcccgaaacctcctttaccggctccagctaggaatgctgcaggctgttgctgcgaatcccactctactccttcagtatggtgctagtggataagcatggcatggacaaagagcgctatgtctccctggtgatgcctgtggccctgttcaacctgattgacacttttcccttgagaaaagaagagatggtcctacaagccgaaatgagccagacctgtaacacctgacatgatggttcctctcttggcaattcctcttcattgtctacatagtgacatgcacacgggaaagccttaaaaatatccttgatgtacagattttatttgtaattttaaaagtctattttattatgagctttctttgcacttaaaaattagcatgctgctttttgtacttggaagtgtttcaaaaaattatatgaccatatttactctttctaactttctttactccatcatggctgcttgattttgtagagaaattagaacccataaccatacacaggctatcaacatgttattcaatgtgacacctaactcttttctattttgttttttaagtaagacttttattaataaaacaaaatgttttggagcaaattt

SEQ ID NO: 20436 - DNA, 8477 bp, Homo sapiens
  misc_feature 1..8477: note = ENST00000267260
  source 1..8477: mol_type = unassigned DNA
gtcacattgtgcgagagacaaaacccgggcgcgccggagctcacacgcgcacgcacacacatccgaccccgtcgcctcttctctcctggtgctgcccagaaagccagccctcccttcccttcttggggcgcagaggctcagccagctcagagcgcagcctggagccgacccagaagggcgaagaaagcccagcggacgagcctcctttctctgctgcctgcccgggctggggcgtcccatcccccgccctgaactccgatctctcccaccccacccctctctgggtttcacccggacagagccgggagctgggtgtcgcccccgtttggaatccacgtttcagcactttggacagcgccccggacgccccggcccctttgggttggcgatggcgagcgttcagcaaggcgagaagcagctttttgagaagttctggcgaggaaccttcaaagcggtggccaccccccgtcccgagagcatcattgtcgccagtatcacggcccgcaagccgctgccaaggacagagccccagaataaccccgttgtcccagctcaggatggaccctcagaaaagctgggtcagcatctggccaccgagcccttgggcaccaacagttgggagagagacaagacctgtcgggaactgggtgccaccagaggacacagtgcctctcatgacaaagacttgacaccaccaccttcctccaggggaaagaagaaaaagaagaaatccactcggaagaagagaaggaggtcctcatcctatagcccatcgcctgtcaagaaaaagaagaagaaaagttccaagaaacacaagcgacgcaggtcattctccaagaagagaaggcacagctcctctagcccaaaaagcaaaagaagagatgagaagaggcacaagaaacaatctcgaagccggccccgaaagtctcaccgccaccgccatcaccgctgcccctcgcggtcccagagctcggagtcccgcccctcaagctgtgagagcaggcaccgcggccggtcccctgaggaagggcagaagtcccgccgaaggcactcccgccgctgctccaagaccctctgcaaggacagccctgaggcccagtccagtcgcccgcccagtcaacccctccagatgcttggctacctgtcagccaggggtgtaatcactgggtcggggtctgctgctgacctctttaccaaaacagccagcccgctcaccacctcgcgaggacgttcccaggagtacgactcaggaaatgacacgtcctcgccaccctccacgcaaaccagctcagccaggtctcggggccaggagaaggggagccccagtgggggcttgagcaagagccgggagctcaacagtggcaacacctctgattcagggaactccttcaccacctcctcaccccagaacaagggggccatgttggagaatctctcccccaccagcaggggcagagagtcaaggggatttcagtcaccgtgtctggaatgtgccgaagtgaagaagtccagtttggtcccatccacagcccggagctcacccatgaaagggtgttcccgcagctcctcctatgccagcacccgatcctccagtcactcgtcccgatccccaaatcccagggcttcccccaggtacacccaaagccgatccacctcttctgaaaaaaggtcctactcccgctctcccagctattcctccaagtctggcaagaggagcccgcccagcagaagctctaggtcccgccgcagccctagctactcccgctacagccccagcagggagcgggatcccaaatacagtgagaaggactcgcagcagcgggagcgcgagcgagcgcgtcggagacgtcggtcctactcgcctatgagaaagcgccggagagactccccgagccacctggaggcccggaggataaccagtgcccggaaacgccccatcccctactatcggcccagcccctcctcatccggcagcctcagcagcacctcctcctggtacagcagcagcagtagccgctcggccagccgcagctactcccggagccggagtcggagccggagccggagacggagccggacccgcacgagcagcagctctagctcccgcagccctagtccgggctcccgcagccggagccggagcaggagccggagccggagccggagcaggagccagagccggagctacagctcagcagacagctactccagcacgaggcgctaagtgcccctgagccagctgcccgtgggggccccttcgcgctgccagcctcccccaaccacctgccctccccgccttcttggtgacaaatagtgagggctcctataccttgtccttcctgcttgcctaggggaagaggagaagagggtaagggggcttcactctctagatcagcctgctaggagcctctaccagcatcatcctggggcccagctcaggcctgggcatatggaaagaaccatcatcttgtggcacaaaaaaagaagaaagaaaagaaaacttcaaggttttgtgagaagcaatgggtctgtgactcaaaaattgagccctggccaggaaaatgtggagacagttcttctcctccactgctcacaggaggcccgtggtaattctccccacctccccggatgccccactagtccaacttcatggctgcacgtggatggacccccatgtctgagaggggtgaaagaggagaccaatggcagttcaggttcaagataacggggtcaggcctttaacttcctcaaacaggcccaagcaaaggctggaagacatttgggtcctagaagaagggatatccttgaataccagatggggacgtttgacttggtgggaggtgtcaggagataggagttggttaagatgatagatagaaaaacggaagggttcagctgctgctcccaatacctcagcatggtaaggggacagagcccagcagatcccagctgtgaagaggccactgcatggctgacacaaaacacctcttggccattcacaggggccctgcaacctcacgagaaaggagatagtggaagagtcaggacaggttggtctccagccccacttcccaaatatgcctcagccccactagctggcaccaacttaattccacgggaccatctgctgaacattccccagtgccatggccagttgccaggccccagcgccagccagtctggccttaccctccggttggcgcctgccagccccctcccctctgcccaggctgccacgccctggatgccacccagtgcagcctggcacctacccacccacccttcagcttaagccactccccttgcctctcaggaattttgccaggatggggcacagcagctcaggtttgggggaaaagacccgaatccagagtgcaggggagaggggcttggatatgccatgtcttgggctcctgctggcttctgaggtttcttgtcagcttgggaaagacccacctttatttttgccctcaccccaagtcccccctggctggggctgggcagagagggtaagctgatctccgatccacaaataccaccagctgcttcatccacagaaggcgctaagaacggggaggtgaggaataagatccttaaaataaactcttgggcatccccctcaccagctgactggctttccggaggcttgtgggtgagtttcaagtttgtggtggcaacagcagcaggacagggcacggagggagcgagggagagaggaccggtcccagcttttggatattttgggttatggggaagcaagggccaaacattctttatccctcccaccccagggaaaacatttggaaaatagtcctttttcttggaagcagtgacgtctccctacccaatctttcccatcctatcaacccatggggctagagactgccatgcaaccaccaccacgacagcccttcctccatcagaagacaggagtgagggccccgggcagcagtggacgacccagcctccccataccgggcctctggcccagacctaagccctgcccacaaagactaatggatgccagtgctgtcactgcagaaggccagatggcaggtgcctgggacaggggcaggtgccccggggagggcaagtacagccactgtaaataaccctcgtccctgcccaggaacccagactggacttcagtctccctccatggagacaaaggcttcccagagccaccaaaaaccttcttagcaggacagctgtgagaggcatcagaacctcacgttcggactgccttcatcaagacaactctaggggaccattttgcctggggctcctagcaaacctttttatttattttatttatttatctatttatttatttgatgactgtctctctttctcgccattagcagtattgaattatttatttatacagaggttttgtgtgtgtgtgtgtgtgtgtgtgtgtgtgtgtgtgtgtgtgtgtgtgtgttggggggatctcctaaattatttctgtgcatctcctttttttttctgctgttttttatggatgggatttgagaggccaaaggtgagtgggctattggccttctccctgaaggctctaagcctggaacaccctggggttggcccagaaggaggcacatcagtcccaaaattcatcacttaacccagcgtccaggagggtcaggcctgtaccccagcctcctgtcccccaggaacctcacaggggtatcaaaaagatgtaaacagcccagaggcttatgagctacagtgatgaattgacacagtggagttgcaacttaggtgggggttggagtcgaaagttggcaaatggggccaaggctgcacaaagtcgaaatcccttgtgaatgtcccttagggaggcaccagattggagacagatgtgctatctcctaacagagtgatgaggcttcagttgagtacttgctgaagtagttgccttgtattttgagggccatggtggatgaaaatgatgtctggtttagtactggaattgcacttggggttgacaaggtgctcacaccatgagaatggaggcaggaattgagctgactgagggaagatgcaccttgatctcaccctcactccaaggcacatagcaggatcactccctagcttctctgagcacacctagttggtttcatgtatgttacacatgcttccactccacagtacctaatttctctctgtcccctgagatctgaaggctaccttgggaagaggcatcagccatcttgcttgagaaccaccaagccaaaagcaaaagcttttatctatgatctcttgctgtttcatcaggggaaagcacaaagctatttctgaaattaggaaaaaaaaaaaaaaggtggaaggagcagccagatgttccacaggaccccaccaagaaggtcatttccaaacccatcctggaagggcccaggatccaaaggtcatcagtcctgcttatctgaccaactggcagtgtcttctggctgctggccggagacagctcttgccctttccaaagtcactgtccactgccttgcaattgccagcttgtctggtccagctttgggtttggtgagacttttgcaacatccctggttgtttccctggcaatgtgactatccagccctaacccaaagcaagggagtgcccctttcctgggtgaagtttacaagaaggctgcttaaatgcctgcttcggggaaatctctgcctctctctctctctgtctctctctctgtctctctctctgtctctctctctctctctctctctctctctctctcagtgtatttctctactttcttttacatttcctttttttctatccaaaaacaatgtgcttgttgaggcactggtaaccctgattaaccagaacctcccattcccagtatcgctgttcctacgcccatttcaccctcattaccttctgcttccaaggaatatgacagatcaccaggatgctgctcgtcgtgaggatttatctcaaaaaccaacatccaaaatgggagggagatgtggcttgaggtcaagcgccatgcatcccaagcctttgaccttcccgctatggaagtgcactggatgacagaaactgaatacattgctccctttccctagggcaaagttcgacctctgttaagtggagggatttgtgagataaaaattcaaaatgttggcctgaggcctgagagtgtcaccaaagacagagggagcttcactgagactcagagggaaaaggaaaagagcctcaaacatttttaggaggttgtccatcatgaaagtaaaaacgaaaagcaagatttgatctcccttcagttaattaggcaaggctaagtaactcaaagccccctattagtaacattctggttcactgaggtttgatcatattcctatctgcattccttcccttctttgaaggacagctgatctttcagaagcagaataaaattaagatgttagaacaaaggtctcagtctcagagaaccgcatcacttcatttgctcagacccatcctcttttgcaaaagggtctgcttggagaggccaaaattcagggtgctctcaaaggcaaagaaagcacattgttttccttctccagtccaactttcatcttttcttctgctgttttcttttcccctcttctttttcacaaatgttcaaaatggtctcatgcgcatgtgtcttgccccactttcccctttagctgaacagaaaattttgtctcagtaaaacgaagtcaaaaaacaggattcctccaaacatgcctcctcccgcactggccagccgagtccagctgagaaacttatgctagattcaatgtcattgagcaatgctttattgaagtctcgttcttctcacttctgcaccagtgagccaatgatactgacagaaatgtcatctctcttctatctgtggttgctgtttttggagtaaaagtttctgtgtgtgtttttttagttcttttgatggctgttgttttgcattgtaaataccatgatgggggacccccatcagaacatggcttatttaataatttatttcgtatttattgagtaatattgggaaaagagaaggaccacctctttccctgaattgctattgagaattggtccatctcccagctccaggtgctgctgtctgcagcaagggcattactgcccaggtaaggagtgctagaatcaccaagcaaattgaaattggcagaaatggaggcttcagtcacacaaattagactcaaatggaactaaaacactggttatctccaggaaaacctcatttagatggaaattaatggaagaataaaatgcctacacatgaaccaacttctattaaaaagtcacaactccttgaaaaaaaaaataaagaaaaattgtaaactcttttttttttctggccaaggaaagctatgcctcatcttctaacgagccaagccaaaaagactgcaatggtattcctatgtgtttctttggcctgtgtatcagtctgaatgaaatggaatgggtctctagcctcagtcttgtcatctgtaaaatggggcttgtcctatatattatctgcaagacgtgggaaatgggggctcaagccctgatgctatggactccatactgttggatatattgtctcttgtgtcttctgctgactgcagattaaagggtgtcaaccaaggaaggaaacaaaaaagtagggcctggacttcatttgcagaatgaggtcatagtcgttgagtcccacagtcatatatgggagacctcaagttgctgtcaccttgataactcttgtatcctgggttaaagccctctgtatttagtttgaacttctctctaagccccgtggtccaaagtcatcacgggagagaccaagatgggcttaccttgccctgctctggatttaaccattgttcattgtcaggctatatttttgtacaatcattcaaataacccagtgacataggtcatattgccacttttcagaggagaaaactgaggctcaggagggggagttgacatgcccaagctcccttgagctcagatcagcttgactcaatgtccaacattcccttggtagctttttctccggggtcctgtgctataagaacttctctctgcactgtatttttttttctcccaattcttagctatttcctcaagcaatgattggccaaggacctagcataatccaccacattggccaaggggacgtggtgcaccccaaggccatttctctgcattggaggctgcgaatctcctctggaaaattcccaacccgaggacccaccatgagcccagctcagcctgaccagacagcctctgcctggagcattcacatcagatggaaagaagctgctgtgtcctccagcatcctgggaccctgtcctctgcccagtgacacagcagccatggctagcttgatttctggtctccaaagctaagcataaccttcccggggtttctggtttttcagcctgtacgaaacatgtctctgttctaattaaagttcccatggtatggtgttctca

SEQ ID NO: 20437 - DNA, 461 bp, Homo sapiens
  misc_feature 1..461: note = ENST00000545224
  source 1..461: mol_type = unassigned DNA
attaagtccttatttaggtacttagtctgaagtgtgacccaatcagccatgagtgcctctcatgacaaagacttgacaccaccaccttcctccaggggaaagaagaaaaagaagaaatccactcggaagaagagaaggaggtcctcatcctatagcccatcgcctgtcaagaaaaagaagaagaaaagttccaagaaacacaagcgacgcaggtcattctccaagaagagaaggcacagctcctctagcccaaaaagcaaaagaagagatgagaagaggcacaagaaacaatctcgaagccggccccgaaagtctcaccgccaccgccatcaccgctgcccctcgcggtcccagagctcggagtcccgcccctcaagctgtgagagcaggcaccgcggccggtcccctgaggaagggcagaagtcccgccgaaggcactcccgccgctgctccaagaccct

SEQ ID NO: 20438 - DNA, 561 bp, Homo sapiens
  misc_feature 1..561: note = ENST00000537597
  source 1..561: mol_type = unassigned DNA
gagccagcatacatacagttcagagctgctttagcccaccaggccagggcagaagaagacaagcagtgaggccagagaactagatctcgaagccggccccgaaagtctcaccgccaccgccatcaccgctgcccctcgcggtcccagagctcggagtcccgcccctcaagctgtgagagcaggcaccgcggccggtcccctgaggaagggcagaagtcccgccgaaggcactcccgccgctgctccaagaccctctgcaaggacagccctgaggcccagtccagtcgcccgcccagtcaacccctccagatgcttggctacctgtcagccaggggtgtactttctcacctgagaaatgggcatgattatcccgcttgtctcccaggaggattgtggcaaagaaggcagctgttgagcccagtacttgatacaggtgcaaaacttgacaaataatatgatgacaacattccagatcctggctctgcacttaccagctgtgactccttgagcaagtttctgtgtctcagtttcctcaaaaactgcaaaacaaggatagcaata

SEQ ID NO: 20439 - DNA, 682 bp, Homo sapiens
  misc_feature 1..682: note = ENST00000641899
  source 1..682: mol_type = unassigned DNA
gcaccgcggccggtcccctgaggaagggcagaagtcccgccgaaggcactcccgccgctgctccaagaccctctgcaaggacagccctgaggcccagtccagtcgcccgcccagtcaacccctccagatgcttggctacctgtcagccaggggtgtagaggagttcttgcttgatcactgggtcggggtctgctgctgacctctttaccaaaacagccagcccgctcaccacctcgcgaggacgttcccaggagtacgactcaggaaatgacacgtcctcgccaccctccacgcaaaccagctcagccaggtctcggggccaggagaaggggagccccagtgggggcttgagcaagagccgggagctcaacagtggcaacacctctgattcagggaactccttcaccacctcctcaccccagaacaagggggccatgttggagaatctctcccccaccagcaggggcagagagtcaaggggatttcagtcaccgtgtctggaatgtgccgaagtgaagaagtccagtttggtcccatccacagcccggagctcacccatgaaagggtgttcccgcagctcctcctatgccagcacccgatcctccagtcactcgtcccgatccccaaatcccagggcttcccccaggtacacccaaagccgatccacctcttctgaaaaaag

SEQ ID NO: 20440 - DNA, 595 bp, Homo sapiens
  misc_feature 1..595: note = ENST00000613941
  source 1..595: mol_type = unassigned DNA
ggcggtggtccgccatttcgtggacgccgggtgagtgagagagttggttggtgttgggccggaggaaagcgggaagactcatcggagcgtgtggatttgagccgccgcattttttaaccctagatctcgaaatgcatcgtgattcctgtccattggactgtaaggtttatgtaggcaatcttggaaacaatggcaacaagacggaattggaacgggcttttggctactatggaccactccgaagtgtgtgggttgctagaaacccacccggctttgcttttgttgaatttgaagatccccgagatgcagctgatgcagtccgagagctagatggaaggctggagtgcaatggtgtgatcttggctcgttgtaacctctgcctactgggttcaagtgattctcctgcctcagccgcctgagtagctgggattacagaacactatgtggctgccgtgtaagagtggaactgtcgaatggtgaaaaaagaagtagaaatcgtggcccacctccctcttggggtcgtcgccctcgagatgattatcgtaggaggagtcctccacctcgtcgcagagtcaccatcatgtctcttctcacc

SEQ ID NO: 20441 - DNA, 544 bp, Homo sapiens
  misc_feature 1..544: note = ENST00000620242
  source 1..544: mol_type = unassigned DNA
atttcgtggacgccgggtgagtgagagagttggttggtgttgggccggaggaaagcgggaagactcatcggagcgtgtggatttgagccgccgcattttttaaccctagatctcgaaatgcatcgtgattcctgtccattggactgtaaggtttatgtaggcaatcttggaaacaatggcaacaagacggaattggaacgggcttttggctactatggaccactccgaagtgtgtgggttgctagaaacccacccggctttgcttttgttgaatttgaagatccccgagatgcagctgatgcagtccgagagctagatggaaggtgatttaatgattacgctgataaaaatgtgttgcttgtgtttttcatatttaaaatctacaggatatgtggctcttagatggctttcccaatcactggccaattgtatctttagatacaattgggatctttttttttttttttttttttggtggggagacgagtcttgcactgtcactgggctggagtgcagtggtacagtctcccgctccccgcaacct

SEQ ID NO: 20442 - DNA, 1518 bp, Homo sapiens
  misc_feature 1..1518: note = ENST00000339436
  source 1..1518: mol_type = unassigned DNA
tttcgtggacgccgggtgagtgagagagttggttggtgttgggccggaggaaagcgggaagactcatcggagcgtgtggatttgagccgccgcattttttaaccctagatctcgaaatgcatcgtgattcctgtccattggactgtaaggtttatgtaggcaatcttggaaacaatggcaacaagacggaattggaacgggcttttggctactatggaccactccgaagtgtgtgggttgctagaaacccacccggctttgcttttgttgaatttgaagatccccgagatgcagctgatgcagtccgagagctagatggaagaacactatgtggctgccgtgtaagagtggaactgtcgaatggtgaaaaaagaagtagaaatcgtggcccacctccctcttggggtcgtcgccctcgagatgattatcgtaggaggagtcctccacctcgtcgcagagtcaccatcatgtctcttctcaccaccctctgaatctgcattagccagtcaactagccctttcagcgtcatgtgaccagcgcgccccattcagcttggctggtgtcgtttcacatgacccaggctggccagtcgtcaggttgcaccgccctttggttcccgagcatgctgttttctctcagccttctctccaaccttaaccaaatcggcagcagccacctcgaccgcccacacattcctggccaatcagctcagctgtttatttaccaaatgtcttcacaacaactacagcagcagccttcggctaacaaaaaagcaggaaaaatccacaacacccccttcgccaaccaactaaatccaacgcaacatctggcaaaaccttttcagcaaattcttcctggccgtcagtccggcagcctcacctcaccatttctagcttgttgaaacccaaaactagtaagtttttcctgcttatacagtttactgctggttaaaataaggagtaagcggcttaaagtaattcttttttctggatcaaaggctggctgtgcataattgaatggtaacgtacatatatattgcttgaaaaacttttaagggtgatagggaactcgtaatgtaactaggccttcaagtgaaacttatttgcatgtgcaagatgccaaactaaaaattttaatatctctaacagattagcttttctggcaaaaatttgttgaatcctatcacctttaaatggttttactaacagtttcaaaatttaaaattttggggttgaagtgtgggccaagctaaggtaattttggtaagcctaaacacactcttaaatgtgacgatcacaaatgcagttctaatgtagcacttaatggcatcaatatttacacctaccgcgttttcacaaaattacactatccacctggtacctaagtcttgtcatggacttacaggtttgcatgggttccaaatactggtttatggtactgtttttggaactacttgtgggactatattttggtgtggtgtttgggtagtgaagttagtttgacatgaagttttgcatt

SEQ ID NO: 20443 - DNA, 4222 bp, Homo sapiens
  misc_feature 1..4222: note = ENST00000373715
  source 1..4222: mol_type = unassigned DNA
tttcgtggacgccgggtgagtgagagagttggttggtgttgggccggaggaaagcgggaagactcatcggagcgtgtggatttgagccgccgcattttttaaccctagatctcgaaatgcatcgtgattcctgtccattggactgtaaggtttatgtaggcaatcttggaaacaatggcaacaagacggaattggaacgggcttttggctactatggaccactccgaagtgtgtgggttgctagaaacccacccggctttgcttttgttgaatttgaagatccccgagatgcagctgatgcagtccgagagctagatggaagaacactatgtggctgccgtgtaagagtggaactgtcgaatggtgaaaaaagaagtagaaatcgtggcccacctccctcttggggtcgtcgccctcgagatgattatcgtaggaggagtcctccacctcgtcgcagatctccaagaaggagaagcttctctcgcagccggagcaggtccctttctagagataggagaagagagagatcgctgtctcgggagagaaatcacaagccgtcccgatccttctctaggtctcgtagtcgatctaggtcaaatgaaaggaaatagaagacagtttgcaagagaagtggtgtacaggaaattacttcatttgacaggagtatgtacagaaaattcaagttttgtttgagacttcataagcttggtgcatttttaagatgttttagctgttcaaatctgtttgtctcttgaaacagtgacacaaaggtgtaattctctatggtttgaaatggatcatacgaggcatgtaataccaagaattgttactttacaatgttcccttaagcaaaattgaatttgctttgaacttttagttatgcacagactgataataaacctctaaacctgcccagcggaagtgtgtttttttttaaatttaaatacagaaacaactggcaaaaattgaactaagatttacttttttttccatagctgggatataggctgcagctatagttgaacaagcagtctttaaaaactgctgtgaaacacaggccatcagggaaaacgaaatgctgcactattaaattagaggtttttgaaaaatccaactctcatcctgggcagaggttgcctagttggtatagaatgttaagtttcaagaaagtttacctttgctttaggtcataagttccttatttgattgctgtatatggatacatggctgttcgtgacattctttatgtgcaaatttgtgatttcaaaaatgtcctgccagtttaagggtacattgtagagccgaactttgagttactgtgcaagatttttttttcatgctgtcatttgtaatatgttttgtgagaatccttgggattaaagttttggttacaaattgttctttaacttgaaagcctgtttttccttgcaaactcaaatctgtgagcttggtaccaagtccaggtataacattcctattggaagccatacttatattttcttgtaaagtgcttttgaattaataaaatattagcataattgtgtatagtcagttgaacccactgttaccattgttcttatcccatgggaagcagttggttacacgattcttattttataagaaacagctgagaggcactatggattagtcttctgaagtgaaggaaatatagatgtcacctaagtgatagttaacccattttttttttttttaggcatagaagccagttcagggtccataatatttagtgaccaacattttaaagtatagcagcaacctggttcttaaacacaaagtaagttgcccattaacaaatggcttttatctttagcatgaaaactttccacaggtctaaaaattgcttccattttataatttgaggtgttgcatgggaattctaagctgatccatcatgatgtaaaagttcacaatatggttcaaatgtaacagtgcagaattgaatatggaggcatgcataaccttcctcttagaaaatggcaggtgttgtaatttcaaatttttgtgcaattagattaaatcataatgcaacagtcttgtggcttagtttccttaaatatgctcttaagatagttttggattatgcggtattgactgtcttaaatatgaaagataagtcattgcattaagagttcaagctaaatggatacattaagatacagttcctaaacaaattatttatttccaccttttacacaaatcttgggagaattggtgtcaggaaggttcagccttaaagttaagcatgttcaagaaagacacttttcagacagcctgtttatttactgagagctctggcattgggcattttgtctttagtattctcacatagcctacaacctgttcctgttaggaacaagccaagatagctaagaagttacggaagccatgcaatatgtcaattacattgctttttataaatggacaacttatgtgggcatttttgggcagtatatgacttccttgcaggctcttaagttggaagggtttctgtaaaaaggacagttacgggtataatatggctaagagaaataatacagaacctgaaataaaagtaacttcaccagggagttatcctgacttaggtgacatacagtcccagttggcagttactttaaccaggagccctagcataacctcaagactcttagaaactttagaacatggaaattgttaaaagctttgaattgcacatttagattgtggctattaggaatttttaaagttgtaattcctaaaataacaggtcacactaaccggtcttgtccatattcagggttgagtgtaaaaatgaaaggaatcacaaaactgaacttagacctgtggtttaaggatcaaggtgttcactagaagtcactgttactaatacttgatgacaatgtaaagaaacattaaggattatatttgattgttttcaaagacactggctggatgtggtggctcacacttgtaattcctagcactttgggaggctagggcgggtgggaggatctcttgaagccaggagttggagaccagtctgcccaacatggcaagattcacatttctattaaaaggaatatttagtttgatctctggttcacagttcattgtgggttgcttctgacctccatgtcttaagcagaaagtagggaagttgtagttttaccaagcacaggtaccctgtgtctaccatttgagtatcttagagatccttacaaacgtgatcccgtcagcgtccatgacactcccaccctgttagactgctgtcagtggctttcacacaaacccatatgtggatggaaaatccaggttattactacattcattttagtacagtgctgcctaattagaaattttgttgaagaggtatttcagaatagatacagccagactccaggctcattgacttagtttttcagggtgacctaaccctgtgtaattttgaggagttctacatgataaatacccttggtgatgtgagaaccactagtttagtattttgtccaagtatgctttttttcagagttctgaatgagatttagttgtcatacctagttggtggtaatttcttagttgtatatttttgtactaccagattgttgccttctggttttccatcttttcgagaaagatttctagttaaagttactgaagaaaaactgggttggaagtacatttttctctaaataatccagtagtgttgaatttgattttatgtccactctaatttttttcatcctgttttattagggggattcatcgggtacctgaagataattcagctgtagaccccttaaggttctgagacaaggtcattgaaatttgttttggctgggtgtgatggctcatgcctgtaatcccggtgcattgggaggttgaggcaggtggatcacttgtggtcaggagttggagaccagcttggtcaacatggtgaaaccccgtctctactaacagtacaaaaattagctgggtgtggtggcaggcgcctataatgccagccacttgggaggctgaggcaggagaagtgcttaaacctggtgggtggaggttgccatgagccgagatgtagccacttcactccagcctgagtgaaagcaaaacttcgtctccaaaaaaaaaaaaaaagtttgttttggtaagcctagtataattgattagttttgtccatgcaactttccccttgttggactctgtacttaataatacagtatttagattctca

SEQ ID NO: 20444 - DNA, 1095 bp, Homo sapiens
  misc_feature 1..1095: note = ENST00000477442
  source 1..1095: mol_type = unassigned DNA
gagagttggttggtgttgggccggaggaaagcgggaagactcatcggagcgtgtggatttgagccgccgcattttttaaccctagatctcgaaatgcatcgtgattcctgtccattggactgtaaggtttatgtaggcaatcttggaaacaatggcaacaagacggaattggaacgggcttttggctactatggaccactccgaagtgtgtgggttgctagaaacccacccggctttgcttttgttgaatttgaagatccccgagatgcagctgatgcagtccgagagctagatggaagaacactatgtggctgccgtgtaagagtggaactgtcgaatggtgaaaaaagaagtagaaatcgtggcccacctccctcttggggtcgtcgccctcgagatgattatcgtaggaggagtcctccacctcgtcgcagagtcaccatcatgtctcttctcaccaccctctgaatctgcattagccagtcaactagccctttcagcgtcatgtgaccagcgcgccccattcagcttggctggtgtcgtttcacatgacccaggctggccagtcgtcaggttgcaccgccctttggttcccgagcatgctgttttctctcagccttctctccaaccttaaccaaatcggcagcagccacctcgaccgcccacacattcctggccaatcagctcagctgtttatttaccaaatgtcttcacaacaactacagcagcagccttcggctaacaaaaaagcaggaaaaatccacaacacccccttcgccaaccaactaaatccaacgcaacatctggcaaaaccttttcagcaaattcttcctggccgtcagtccggcagcctcacctcaccatttctagcttgttgaaacccaaaactaatctccaagaaggagaagcttctctcgcagccggagcaggtccctttctagagataggagaagagagagatcgctgtctcgggagagaaatcacaagccgtcccgatccttctctaggtctcgtagtcgatctaggtcaaatgaaaggaaatagaagacagtttgcaagagaagtggtgtacaggaaattacttcatttgacagg

SEQ ID NO: 20445 - DNA, 869 bp, Homo sapiens
  misc_feature 1..869: note = ENST00000620941
  source 1..869: mol_type = unassigned DNA
gtgacgttcagcacggggcggtggcgggggctcccggcccatcggagggtttcctagtcttggagtggaagtctttatattcctcattggggcatgagccaggatgggggttacctgggagttgggaaccacaaaggggagccgatagccgagttgtattccagaaatgcatcgtgattcctgtccattggactgtaaggtttatgtaggcaatcttggaaacaatggcaacaagacggaattggaacgggcttttggctactatggaccactccgaagtgtgtgggttgctagaaacccacccggctttgcttttgttgaatttgaagatccccgagatgcagctgatgcagtccgagagctagatggaagaacactatgtggctgccgtgtaagagtggaactgtcgaatggtgaaaaaagaagtagaaatcgtggcccacctccctcttggggtcgtcgccctcgagatgattatcgtaggaggagtcctccacctcgtcgcagatctccaagaaggagaagcttctctcgcagccggagcaggtccctttctagagataggagaagagagagatcgctgtctcgggagagaaatcacaagccgtcccgatccttctctaggtctcgtagtcgatctaggtcaaatgaaaggaaatagaagacagtttgcaagagaagtggtgtacaggaaattacttcatttgacaggagtatgtacagaaaattcaagttttgtttgagacttcataagcttggtgcatttttaagatgttttagctgttcaaatctgtttgtctcttgaaacagtgacacaaaggtgtaattctctatggtttgaaatggatcatacgaggcatgtaatacca

SEQ ID NO: 20446 - DNA, 2655 bp, Homo sapiens
  misc_feature 1..2655: note = ENST00000620389
  source 1..2655: mol_type = unassigned DNA
gaccaataaagggggctaaaaaagaagtaatcccagtcatctgttcttcaatcccaaataggagaaaattcagtttttttataattgaaaatggcatcattcttggaccaggcagtattgtctgggtgctaactccacatctcctcagacctccaaaatagtttctataggactaaatttacctcttacaggtgagtggagtccttctaggagacaggagttcaaaatcttgccccttttgctattttgaaaaacaacagcacactgttgcccatcataataaagagtatttgttagctaatagatggttgtactgatggcttgtttttcattttttttgtgctttttggtccatctattaataaaaatgaaccccgttacagagtcaccatcatgtctcttctcaccaccctctgaatctgcattagccagtcaactagccctttcagcgtcatgtgaccagcgcgccccattcagcttggctggtgtcgtttcacatgacccaggctggccagtcgtcaggttgcaccgccctttggttcccgagcatgctgttttctctcagccttctctccaaccttaaccaaatcggcagcagccacctcgaccgcccacacattcctggccaatcagctcagctgtttatttaccaaatgtcttcacaacaactacagcagcagccttcggctaacaaaaaagcaggaaaaatccacaacacccccttcgccaaccaactaaatccaacgcaacatctggcaaaaccttttcagcaaattcttcctggccgtcagtccggcagcctcacctcaccatttctagcttgttgaaacccaaaactagtaagtttttcctgcttatacagtttactgctggttaaaataaggagtaagcggcttaaagtaattcttttttctggatcaaaggctggctgtgcataattgaatggtaacgtacatatatattgcttgaaaaacttttaagggtgatagggaactcgtaatgtaactaggccttcaagtgaaacttatttgcatgtgcaagatgccaaactaaaaattttaatatctctaacagattagcttttctggcaaaaatttgttgaatcctatcacctttaaatggttttactaacagtttcaaaatttaaaattttggggttgaagtgtgggccaagctaaggtaattttggtaagcctaaacacactcttaaatgtgacgatcacaaatgcagttctaatgtagcacttaatggcatcaatatttacacctaccgcgttttcacaaaattacactatccacctggtacctaagtcttgtcatggacttacaggtttgcatgggttccaaatactggtttatggtactgtttttggaactacttgtgggactatattttggtgtggtgtttgggtagtgaagttagtttgacatgaagttttgcattggacagatctgctgtgaagcattctttgttaaagtgaatccatggttggaatacctgcttttcacttgagctttttgtttcttaatccttctgtgccttttttttcttttcttttttttctttttttttttttttttttttttttggacgatgggtgccagttcttcggcacattcactgggcccaacagtgagattgaaaagttgggaaatgcctcacgccataaatactaattgatgatgagcctaattttcctgtttctgcttttagatctccaagaaggagaagcttctctcgcagccggagcaggtccctttctagagataggagaagagagagatcgctgtctcgggagagaaatcacaagccgtcccgatccttctctaggtctcgtagtcgatctaggtcaaatgaaaggaaatagaagacagtttgcaagagaagtggtgtacaggaaattacttcatttgacaggagtatgtacagaaaattcaagttttgtttgagacttcataagcttggtgcatttttaagatgttttagctgttcaaatctgtttgtctcttgaaacagtgacacaaaggtgtaattctctatggtttgaaatggatcatacgaggcatgtaataccaagaattgttactttacaatgttcccttaagcaaaattgaatttgctttgaacttttagttatgcacagactgataataaacctctaaacctgcccagcggaagtgtgtttttttttaaatttaaatacagaaacaactggcaaaaattgaactaagatttacttttttttccatagctgggatataggctgcagctatagttgaacaagcagtctttaaaaactgctgtgaaacacaggccatcagggaaaacgaaatgctgcactattaaattagaggtttttgaaaaatccaactctcatcctgggcagaggttgcctagttggtatagaatgttaagtttcaagaaagtttacctttgctttaggtcataagttccttatttgattgctgtatatggatacatggctgttcgtgacattctttatgtgcaaatttgtgatttcaaaaatgtcctgccagtttaagggtacattgtagagccgaactttgagttactgtgcaagatttttttttcatgctgtcatttgtaatatgttttgtgagaatccttgggattaaagttttggttacaaattg

SEQ ID NO: 20447 - DNA, 2376 bp, Homo sapiens
  misc_feature 1..2376: note = ENST00000614136
  source 1..2376: mol_type = unassigned DNA
ttgaaaaacttttaagggtgatagggaactcgtaatgtaactaggccttcaagtgaaacttatttgcatgtgcaagatgccaaactaaaaattttaatatctctaacagattagcttttctggcaaaaatttgttgaatcctatcacctttaaatggttttactaacagtttcaaaatttaaaattttggggttgaagtgtgggccaagctaaggtaattttggtaagcctaaacacactcttaaatgtgacgatcacaaatgcagttctaatgtagcacttaatggcatcaatatttacacctaccgcgttttcacaaaattacactatccacctggtacctaagtcttgtcatggacttacaggtttgcatgggttccaaatactggtttatggtactgtttttggaactacttgtgggactatattttggtgtggtgtttgggtagtgaagttagtttgacatgaagttttgcattggacagatctgctgtgaagcattctttgttaaagtgaatccatggttggaatacctgcttttcacttgagctttttgtttcttaatccttctgtgccttttttttcttttcttttttttctttttttttttttttttttttttttggacgatgggtgccagttcttcggcacattcactgggcccaacagtgagattgaaaagttgggaaatgcctcacgccataaatactaattgatgatgagcctaattttcctgtttctgcttttagatctccaagaaggagaagcttctctcgcagccggagcaggtaaatgactaccttttttggctacgttcttagaaatggcagtgtttctgctattcctaaacttttccaggtggcttagttaatgggaataaaccttggctttaatagtgaatcaagttgtaaggatgagtcagctttctttgagttttcaaaggctttttagaaagtatttaattttttaaaaaaggatctgtcacccaggctggagtgcagtggtgtgattatagctcactgtagcctttaactcctggccttggagtgatcctccctcttcagcctcctgagtagcttggactacaggcaagtactgccatacctggctaatttattttttgtggagatgggatctcactttgttgtccaatctgttctcaaactcttggcttcaagtgagcctcctgcctctgcctcccaaaatattggaattattggcatgagtcaccatgccagatcaagaaaatatttatgtataattttatcatacctcattggtcctaatgtttttttgcttgtttaggtccctttctagagataggagaagagagagatcgctgtctcgggagagaaatcacaagccgtcccgatccttctctaggtctcgtaggtaagatctttgataacttgtatttaagactttgcatacatagtatgctaaggcctgtcttctaagccataaattttttaccttaaagttctatttcgatatgtcactaaagtgtcaccaagttacagatgtaatgttttgttttctttttttttttttttttttagtcgatctaggtcaaatgaaaggaaatagaagacagtttgcaagagaagtggtgtacaggaaattacttcatttgacaggagtatgtacagaaaattcaagttttgtttgagacttcataagcttggtgcatttttaagatgttttagctgttcaaatctgtttgtctcttgaaacagtgacacaaaggtgtaattctctatggtttgaaatggatcatacgaggcatgtaataccaagaattgttactttacaatgttcccttaagcaaaattgaatttgctttgaacttttagttatgcacagactgataataaacctctaaacctgcccagcggaagtgtgtttttttttaaatttaaatacagaaacaactggcaaaaattgaactaagatttacttttttttccatagctgggatataggctgcagctatagttgaacaagcagtctttaaaaactgctgtgaaacacaggccatcagggaaaacgaaatgctgcactattaaattagaggtttttgaaaaatccaactctcatcctgggcagaggttgcctagttggtatagaatgttaagtttcaagaaagtttacctttgctttaggtcataagttccttatttgattgctgtatatggatacatggctgttcgtgacattctttatgtgcaaatttgtgatttcaaaaatgtcctgccagtttaagggtacattgtagagccgaactttgagttactgtgcaagatttttttttcatgctgtcatttgtaatatgttttgtgagaatccttgggattaaagttttggttacaaattgtt

SEQ ID NO: 20448 - DNA, 13040 bp, Homo sapiens
  misc_feature 1..13040: note = ENST00000326495
  source 1..13040: mol_type = unassigned DNA
cggctccaggaggccccgggcccggcccgggcggcggtggcggtggcggctctagctcgagacgtctgtggcgccctcgcaccgcgccgcagccatggccctggtgaccctgcagcgctcgcccacgcccagcgccgcctcctcctcggccagcaacagcgagttggaggctggcagcgaagaagatcgaaaattaaacctcagcttaagtgagagctttttcatggtgaaaggcgcagccctcttcttacaacagggaagcagccctcaaggccagcggagtcttcagcacccccacaagcatgcaggtgatctgcctcaacatcttcaggtgatgatcaaccttctgcgttgcgaagacagaatcaagctggcagtgcgcctggagagcgcctgggcggaccgggtccggtacatggtggtggtgtacagcagcgggcgccaggacaccgaggagaatatcttgctgggagtggacttttccagtaaggaaagtaaaagctgcaccattgggatggttctccgactgtggagcgacacgaaaatccaccttgatggagatggtgggttcagcgtgagcacagcaggaaggatgcacatatttaagcctgtgtctgtccaggccatgtggtctgccctgcaggtgcttcacaaggcctgcgaagtggcccggaggcacaactacttccccgggggtgtagctctcatctgggctacctactatgagagctgcatcagctccgagcagagctgcatcaacgagtggaacgccatgcaggacctggagtctacgcggcccgactcccccgcgctatttgtggacaagcccactgaaggggaaaggaccgagcgcctcatcaaagccaagctccgaagcatcatgatgagccaggatctagaaaatgtgacttccaaagagattcgtaatgaattagagaaacagatgaattgtaacttgaaggaactcaaggaatttatagacaatgagatgctacttatcttgggacagatggacaagccctcccttatcttcgatcatctttatctcggctctgaatggaatgcatccaatctggaggaactgcagggctcaggggttgattacattttaaatgttaccagagaaatcgataatttttttcctggcttatttgcatatcataacatccgagtctacgatgaagagaccacagacctcctcgcccactggaatgaagcgtatcattttataaacaaagcgaagaggaaccattccaagtgcctggtgcattgcaaaatgggcgtgagtcgctcggcctccacagtcatagcctatgcaatgaaggaattcggctggcctctggaaaaagcatataactatgtaaagcagaagcgcagcatcacgcgccccaacgcgggctttatgaggcagctgtctgagtatgaaggcatcttggatgcaagcaaacagcggcacaacaagctgtggcgtcagcagacagacagcagcctccagcagcctgtggatgaccctgcaggacctggcgacttcttgccagagaccccagatggcaccccggaaagccagctgcccttcttggatgatgccgcccagcccggcttagggccccccctcccctgctgtttccggcgactctcagacccccttctgccttcccctgaggatgaaactggcagcttggtccacctggaggatccggagagggaggctctgttggaggaagctgctccacctgcagaggtgcacaggccggccagacagccccagcaaggttccggactctgtgagaaggatgtgaagaagaaactagagtttgggagtcccaaaggtcggagcggctccttgctgcaggtggaggagacggaaagggaggagggcctgggagcagggaggtgggggcagcttccaacccagctcgatcaaaacctgctcaactcggagaacctaaacaacaacagcaagaggagctgtcccaacggcatggaggatgatgctatatttgggatccttaacaaagtgaagccttcctataaatcctgtgccgactgcatgtaccctacagccagcggggctcctgaggcctccagggagcgatgtgaggaccccaatgctcccgccatctgcacccagccagccttcctaccccacatcacgtcctcccctgtggcccacttggccagcaggtcccgtgttccggagaagccagcctctggcccaaccgaacctcccccgttcctaccaccagcaggctccaggagggcagacaccagtggccctggggctggagctgccctagagccaccagccagccttttggaaccttccagagagaccccaaaagtcctgccaaagtccctccttttgaagaattctcactgtgataagaaccctcccagcacagaagtggtaataaaggaagaatcgtcacccaagaaagatatgaagccagccaaggacctgaggcttctgttcagtaatgaatctgagaagccgacaaccaacagctacctgatgcagcaccaggagtccatcattcagctgcagaaggcaggcttggtccgcaagcacaccaaagagctagagcggctgaagagcgtgcctgcagacccagcacctccctccagggatggccctgccagcaggctggaggccagcatccccgaggagagccaggatccagccgcgctccacgagctgggccccctggttatgcccagccaggccgggagtgatgagaagtcagaggccgcccccgcttcattggaaggaggctcactgaagagcccccctcctttcttctaccgcctggaccacaccagtagtttctcaaaagactttctgaagaccatctgctacacccccacctcctcttccatgagctccaacctgacccggagctccagcagcgatagcatccacagtgtccgtgggaagcccgggctggtgaagcagcggacacaggagattgagacccggctccggctggcgggcctcaccgtctcttccccactgaagcgctcacactctcttgccaagctggggagtctcaccttctcaacggaagacctgtccagtgaggctgacccgtccaccgtcgctgactcccaggacaccactttgagtgaatcttccttcttgcatgagccccagggaaccccgagggacccagctgcaacctccaaaccatcagggaaacccgccccagaaaacttaaagagcccttcgtggatgagcaaaagctgacccgccttttgctgcgtcaggctgggcggatattttcatatgatccctccctcactttcactgtggatttggatcgaccccttacatcttgatttcccttaaacgagtgaagtcatcctaacttttcccctactcttgccatagagaggaggagaagaaactaaccaacatgcagcacaagaaggggagctgtcagtcgtgtggcctgggagaaccaggagccgccggccaggagacacaaaactccgctcccaccgtgtcttcaagaagaaccatgttttaggaagaacgtgcacacataggcgcacacatccagactgttcccttcgcatcctgcagaagagtcctggtggtggcagcctcaccgcggcacacgttctagctcattcttggcctcgcagaaaactctcggatggcaacattaagtcctacctctgttctcgctgcgctttttatttttaaaacacacgaatgaccaaggcttgttccagggaataatgctctgtctgaaagcgtttttccaaaaaaagaatttttcgttttgtgttttggttgggaccccagacgtgtcaagacttttaacccgacagccccaagcactgctgagtaaagtcatcagatgagtagtcccacgctgttgttgagctgactctgtgcccgaatggtggtgcaggcgccctgtcctggttgtgttgttacgtgtttgaccagcacaggggtccggtggggaaaatgtatgggttgttctcagttgttgctaatgctgaagtttaaatctcaaggggaagggcccacctgcattgttgagtgtctgctgctgaaacacatgattgtgtttaggtttgaaattgctcaagtgtctggctcaggtggtggttctgagacacatcgtcctgctgagagcccagatgcttaggtccactagggcccatctagggaagggaaaggagatttcagcggcttccccgaaaggaacgggactgtcgggatgcttcccggatgtctacagttgccccttcctgcagtgagattactgcttcctgtttccctccagctcttcccagcagcagtgagggagtataagagggatctgtagtcgctgcctggctctgtgggcggcccctttaagactcaggtgagctcagccagtcccgctgcgccaggcttgaatcaaaggtgtcagcaagctagatgtcaaaacatttcgagagagaggcagcttgcagaaaagcagaaaggttgaattcaggggtcagcaaactatggcatgtggccccgtgagctaggaatggtttttcctctttaagacagggcctggctctgtcacctaggctggagtacagtagtgcaatcatgactcactgcagcatcaacctccctggctcaagcgatggcttttacctttttaaggagttgtaaaaaaaagaaataatatgtgacagaattcatgtggcccacaaagcctgaggtacttactgtcaggccctttgtagaaaaagttgctgacccctggtttgatttgccacacagggctgctcatggccctgtaggaagaaactgggtaaatgtgaagccctctgcctctctgacacctaaggccagacccttccctcctcccgaccacaagctttgccagccccgcactagcctcacctgtgcaggatggagtaggttgcgtacatgggggaaggcaggtgaacacagttggctgaagctcttccacaattccatcttgccctcagctgggtccgccagattaactcagtgaaaccagaaagccttcaaggaccagctgaattctgaaagtgagtgagtgagccatcatcttaacattggccagaactgtgttccccaaagctattctagaaagcaccccaggagggatctgcaggaacaaggctagttcatattttacctagtgagcacagtttttgcaaaaatcctccctccaggactttgtctccttggagtgatttttaaaaatacatacattactttatagggagctgttttcccactagtgtcaattaaaatcaccttaaaaggtgattatccacttattcctaaacccctgtgggttgttccccctttccctcagccaacaaaagcatagcctcaaaaaatatcaagttcggtatgttttgccaaatcaaatttcatgtggtagatcaatttttgtgtcaaaataatcttttaaatttagtgatgacaggcttttgttggttttttaaccacgtctatgtatgagaatgatatatttttgaaaactttaattttgaaagccataatttttcttatctaaagagttggggggtggggtgtggaatctggagagtacaagttggtctttggcttctggcaaacttacccattcatttttggaagcacagctagcatatcaacatccagacgagagcgctggtcccgtccacagagcagagtgaagcattctggacttgatgcttaatagcctggcctggagaaaagggtaaggtttatttttggaaacccagatcagttgcatgtaaacagatggcacatggctatttaaaatgctgtatgatggggccgggcgcggtggctcacgcctgtaatcctagcactttgggaggccgaggcaggcggatcatctgaggtcaggagttctagaccagcctggccaacatggtgaaaccccgtctctactaaaaatacaaaaacttagctgggtgtggtagtgcgtgcctgtaatcctagctacttaggaggctgaggcaggagaatcgcttgaacctgggtggcggaggttgcaatgagccgagatcgcgccactgcactccagcctgggtgcaatgaaactgggagtgaaactccgtctcaaaaaaataaaatgctgtatgaacaagatgagcattctgtcaggtgtcgggacacctgggcaaagacgaattcatgctgtctgtgaaaaggaagtttgcactgtaacatatgccatagcttggcccttgctttgtatgcaaccttagctgatggggaaaattccaaacataagtggcacaggaaagaggcaggcagaggaggcaggggtctgtgctgtgcaagtcactggttttttatgactatcattttcattgaatgcatttgttgaattgggacaaaaggaacattttctaaatcagcttgatactctttataaaaaacagctgaatcttatcttctgcctcacattaattcatgtggcatgccaaaagttagactgaacttttctacatcttcaccttgcattgatacaggaaagtcttctctttaagtcttgctaagtataagggggatagtggtcacgggaagaggagaaccggggctgctctcggatggtaattgacaatgccgatttccatttctttgtcttacggctacttccgagccttctagcaaggtccctggttgcatgtatttcctaagagcagagtttatttctctttacattccctgcttccttgctctccatgcagggaccccagccaacctctgggctgttgaatagctctctgctgggtggcaagcccttctccttggcaccctgttgcttaagcatacagattgctcaccaggtgcacacagacagctgtactgtccaagcccattctgctccaccctgtcctcttcagctaaagagcattccagtaatctaaagcccttttcccctggagaagtccagagtttgcagcagtgtggagctgagcttgaacagaacagaccctcagcacggccctggactaatgcactcttatctgagggcagtccattctagaaggttgatgaatttccctaccactctcctggggaccttttctctctagtgggaacaaatgctacataatttagtcaagatcctattaagtcatctcacctgaggcatctggagagggagttgccttccattggtgggaaattgttggtgccagaatacattttgcccaaaactcttctcattggctggccacctagcagggctcctctaaacacgcaactcagcgaggggacccccttcacctctggcaagagagctgggtagatcagaaacttggtgacacctggctagcacagagcaggctcacttgtcttggtcccactacccagattcctgcagacattgcaaaccaaatgaaggttgttgaatgacccctgtccccagccacttgttttgttatcatctgctctgcagtggaatgcctgtgtgtttgagttcactctgcatctgtatatttgagtatagaaaccgagtcaagtgatcatgtgcatccagacacactgtgtcacctgagccacagagcaaatcaccttaacgatctggaatgaaactgtgaccagtgccgccctgggtggttctggagagactgccgtcttcttgtttggccataggtgctggggccccggcttcagtcactgtctcagacaggagtcccgataagcagatcaccagtcctccactgtccttcctgtcggccttgctgcatgagaagatagctgcttcctccctcttttcctacactgtaattattgttttacaattgagtgccttaataatagtttacaaatactatgtatttatgcaaaactgttaaagtctcatctgttatgattggatacttggtcttgtcagtagtggtcagcattgggttgtgagcttgtcctactccatacgtgtttatcctgctatgcagttttacattgtgtgttcacatctattccaaggagccttgctagaaacaacactggcggttcctgcaggccaggcaggcattggcccatgctgtgtcccataggagccaatgaaagaacgtagcttggtctgctagccagccgtggggtggcgcaggccaggcagcctctgcaccagagtccagcacctgcccattccccagtcacacaatcatactcttctttcatagagattttattaccacctagaccaccctagttttcctctctgttagtgtcctgagctcttttgcaacaaaatgtaggtacagaccaatccctgtcccttccccaatcaggagctccacaccatgagttgtttggttttccagaagctgccagtgggttcccgtgaattgcgttaagatatcgatgattttttttattgtttttcttcttgtttttttaaataatatatttaaaggcagtatcttttgtactgtgaatttgcagtagaagatgcagaatgcactttttttttacttctgttggtgtgtattgtatatagtgtgtgtgcttcttgtgatgaaaataaactttttctttataaattcctgatgactgagtttatataaaaggaaactgcttcctcagcccttgccaaaacagtctgatacatcgtcatcatcatcgtcattgacatggccagtctttattgagcatctattacatgctcagttctttgctagaaaacctggacaagttacaccaaagaaaggaccacaggaagaaatgatagttcctcctggaactagtctgttttctttctaattttgtcagtaagcaagaacaggcccacctgtgggtggtcctttgtgtaccaaaaaaaaaaagttacccaccaggaaaggatttggactttgggtgggttctcttcccgtacaagtaggaaatgtaaagccagaggtgtgcactaaagaacatctaacctgctcccaccagccctggtgggagagggaggaccctggaggctaagtactgctggtttccaaggtgcatgctcatgtcccagtccacttcaccccaggcagcttttggtggctcttctcccttggacactcaggaggcagagctgcttccatttttttttttttaatttttttttttttttttttgagactgggtctggctctcttgctcaggctggagttcagtggtgccatcatagctcactgcaacctcgacttcctaggctaaagtgatcctcctgcctcaagcaatcctcccacctcagcctccccagtagctgggactacaggcgtgcaccaccttgccccgctaatttttacaatttattatagacatgaagtctcgctttgctgcccaggctggtctttaattcctgtcttcaagtgatcctcccaccttggcctcccaaagtgctgggattacaggtgtgagccacctcaacttccatcttaaaattctgcctccttagagttctttgctttctgctgtgtagtcagggaggagtcacattcactcagtctcctctgtctggatgcgatacatcatttctacttgctttccagtgggcagggcccagtcacagggtcccaatgcaacagccagggagactgggaaatgtatggggcacatgtatttggtgagcactaactgtcacaagtacctgggcgtgacccctaaattccagtgcctgcagagccaggaagtattttgttcagttcatctggacttgctctgtctctcaactggactcaaaagactgatgaataaaccagaatgcaagtttattactttaccaaaagaattataatcatcaagcagaccagattgctcacatgctgattagcacatttagtcctgctaggtaagtctttctttttttgagacagcctggagtgcagtggcagtcatggctcactgaagtgttgatctcctgggctccagcaatcctgcctcagcctcccaagtagctgggaccagagccacacactgctgcacccagctaaatttatttatttatttatttaaaagatagggtctcactatgttgcccagactggtcttgaactcctggtttctgatgatcctcctgcctcagcctcccaaagtgttgagattataggcatgagccactgtgcccagccccttctaggtaaatctctatggggtgccaaattttggttaagaattgcttattgaatattaaaagtttagtgggatgcttcttttttttttttcttttgagatggagtttagctcttgttgcccagactggagtgcaatggtgtgatctcagctcaccgcaacctctgcctcctgggttcaagtgattttcctgcctcagcctcccgagtagctgggaatacaggcatgtgccaccacgcctggctaattttgtatttttaatcgaaatggggtttctccatgttggtcaggctgttctcaaactcccaacctcaggtaatccacccgccttggcctcccaaagtgctgggattataggcatgagccaccgcgccaagccacaggatgcttctaatagtgttatcaagctataatgcagccctctctgtaaaatgttttaaaaacaaatcactgagggtcatggttcaagacactgttctctggcaaggttgaagatagctaacaaattctctttgggttccagccatgaatggggtgggatgggccccagcaatctgtatgtttctgagattccctgggaattctgatggccaagtttagaaaccatcaaaataagaatatgatgcaactgagtaggctcacgctttgctaattacattgcacacatgctttttggagacaacacccacactaccctaacaatgtgtgttcataaaactcatccgatacttatttgttcaaggccctaggacaatattcctgtaatgggctgcttttgccctgatttcctcctcagagtaactgtctcgcggttgggcacgatcccagatcacatctacagtggaggtggttttgctggggaggatccgcatgcttgtttgtgtttatgcctggggaaccccctcttggcaagatgttcgggagaggctccaaaggcagcacagaggacggcttggaacttagggggattcactttatggtaaagaagccctttctaaaggagagctccacccaggaaacaccacccacccacgcatccttgcctcctaaaaccaggttatgtttatcacataccttctatgtgctttacataaagaatcccctggaattctccaaactgggcattgtggtctgtgatgcatatctcaaaagaggtgagagggttgggcacggtggctcacgcctgtaatcccagcactttgggaagccaaggcaggtggatcacttgaggtcagaagctcaagaccagcctggctcacatggtgaaacgccgtctcaactaaaaatacaaaaattagccgggcatgatggcgggcgcctgtaatcccagctactcgggaggctgaggcaggagaatcgcttgaacccaggaggtggaggttgctgtgagccaagattgcaccactgcactccagcctgggtgacagagtgagactctgtctcaaaaaacaaaaaaaagaaaaaaaaaggtagaggagagtcctttttctaactttcttgaactctttggactaccttgggatccttctattaactgccttgttggcattattctcagtttatgaaaaaacaggcccacagagtggaagtaatttgcctacaggtacatctaaaaattgatgaagccagataggaactgctccctcatcatctgaaacccttcccagagctgtctctcccaccccagaagtagaaagaagccagacaaagatgcatcttgatctcccttgtggtttcagcaaggaagcagatgagttggagatgaagcccccagcccctgggaaattggacccacttcttgctccaaaggctattggggtgacacaaggtgtgtttctttcccgtagatcatattcaccatattttgcctttaaatggaaattgtgcatcctgaagtaccttgttaagagtccattttcaacctgaaattccttttttttgtaaaccacttcagcaaatacagtgtggcatttacattagcaacctcccagcctaggagaggatgctccagcatccgactctaaaagacaaatttgggcacggtggcttgacgcctgttatcccaacaccttgagaggccgaggcaggcagattgcttgagcccaggagttcaagaccagcccaggtaacatggtgaacccccatctctaccaataatacaaaaattagccaggcatggtggtgtgccagtggtcccagctacttgagtggctgaggtgaaggatctcctgagcctgggaggcagaggttgcagtgagccgagatcgaaccactgcactccagcttatgcaacagagcaagaccgtgtctcaaaaacaaataaaaataaaagattttaaaaagacaaattatcccacaaatggtacattgtggtggtggtggtggtggtggtggtagacctccctcttgctcttgaaattggatcagaacaaactgacaatgctacctacttcatggggtcattggtgaattcactgataatgcatgcaaatccccttctgcctggcacactacctaataaataaatggtggttgttattgttggaattggaggatatattcctagttgcaagggtttcacatgtattaccaagttaatcctcaccgcagatatgattctgttttacagaggaagcagtggatgctcagagaggttaggtaacgtgggtcagggacacacagccaggaaggggcagaggctgggagtgcctgactccaaattcatgcaatttctaccccaccatcttctccccaaggaaaatagtccctaatgcatgtgtgcaatgcttagagggcagtagatgctcaacagatgctgagagagtgagggagtaaatgagatatgccatgaaaaggagcccctgtggacttatgcgtgcgtttgtttaacttgtgggcaagtacttatagacaggtgcaaacaataaatctccttttgcaactg

SEQ ID NO: 20449 - DNA, 5621 bp, Homo sapiens
  misc_feature 1..5621: note = ENST00000546433
  source 1..5621: mol_type = unassigned DNA
acgccatgcaggacctggagtctacgcggcccgactcccccgcgctatttgtggacaagcccactgaaggggaaaggaccgagcgcctcatcaaagccaagctccgaagcatcatgatgagccaggatctagaaaatgtgacttccaaagagattcgtaatgaattagagaaacagatgaattgtaacttgaaggaactcaaggaatttatagacaatgagatgctacttatcttgggacagatggacaagccctcccttatcttcgatcatctttatctcggttgattacattttaaatgttaccagagaaatcgataatttttttcctggcttatttgcatatcataacatccgagtctacgatgaagagaccacagacctcctcgcccactggaatgaagcgtatcattttataaacaaagcgaagaggaaccattccaagtgcctggtgcattgcaaaatgggcgtgagtcgctcggcctccacagtcatagcctatgcaatgaaggaattcggctggcctctggaaaaagcatataactatgtaaagcagaagcgcagcatcacgcgccccaacgcgggctttatgaggcagctgtctgagtatgaaggcatcttggatgcaagcaaacagcggcacaacaagctgtggcgtcagcagacagacagcagcctccagcagcctgtggatgaccctgcaggacctggcgacttcttgccagagaccccagatggcaccccggaaagccagctgcccttcttggatgatgccgcccagcccggcttagggccccccctcccctgctgtttccggcgactctcagacccccttctgccttcccctgaggatgaaactggcagcttggtccacctggaggatccggagagggaggctctgttggaggaagctgctccacctgcagaggtgcacaggccggccagacagccccagcaaggttccggactctgtgagaaggatgtgaagaagaaactagagtttgggagtcccaaaggtcggagcggctccttgctgcaggtggaggagacggaaagggaggagggcctgggagcagggaggtgggggcagcttccaacccagctcgatcaaaacctgctcaactcggagaacctaaacaacaacagcaagaggagctgtcccaacggcatggaggatgatgctatatttgggatccttaacaaagtgaagccttcctataaatcctgtgccgactgcatgtaccctacagccagcggggctcctgaggcctccagggagcgatgtgaggaccccaatgctcccgccatctgcacccagccagccttcctaccccacatcacgtcctcccctgtggcccacttggccagcaggtcccgtgttccggagaagccagcctctggcccaaccgaacctcccccgttcctaccaccagcaggctccaggagggcagacaccagtggccctggggctggagctgccctagagccaccagccagccttttggaaccttccagagagaccccaaaagtcctgccaaagtccctccttttgaagaattctcactgtgataagaaccctcccagcacagaagtggtaataaaggaagaatcgtcacccaagaaagatatgaagccagccaaggacctgaggcttctgttcagtaatgaatctgagaagccgacaaccaacagctacctgatgcagcaccaggagtccatcattcagctgcagaaggcaggcttggtccgcaagcacaccaaagagctagagcggctgaagagcgtgcctgcagacccagcacctccctccagggatggccctgccagcaggctggaggccagcatccccgaggagagccaggatccagccgcgctccacgagctgggccccctggttatgcccagccaggccgggagtgatgagaagtcagaggccgcccccgcttcattggaaggaggctcactgaagagcccccctcctttcttctaccgcctggaccacaccagtagtttctcaaaagactttctgaagaccatctgctacacccccacctcctcttccatgagctccaacctgacccggagctccagcagcgatagcatccacagtgtccgtgggaagcccgggctggtgaagcagcggacacaggagattgagacccggctccggctggcgggcctcaccgtctcttccccactgaagcgctcacactctcttgccaagctggggagtctcaccttctcaacggaagacctgtccagtgaggctgacccgtccaccgtcgctgactcccaggacaccactttgagtgaatcttccttcttgcatgagccccagggaaccccgagggacccagctgcaacctccaaaccatcagggaaacccgccccagaaaacttaaagagcccttcgtggatgagcaaaagctgacccgccttttgctgcgtcaggctgggcggatattttcatatgatccctccctcactttcactgtggatttggatcgaccccttacatcttgatttcccttaaacgagtgaagtcatcctaacttttcccctactcttgccatagagaggaggagaagaaactaaccaacatgcagcacaagaaggggagctgtcagtcgtgtggcctgggagaaccaggagccgccggccaggagacacaaaactccgctcccaccgtgtcttcaagaagaaccatgttttaggaagaacgtgcacacataggcgcacacatccagactgttcccttcgcatcctgcagaagagtcctggtggtggcagcctcaccgcggcacacgttctagctcattcttggcctcgcagaaaactctcggatggcaacattaagtcctacctctgttctcgctgcgctttttatttttaaaacacacgaatgaccaaggcttgttccagggaataatgctctgtctgaaagcgtttttccaaaaaaagaatttttcgttttgtgttttggttgggaccccagacgtgtcaagacttttaacccgacagccccaagcactgctgagtaaagtcatcagatgagtagtcccacgctgttgttgagctgactctgtgcccgaatggtggtgcaggcgccctgtcctggttgtgttgttacgtgtttgaccagcacaggggtccggtggggaaaatgtatgggttgttctcagttgttgctaatgctgaagtttaaatctcaaggggaagggcccacctgcattgttgagtgtctgctgctgaaacacatgattgtgtttaggtttgaaattgctcaagtgtctggctcaggtggtggttctgagacacatcgtcctgctgagagcccagatgcttaggtccactagggcccatctagggaagggaaaggagatttcagcggcttccccgaaaggaacgggactgtcgggatgcttcccggatgtctacagttgccccttcctgcagtgagattactgcttcctgtttccctccagctcttcccagcagcagtgagggagtataagagggatctgtagtcgctgcctggctctgtgggcggcccctttaagactcaggtgagctcagccagtcccgctgcgccaggcttgaatcaaaggtgtcagcaagctagatgtcaaaacatttcgagagagaggcagcttgcagaaaagcagaaaggttgaattcaggggtcagcaaactatggcatgtggccccgtgagctaggaatggtttttcctctttaagacagggcctggctctgtcacctaggctggagtacagtagtgcaatcatgactcactgcagcatcaacctccctggctcaagcgatggcttttacctttttaaggagttgtaaaaaaaagaaataatatgtgacagaattcatgtggcccacaaagcctgaggtacttactgtcaggccctttgtagaaaaagttgctgacccctggtttgatttgccacacagggctgctcatggccctgtaggaagaaactgggtaaatgtgaagccctctgcctctctgacacctaaggccagacccttccctcctcccgaccacaagctttgccagccccgcactagcctcacctgtgcaggatggagtaggttgcgtacatgggggaaggcaggtgaacacagttggctgaagctcttccacaattccatcttgccctcagctgggtccgccagattaactcagtgaaaccagaaagccttcaaggaccagctgaattctgaaagtgagtgagtgagccatcatcttaacattggccagaactgtgttccccaaagctattctagaaagcaccccaggagggatctgcaggaacaaggctagttcatattttacctagtgagcacagtttttgcaaaaatcctccctccaggactttgtctccttggagtgatttttaaaaatacatacattactttatagggagctgttttcccactagtgtcaattaaaatcaccttaaaaggtgattatccacttattcctaaacccctgtgggttgttccccctttccctcagccaacaaaagcatagcctcaaaaaatatcaagttcggtatgttttgccaaatcaaatttcatgtggtagatcaatttttgtgtcaaaataatcttttaaatttagtgatgacaggcttttgttggttttttaaccacgtctatgtatgagaatgatatatttttgaaaactttaattttgaaagccataatttttcttatctaaagagttggggggtggggtgtggaatctggagagtacaagttggtctttggcttctggcaaacttacccattcatttttggaagcacagctagcatatcaacatccagacgagagcgctggtcccgtccacagagcagagtgaagcattctggacttgatgcttaatagcctggcctggagaaaagggtaaggtttatttttggaaacccagatcagttgcatgtaaacagatggcacatggctatttaaaatgctgtatgatggggccgggcgcggtggctcacgcctgtaatcctagcactttgggaggccgaggcaggcggatcatctgaggtcaggagttctagaccagcctggccaacatggtgaaaccccgtctctactaaaaatacaaaaacttagctgggtgtggtagtgcgtgcctgtaatcctagctacttaggaggctgaggcaggagaatcgcttgaacctgggtggcggaggttgcaatgagccgagatcgcgccactgcactccagcctgggtgcaatgaaactgggagtgaaactccgtctcaaaaaaataaaatgctgtatgaacaagatgagcattctgtcaggtgtcgggacacctgggcaaagacgaattcatgctgtctgtgaaaaggaagtttgcactgtaacatatgccatagcttggcccttgctttgtatgcaaccttagctgatggggaaaattccaaacataagtggcacaggaaagaggcaggcagaggaggcaggggtctgtgctgtgcaagtcactggttttttatgactatcattttcattgaatgcatttgttgaattgggacaaaaggaacattttctaaatcagcttgatactctttataaaaaacagctgaatctt

SEQ ID NO: 20450 - DNA, 2354 bp, Homo sapiens
  misc_feature 1..2354: note = ENST00000551165
  source 1..2354: mol_type = unassigned DNA
cggctccaggaggccccgggcccggcccgggcggcggtggcggtggcggctctagctcgagacgtctgtggcgccctcgcaccgcgccgcagccatggccctggtgaccctgcagcgctcgcccacgcccagcgccgcctcctcctcggccagcaacagcgagttggaggctggcagcgaagaagatcgaaaattaaacctcagcttaagtgagagctttttcatggtgaaaggcgcagccctcttcttacaacagggaagcagccctcaaggccagcggagtcttcagcacccccacaagcatgcaggtgatctgcctcaacatcttcaggtgatgatcaaccttctgcgttgcgaagacagaatcaagctggcagtgcgcctggagagcgcctgggcggaccgggtccggtacatggtggtggtgtacagcagcgggcgccaggacaccgaggagaatatcttgctgggagtggacttttccagtaaggaaagtaaaagctgcaccattgggatggttctccgactgtggagcgacacgaaaatccaccttgatggagatggtgggttcagcgtgagcacagcaggaaggatgcacatatttaagcctgtgtctgtccaggccatgtggtctgccctgcaggtgcttcacaaggcctgcgaagtggcccggaggcacaactacttccccgggggtgtagctctcatctgggctacctactatgagagctgcatcagctccgagcagagctgcatcaacgagtggaacgccatgcaggacctggagtctacgcggcccgactcccccgcgctatttgtggacaagcccactgaaggggaaaggaccgagcgcctcatcaaagccaagctccgaagcatcatgatgagccaggatctagaaaatgtgacttccaaagagattcgtaatgaattagagaaacagatgaattgtaacttgaaggaactcaaggaatttatagacaatgagatgctacttatcttgggacagatggacaagccctcccttatcttcgatcatctttatctcggctctgaatggaatgcatccaatctggaggaactgcagggctcaggggttgattacattttaaatgttaccagagaaatcgataatttttttcctggcttatttgcatatcataacatccgagtctacgatgaagagaccacagacctcctcgcccactggaatgaagcgtatcattttataaacaaagcgaagaggaaccattccaagtgcctggtgcattgcaaaatgggcgtgagtcgctcggcctccacagtcatagcctatgcaatgaaggaattcggctggcctctggaaaaagcatataactatgtaaagcagaagcgcagcatcacgcgccccaacgcgggctttatgaggcagctgtctgagtatgaaggcatcttggatgcaagcaaacagcggcacaacaagctgtggcgtcagcagacagacagcagcctccagcagcctgtggatgaccctgcaggacctggcgacttcttgccagagaccccagatggcaccccggaaagccagctgcccttcttggatgatgccgcccagcccggcttagggccccccctcccctgctgtttccggcgactctcagacccccttctgccttcccctgaggatgaaactggcagcttggtccacctggaggatccggagagggaggctctgttggaggaagctgctccacctgcagaggtgcacaggccggccagacagccccagcaaggttccggactctgtgagaaggatgtgaagaagaaactagagtttgggagtcccaaaggtcggagcggctccttgctgcaggtggaggagacggaaagggaggagggcctgggagcagggaggtgggggcagcttccaacccagctcgatcaaaacctgctcaactcggagaacctaaacaacaacagcaagaggagctgtcccaacggcatggaggtaggcagagcccggcctgcagggtggcacaccccatcccttccatcccactctaattggcctacctcagcctctgtagtagggactacaggcacccgccaccacacccagctgatttttttctattgtctcctctgggcccccagctcccatctccagggacctgagggttctttcacagggtgattctgctggtgggtacgtagtgcataccttatatagcaaattgagaatctgttgggaataacacatatctctgcacaccatcttcaccccatgtaccttattcataccctgggcagggcttccaactcaatttctttttgtgtatgtaaaattaaaacatataatttatcagccaacttca

SEQ ID NO: 20451 - DNA, 2432 bp, Homo sapiens
  misc_feature 1..2432: note = ENST00000326470
  source 1..2432: mol_type = unassigned DNA
tttttcagccaaaatatcagaggaagacaagagttccacaagagccatttgcttttcgggtaggactctgaggaggagttggctccccagccctcgtggaagcactcggcagcctcctggcttttcctgatctccatagggagcagatggccagagctcggagggcagttgtagggagcgttagagatgtgagcactgcagccacgaacctcttttattttaccgacttctgcatcttccttcagccaacccactgcttctgctgtccagaggtttccagctcaaattacttaagtgagagctttttcatggtgaaaggcgcagccctcttcttacaacagggaagcagccctcaaggccagcggagtcttcagcacccccacaagcatgcaggtgatctgcctcaacatcttcaggtgatgatcaaccttctgcgttgcgaagacagaatcaagctggcagtgcgcctggagagcgcctgggcggaccgggtccggtacatggtggtggtgtacagcagcgggcgccaggacaccgaggagaatatcttgctgggagtggacttttccagtaaggaaagtaaaagctgcaccattgggatggttctccgactgtggagcgacacgaaaatccaccttgatggagatggtgggttcagcgtgagcacagcaggaaggatgcacatatttaagcctgtgtctgtccaggccatgtggtctgccctgcaggtgcttcacaaggcctgcgaagtggcccggaggcacaactacttccccgggggtgtagctctcatctgggctacctactatgagagctgcatcagctccgagcagagctgcatcaacgagtggaacgccatgcaggacctggagtctacgcggcccgactcccccgcgctatttgtggacaagcccactgaaggggaaaggaccgagcgcctcatcaaagccaagctccgaagcatcatgatgagccaggatctagaaaatgtgacttccaaagagattcgtaatgaattagagaaacagatgaattgtaacttgaaggaactcaaggaatttatagacaatgagatgctacttatcttgggacagatggacaagccctcccttatcttcgatcatctttatctcggctctgaatggaatgcatccaatctggaggaactgcagggctcaggggttgattacattttaaatgttaccagagaaatcgataatttttttcctggcttatttgcatatcataacatccgagtctacgatgaagagaccacagacctcctcgcccactggaatgaagcgtatcattttataaacaaagcgaagaggaaccattccaagtgcctggtgcattgcaaaatgggcgtgagtcgctcggcctccacagtcatagcctatgcaatgaaggaattcggctggcctctggaaaaagcatataactatgtaaagcagaagcgcagcatcacgcgccccaacgcgggctttatgaggcagctgtctgagtatgaaggcatcttggatgcaagcaaacagcggcacaacaagctgtggcgtcagcagacagacagcagcctccagcagcctgtggatgaccctgcaggacctggcgacttcttgccagagaccccagatggcaccccggaaagccagctgcccttcttggatgatgccgcccagcccggcttagggccccccctcccctgctgtttccggcgactctcagacccccttctgccttcccctgaggatgaaactggcagcttggtccacctggaggatccggagagggaggctctgttggaggaagctgctccacctgcagaggtgcacaggccggccagacagccccagcaaggttccggactctgtgagaaggatgtgaagaagaaactagagtttgggagtcccaaaggtcggagcggctccttgctgcaggtggaggagacggaaagggaggagggcctgggagcagggaggtgggggcagcttccaacccagctcgatcaaaacctgctcaactcggagaacctaaacaacaacagcaagaggagctgtcccaacggcatggaggtaggcagagcccggcctgcagggtggcacaccccatcccttccatcccactctaattggcctacctcagcctctgtagtagggactacaggcacccgccaccacacccagctgatttttttctattgtctcctctgggcccccagctcccatctccagggacctgagggttctttcacagggtgattctgctggtgggtacgtagtgcataccttatatagcaaattgagaatctgttgggaataacacatatctctgcacaccatcttcaccccatgtaccttattcataccctgggcagggcttccaactcaatttctttttgtgtatgtaaaattaaaacatataatttatcagcc

SEQ ID NO: 20452 - DNA, 625 bp, Homo sapiens
  misc_feature 1..625: note = ENST00000547862
  source 1..625: mol_type = unassigned DNA
gctggtctcgaactcctgacctcaagtgatctgcctaccttggcctcccaaagtgctgggattacaggcctgaaccaccatgcccagccaagaattttctcttcatttttaactcccagagggaaaggtagaacactgaaagtgttgatcttgcattggagatgggagggaggcaccacctccaaaggcaggttagtgagagcatgtctgccctgttccaggcagtgcgcctggagagcgcctgggcggaccgggtccggtacatggtggtggtgtacagcagcgggcgccaggacaccgaggagaatatcttgctgggagtggacttttccagtaaggaaagtgggttcagcgtgagcacagcaggaaggatgcacatatttaagcctgtgtctgtccaggccatgtggtctgccctgcaggtgcttcacaaggcctgcgaagtggcccggaggcacaactacttccccgggggtgtagctctcatctgggctacctactatgagagctgcatcagctccgagcagagctgcatcaacgagtggaacgccatgcaggacctggagtctacgcggcccgactcccccgcgctatttgtggacaagtaagtgaggtgcctctggtg

SEQ ID NO: 20453 - DNA, 602 bp, Homo sapiens
  misc_feature 1..602: note = ENST00000548522
  source 1..602: mol_type = unassigned DNA
cgcaccgcgccgcagccatggccctggtgaccctgcagcgctcgcccacgcccagcgccgcctcctcctcggccagcaacagcgagttggaggctggcagcgaagaagatcgaaaattaaacctcaggtgatctgcctcaacatcttcaggtgatgatcaaccttctgcgttgcgaagacagaatcaagctggcagtgcgcctggagagcgcctgggcggaccgggtccggtacatggtggtggtgtacagcagcgggcgccaggacaccgaggagaatatcttgctgggagtggacttttccagtaaggaaagtaaaagctgcaccattgggatggttctccgactgtggagcgacacgaaaatccaccttgatggagatggtgggttcagcgtgagcacagcaggaaggatgcacatatttaagcctgtgtctgtccaggccatgtggtctgccctgcaggtgcttcacaaggcctgcgaagtggcccggaggcacaactacttccccgggggtgtagctctcatctgggctacctactatgagagctgcatcagctccgagcagagctgcatcaacgagtggaacgccatgcaggacct

SEQ ID NO: 20454 - DNA, 476 bp, Homo sapiens
  misc_feature 1..476: note = ENST00000547381
  source 1..476: mol_type = unassigned DNA
ccaagtacacatgtggcctccgccagcagagcaccagccctgggcagctgcctccctgctgtagagtgggcgtgcggtcagcccacactgcacccaaaagcctcagctgagcacttacggagttgtgtccacagggccatcccagacctgtgtcttctagaattcatcagtgaacggttcctatgcagacagcctactcccacacgtacgtccaacagcccgtcctggaccaggtggtgagctggaaaggctgtacacgtaggtgggtagacgctgactccacatgtcttctctcccccatcgcagtaaaagctgcaccattgggatggttctccgactgtggagcgacacgaaaatccaccttgatggagatggtgggttcagcgtgagcacagcaggaaggatgcacatatttaagcctgtgtctgtccaggccatgtggtctgccctgcaggtgcttcacaaggcctgcgaag

SEQ ID NO: 20455 - DNA, 583 bp, Homo sapiens
  misc_feature 1..583: note = ENST00000546697
  source 1..583: mol_type = unassigned DNA
aacatggaggaggaacagctggccttgtaagtgatcacagagtgaaaccagcctagtctgttgcattgttcctttttttttccaaaggaaatataagggaaaccaaggggaatttttgctcatggtttccaaggcaaaggtcatcgttaatggttggctgtttccagcgtgcttgggtttctgcttaagtgagagctttttcatggtgaaaggcgcagccctcttcttacaacagggaagcagccctcaaggccagcggagtcttcagcacccccacaagcatgcaggtgatctgcctcaacatcttcaggtgatgatcaaccttctgcgttgcgaagacagaatcaagctggcagtgcgcctggagagcgcctgggcggaccgggtccggtacatggtggtggtgtacagcagcgggcgccaggacaccgaggagaatatcttgctgggagtggacttttccagtaaggaaagtaaaagctgcaccattgggatggttctccgactgtggagcgacacgaaaatccaccttgatggagatggtgggttcagcgtgagcacagcaggaaggatgcacatattt

SEQ ID NO: 20456 - DNA, 588 bp, Homo sapiens
  misc_feature 1..588: note = ENST00000546812
  source 1..588: mol_type = unassigned DNA
gttacttgattgtcgtgggggaacagaggcagagtgttccagggccccaatcaatgccatcctgacttcatgcgtagagcaggagtccctgattcttatcagtgtaggaacatggaggaggaacagctggccttgtaagtgatcacagagtgaaaccagcctagtctgttgcattgttcctttttttttccaaaggaaatataagggaaaccaaggggaatttttgctcatggtttccaaggcaaaggtcatcgttaatggttggctgtttccagcgtgcttgggtttctgcttaagtgagagctttttcatggtgaaaggcgcagccctcttcttacaacagggaagcagccctcaaggccagcggagtcttcagcacccccacaagcatgcaggcagtgcgcctggagagcgcctgggcggaccgggtccggtacatggtggtggtgtacagcagcgggcgccaggacaccgaggagaatatcttgctgggagtggacttttccagtaaggaaagtaaaagctgcaccattgggatggttctccgactgtggagcgacacgaaaatccaccttgatggagatgggt

SEQ ID NO: 20457 - DNA, 4295 bp, Homo sapiens
  misc_feature 1..4295: note = ENST00000267377
  source 1..4295: mol_type = unassigned DNA
tggtcatcgcacggcggcagctcctcacctggatttagaagagctggcgtccccgcccgcccaagcctttaaactctcgtctgccagaacccgccaactctccaggcttagggccagtttccgcgattctaagagtaattgcgtgggcacctgtgctggggccaggcgcaaagaagggagttggtctgcgcgaagatcgtcaacctgctaacagaccgcacatgcactttgcaccgaccatctacgtctcagtctggaggttgcgcactttggctgctgacgcgctggtggtgcctattaatcatttaccagtccagagccgcgccagttaatggctgtgccgtgcggtgctcccacatcctggcctctcctctccacggtcgcctgtgcccgggcaccccggagctgcaaactgcagagcccaggcaaccgctgggctgtgcgccccgccggcgccggtaggagccgcgctccccgcagcggttgcgctctacccggaggcgctgggcggctgtgggctgcaggcaagcggtcgggtggggagggagggcgcaggcggcgggtgcgcgaggagaaagccccagccctggcagccccactggcccccctcagctgggatgttccccaatggcaccgcctcctctccttcctcctctcctagccccagcccgggcagctgcggcgaaggcggcggcagcaggggccccggggccggcgctgcggacggcatggaggagccagggcgaaatgcgtcccagaacgggaccttgagcgagggccagggcagcgccatcctgatctctttcatctactccgtggtgtgcctggtggggctgtgtgggaactctatggtcatctacgtgatcctgcgctatgccaagatgaagacggccaccaacatctacatcctaaatctggccattgctgatgagctgctcatgctcagcgtgcccttcctagtcacctccacgttgttgcgccactggcccttcggtgcgctgctctgccgcctcgtgctcagcgtggacgcggtcaacatgttcaccagcatctactgtctgactgtgctcagcgtggaccgctacgtggccgtggtgcatcccatcaaggcggcccgctaccgccggcccaccgtggccaaggtagtaaacctgggcgtgtgggtgctatcgctgctcgtcatcctgcccatcgtggtcttctctcgcaccgcggccaacagcgacggcacggtggcttgcaacatgctcatgccagagcccgctcaacgctggctggtgggcttcgtgttgtacacatttctcatgggcttcctgctgcccgtgggggctatctgcctgtgctacgtgctcatcattgctaagatgcgcatggtggccctcaaggccggctggcagcagcgcaagcgctcggagcgcaagatcaccttaatggtgatgatggtggtgatggtgtttgtcatctgctggatgcctttctacgtggtgcagctggtcaacgtgtttgctgagcaggacgacgccacggtgagtcagctgtcggtcatcctcggctatgccaacagctgcgccaaccccatcctctatggctttctctcagacaacttcaagcgctctttccaacgcatcctatgcctcagctggatggacaacgccgcggaggagccggttgactattacgccaccgcgctcaagagccgtgcctacagtgtggaagacttccaacctgagaacctggagtccggcggcgtcttccgtaatggcacctgcacgtcccggatcacgacgctctgagcccgggccacgcaggggctctgagcccgggccacgcaggggccctgagccaaaagagggggagaatgagaagggaaggccgggtgcgaaagggacggtatccagggcgccagggtgctgtcgggataacgtggggctaggacactgacagcctttgatggaggaacccaagaaaggcgcgcgacaatggtagaagtgagagctttgcttataaactgggaaggctttcaggctacctttttctgggtctcccactttctgttccttcctccactgcgcttactcctctgaccctccttctattttccctaccctgcaacttctatcctttcttccgcaccgtcccgccagtgcagatcacgaactcattaacaactcattctgatcctcagcccctccagtcgttatttctgtttgtttaagctgagccacggataccgccacgggtttccctcggcgttagtccctagccgcgcggggccgctgtccaggttctgtctggtgcccctactggagtcccgggaatgaccgctctccctttgcgcagccctaccttaaggaaagttggacttgagaaagatctaagcagctggtcttttctcctactcttgggtgaaggtgcatctttccctgccctcccctgtccccctctcgccgcccgcccgccaccaccactctcactccacccagagtagagccaggtgcttagtaaaataggtcccgcgcttcgaactccaggctttctggagttcccacccaagccctcctttggagcaaagaaggagctgagaacaagccgaatgaggagtttttataagattgcggggtcggagtgtgggcgcgtaataggaatcaccctcctactgcgcgttttcaaagaccaagcgctgggcgctcccgggccgcgcgtctgcgttaggcagggcagggtagtgcagggcacaccttccccggggttcggggttcggggttcggttgcagggctgcagcccgccttggctttctccctcacccaagtttccggaggagccgacctaaaagtaacaatagataaggtttcctgctccagtgtatctcaaaagaccgggcgccaggggcgggggacctagggcgacgtcttcagagtccgccagtgttggcggtgtcgccgcaacctgcaggctcccgagtggggcctgcctggtctctagagggttgctgcctttcaagcggtgcctaagaagttattttcttgtttaacatatatatttattaatttatttgtcgtgttggaaaatgtgtctctgctttccttttctctgcttgcctagccccaggtcttttctttgggaccctgggggcgggcatggaagtggaagtaggggcaagctcttgccccactccctggccatctcaacgcctctcctcaatgctgggccctcttatctcatcctttcctctagcttttctatttttgattgtgttgagtgaagtttggagatttttcatacttttcttactatagtctcttgtttgtcttattaggataatacataaatgataatgtgggttatcctcctctccatgcacagtggaaagtcctgaactcctggctttccaggagacatatataggggaacatcaccctatatataatttgagtgtatatatatttatatatatgatgtggacatatgtatacttatcttgctccattgtcatgagtccatgagtctaagtatagccactgatggtgacaggtgtgagtctggctggaacactttcagtttcaggagtgcaagcagcactcaaacctggagctgaggaatctaattcagacagagactttaatcactgctgaagatgcccctgctccctctgggttccagcagaggtgattcttacatatgatccagttaacatcatcactttttttgaggacattgaaagtgaaataatttgtgtctgtgtttaatattaccaactacattggaagcctgagcagggcgaggaccaataattttaattatttatatttcctgtattgctttagtatgctggcttgtacatagtaggcactaaatacatgtttgttggttgattgtttaagccagagtgtattacaacaatctggagatactaaatctggggttctcaggttcactcattgacatgatatacaatggttaaaatcactattgaaaaatacgttttgtgtatatttgcttcaacaactttgtgctttcctgaaagcagtaaccaagagttaagatatccctaatgttttgcttaaactaatgaacaaatatgctttgggtcataaatcagaaagtttagatctgtcccttaataaaaatatatattactactcctttggaaaatagatttttaatggttaagaactgtgaaatttacaaatcaaaatcttaatcattatccttctaagaggatacaaatttagtgctcttaacttgttaccattgtaatattaactaaataaacagatgtattatgctgttgcaa

SEQ ID NO: 20458 - DNA, 530 bp, Homo sapiens
  misc_feature 1..530: note = ENST00000579323
  source 1..530: mol_type = unassigned DNA
tcccagcggcgcagccacccatgcgcgcgcgctcgcaagaccaccagcgcccagagccccagtctgaggcttggcgccgggggtctgcgggcgaggggagctctctacgtgcgaggggctagcgggagccggcacaagagggtcgaggagccaggaaccccaaacgtccggcgccaggcgctagccaagctgctgcgcgccccggcgcccagctggctcggggacagccgctgggtgtcggagaccggagctagcggattgcagcggaaaagcaaagcaaggaagtaacacaggagtcagttgcttcaaaccaaagcccagttatcagccgttcggtctctaggccactgaggagcagaggggatgccttgagacgtgcaaaagacttggggccaggtggcctgtgttcacatcccagctccaccaattatgtgcaagagaatgggatgtcacactggatccttggcctccagggtccattaaggtgagaataagatctctgggctggctggaactagcctaagactgaa

SEQ ID NO: 20459 - DNA, 7683 bp, Homo sapiens
  misc_feature 1..7683: note = ENST00000357585
  source 1..7683: mol_type = unassigned DNA
tcccagcggcgcagccacccatgcgcgcgcgctcgcaagaccaccagcgcccagagccccagtctgaggcttggcgccgggggtctgcgggcgaggggagctctctacgtgcgaggggctagcgggagccggcacaagagggtcgaggagccaggaaccccaaacgtccggcgccaggcgctagccaagctgctgcgcgccccggcgcccagctggctcggggacagccgctgggtgtcggagaccggagctagcggattgcagcggaaaagcaaagatgtcacactggatccttggcctccagggtccattaaggtgagaataagatctctgggctggctggaactagcctaagactgaaaagcagccatggacatggcggatgagccactcaatggaagccacacatggctatccattccatttgacctcaatggctctgtggtgtcaaccaacacctcaaaccagacagagccgtactatgacctgacaagcaatgcagtcctcacattcatctattttgtggtctgcatcattgggttgtgtggcaacacacttgtcatttatgtcatcctccgctatgccaagatgaagaccatcaccaacatttacatcctcaacctggccatcgcagatgagctcttcatgctgggtctgcctttcttggctatgcaggtggctctggtccactggccctttggcaaggccatttgccgggtggtcatgactgtggatggcatcaatcagttcaccagcatcttctgcctgacagtcatgagcatcgaccgatacctggctgtggtccaccccatcaagtcggccaagtggaggagaccccggacggccaagatgatcaccatggctgtgtggggagtctctctgctggtcatcttgcccatcatgatatatgctgggctccggagcaaccagtgggggagaagcagctgcaccatcaactggccaggtgaatctggggcttggtacacagggttcatcatctacactttcattctggggttcctggtacccctcaccatcatctgtctttgctacctgttcattatcatcaaggtgaagtcctctggaatccgagtgggctcctctaagaggaagaagtctgagaagaaggtcacccgaatggtgtccatcgtggtggctgtcttcatcttctgctggcttcccttctacatattcaacgtttcttccgtctccatggccatcagccccaccccagcccttaaaggcatgtttgactttgtggtggtcctcacctatgctaacagctgtgccaaccctatcctatatgccttcttgtctgacaacttcaagaagagcttccagaatgtcctctgcttggtcaaggtgagcggcacagatgatggggagcggagtgacagtaagcaggacaaatcccggctgaatgagaccacggagacccagaggaccctcctcaatggagacctccaaaccagtatctgaactgcttggggggtgggaaagaaccaagccatgctctgtctactggcaatgggctccctacccacactggcttcctgcctcccacccctcacacctggcttctagaatagaggattgctcagcatgagtccaattcagagaacggtgtttgagtcagcttgtctgattgaatgataatgtgctaaattgattacctcccccttaaagcgaacactgaaatgcaggtagacaattcaaagtctggagaagagggatcatgcctggatatgatctttagaaacaacaaaaatagaaaaaaataagtatctgtgtgtttgtgtattgaaaactcaatatgtaatcttgtgtttttatatgtatacttgtatattcctatttattctctgtataggcattacctacgttcctgtgtttacatacacaagtagcaaattcgagtatgcatagtgtagatggacatttgccacaacacactgcccgcagaaatggacttaccgtgaagccaataaagttcaagcttcagggatctctcttgcacgggccttgccaaggcccaggagggacttgggcagtatgttcatgtggtcatatgtttttgtaaaaaattgtgaaagtaagatatgtttgtattgtttttcttaaagaggaacctcgtataagcttcaagcctcacaaaccttctagcctctgcccttggggatttgcttcattaatttcaggcaagtgaggtcaatgtaagaagggaaagggagaagatatttgaagaaccagaatgtaaattcatgtgtttccacttctcagatatagtcagagaattattcatttgcccaaaaggacttaagtggttgtggtcatccatcattgtatttatcaagacaaagccaactttgttataagattgcatttttttcttttcaaattgctttagtttttcttagggagctatgagggggaaaaatcactaacatgaaaggcaaaaaatggactatgattcctgtggggaaacaatttcattctctccatcgtgaaaataagtgaataagagtgaagcaaaattacacctttatgagaaaccataaaattgtttttatttttcaggccagacatagcttcctaatgaaagaaaatggaaatgtaattcgacgactcctcaaaggggactttagaggacttcatacaaagctgggcattaagaaaaccacaatgcatggccgggcgtggtggcttacacctgtaatcccagcactttgggaggccgaggtgggtggatcacccgaggtcaggagttcgagaccagcctggccaacatggtgaaaccccatcactactaaaaatatgtaaattagtcgggcgtggtgtcacgtgcctgtaatcctagctgctcgggaggctgaggcaggagaatcacttgaacttgggaggtggaggttgcagtaagctgagattgtgccactgcactctagcctgagcaacaagagcaaaactcagtctcaaaaaaaaaaaaaaaaaaaaaaaaaaaaaaaaaaaaggaaaaccacaatgcgtactaaagaccagaagacattgttcacaaaacaaaagcaccctcacctgccaatgaatatgcagcgtgcagggggtgtggtgtgagtgttggtggggccccacctctcggagatactgctgtgctgccttcctcactgactgtatacatagtaactgtcatatctttaatgccatggactcactgagccgctctgcaaggactattgtagacaggcacttcacaccataaagtggcatttttttcgttccccaaactgacatttacaagcgataagaaaagagacaatatccatttcattgactgatcattttctagagtatgaagaaatacacacctgggtgtctgcaaggatgtcatcatctttgggtttcatctgagagcatcactcagcatctcacacatagatgttaccatatttttaaatgagctttcctcatccggctccctaagcaagcgctgttggccggtgggagtgactaagtgctccacctgtgggtgtccttcttaatgtgctgcttttgttctgtataaattcacaccacctcactcccaaaagtacttcctgtggctcagaaaaatatgttcaataagattttggatagataaatccatacaaaaataaaaagaggtatagttataaaacaagactacagaaaaagttgtggcagaaattgcatgcaggaaaatcccacaccattagtaaaagtaaggtcaactgtaagttcagctcagggcttcctagcagccatgtttagcgaagtgtgatttttttttttaaacaaaaacaagcaaagatttggaagaaaatgctttagacctaactttacaattattataacataagatgttccagggtccttgaataaatgctgagttttagggaaatgattccaagggaccaagaattggtagaaataatttcaaggcagagaagactaattctacaggccgggcgtggtggcttatgcctgtaatcccacactttgggaggctgaggtgggtggattgcctgaggtcaagagttcaagaccagcctggccaacatggtgaaaccctgtctctactaaaaatacaaaaaattacccaggcatggtggcgggcgcctgtaatcccagctacttgggaggctgagacaggagaatggcttgaacccaggaggtggagattgcggtgagctgagatcgtgccattgcactccagcctgggcaacaagagcgaaacttcatctcaaaaaaaaaaaacaaagactaattctatagtacccatgaccctgcaaccagagaaactgcctgtagggaggccagagtccaaagcagccacctgtaacctgaaaatgaaacgcagacccaggcatctgtgggtcttcatcagcaggatgaccattctaaggctaaaagacaggcctttaaatctgatgctataattccatccaaatacacagttaggtttctaccatagggaaagctattctctactttttgaagtatctgtttcaaagataacttgctctctggttctcttttatctaaaagagagaatcaacatgctaatttaaaggttaacatcattttaattcaaaaattttagtctccattccatatttaatgatgaagacaaatctgctgggtgctgggagggaataaaaagtaatgcaccccattgatttcagagtatctgatcacttgggttatgcaagctgctacttacccgccattagcatgggtagttaagtgctgattaaacctaagtggactcagtgaaaaagatattgggaaaaataatatgatattgtggcctatgttgaatgatgttagcttgtgtttcagtaacagagttgggtaatactggacgtgtagatgaagctttagcagggctgggcacggtggctcatgcctgtaatcccagcactttgggaggctgaggcgggtggattacctgaggtcaggagttcaagaccagcctggccaacatggggaaaccctgtctctactaagaatacaaaaattagctgggtgtggtggcgtgtgcctgtaatcccagctactcaggaggctgagacaggagaatcgcttgaacccgggaggcgaaggttgcagtgagccaagatcgcgccactgcacttcagcctgggtgacagcacaagactccatctcaaaaaaaaaaaaaaaaggaagaagaaaaagaaacttaagtggggttcatacatagcatggcagagggacactggagaataaaatggcatgcagagaggaacacgcgggccagtggatgaggcttctagacctggcagtgaactggagtctatttgcttacacaaatttaaccttctctccatgatggaatacaagtgtttcttgccaaaactcgcagccccagctgccctagatgaggagcaccgtgctggaaaagtgcacaggctgatcacagagacaggtaggaagcaatggactgttaaaatgcatgttccgggctggggatggtggctcacacctgtgatctcagcactttgggaggccgaggctggggaatcgcttgagcccaggattttgagactagcctaggcaatatggtgagaccctgcccttaaaaaaaaaaaagaaaagaaaagaaaagaaaaaaagattcatattcctgatcagctctgaatgtgactattcaatgaagacagtaaagttacagtgtaaggcacacatgacctttggccttgctaaagaagagtggctgaaggtctagcaaattaatgcttgtcttaggttacctgttgatttaaaaacaacaacaacaaaaacccataaaaatagtaaaatataaaaacaaattagtgttttatagaccctggggaaaagaattttcagcaaagtacaaaaatttaaagcattcctttctttaattttgtaattctttactgtagaacagctcaaaatatcagttctgttttaagtaacagaattgataactgagcagggaaacgtaatttggattgtaaaattcttgctttaataaaaattctttaaacagtcaaaatagaaagaaagaaagaaaggtggcaagagaattatcaaaagtttccatagatggttgggaagatctgattagtgtttccaaaatgcttatcattctaagaatcccaatagctggcaagccaagcagtggaacttatagtaacaacaatcaatcacttgtctcatcccacatttttgccaaattcaaaaacaccaaatttcccatcaaatgttctgtcagagtaaacctttacctaagtgcttgttttgcttttaatatgtgaatttctgggaacattcccatgggcagcctctaattttttttttttttttttgagacagagtttcgctttttcacccaggctggagcgcagtggcacgatcttggctcactgcaacctccacctaccggattcaagtgattctcctgcctcagcctcccaagtagcagggactacaggcacgtgccaccacgcccagctaatttttgtatttttagtggagatgggtttttgccatgttggccaggcaggtcttgaactcttgacctcaggtgatccgcctgcctcagtgtcccaaagtgttgggattacaggcacgagccaccgcgctcagccaatttttcctcaactctctctttcctggacgggctgcgttggggggaggtgcagggaaagaacacctctttgcttagacattggtgtcgacagtggggatactaagttcatctcctgatcctgctaggcctggaagcaggaaagaaatgtcctggttagagataaaattgttctatccttttagaaaagcctgttaaggaatatgatgcaaagccaccttcgacgaaatctgaaatgataccccacagccttgtccaccccaattattcagtgacagggctccagttgcttaagccatagagaaggcccctttgcagtgggagtcactgaagacagaaagggaagcccaggatgaacccagtcctaagggctgctgggggccaccaaataagactgttttagccctggacacagagggagacacagtcatcccagatccttacaaagaatacattgccaaggaccccgaaggaaatctgcttgtcttaagagaggaagacccacgaccagctctctgggactacctgtcaactcagcaggtgcagccagggagcagccatgcttcttctgccctcccagtaggctgggctatcagttcctgggaggggtcctgtccccatgtaaggggatatgtacattgctgagtacgctgatatctttttcatgggtatgattttttaacaagaaagctaaatggttctcgtgtaacataactgatatagtttggctgtgtccccacccaaatcttatcttgaactgcagctcccataatccccaggtgttgtgggagggacccagtgggaggtaattgaatcatgggggtggttaccgccatgctgttctcgtgatagcgagtgagttctcacgagatctgatggttttataaggggctttccccctccttcgctctgcacttctccttgctgccatgcgaagaaggatgtgtttgcttccccttctgccatgattgtaagtttcctgaggcctccccagccatgttaaactttgagttaattaaacctctttcctttataaatta

SEQ ID NO: 20460 - DNA, 3595 bp, Homo sapiens
  misc_feature 1..3595: note = ENST00000216218
  source 1..3595: mol_type = unassigned DNA
atgccccgagctgggaccgaccctccggctccacgcccttttttttttttttttttaggtcccgggcgttgagctctactcagtgcacgcagccacacaatatgctcttggacgtcgccccctggaggggatgttatctcccgcctccttgaagtcgcccatttctggggttgccccatccagggagctggttcctagttaagaatatgagaatgtatgcgcagggaggcaggcaacagcacgaacagccacgcttctagaagattctagggagcgcgcaggagcagcgcagagggagtaggaatgagcaggcggaggacccgaggtcacgagaccgttgggtgggaggagccagcggccggggaggttctagtctgttctgtcttgcggcagccgcccccttctgcgcggtcacgccgagccagcgcctgggcctggaaccgggccgtagcccccccagtttcgcccaccacctccctaccatggacccccgcaaagtgaacgagcttcgggcctttgtgaaaatgtgtaagcaggatccgagcgttctgcacaccgaggaaatgcgcttcctgagggagtgggtggagagcatgggtggtaaagtaccacctgctactcagaaagctaaatcagaagaaaataccaaggaagaaaaacctgatagtaagaaggtggaggaagacttaaaggcagacgaaccatcaagtgaggaaagtgatctagaaattgataaagaaggtgtgattgaaccagacactgatgctcctcaagaaatgggagatgaaaatgcggagataacggaggagatgatggatcaggcaaatgataaaaaagtggctgctattgaagccctaaatgatggtgaactccagaaagccattgacttattcacagatgccatcaagctgaatcctcgcttggccattttgtatgccaagagggccagtgtcttcgtcaaattacagaagccaaatgctgccatccgagactgtgacagagccattgaaataaatcctgattcagctcagccttacaagtggcgggggaaagcacacagacttctaggccactgggaagaagcagcccatgatcttgcccttgcctgtaaattggattatgatgaagatgctagtgcaatgctgaaagaagttcaacctagggcacagaaaattgcagaacatcggagaaagtatgagcgaaaacgtgaagagcgagagatcaaagaaagaatagaacgagttaagaaggctcgagaagagcatgagagagcccagagggaggaagaagccagacgacagtcaggagctcagtatggctcttttccaggtggctttcctgggggaatgcctggtaattttcccggaggaatgcctggaatgggagggggcatgcctggaatggctggaatgcctggactcaatgaaattcttagtgatccagaggttcttgcagccatgcaggatccagaagttatggtggctttccaggatgtggctcagaacccagcaaatatgtcaaaataccagagcaacccaaaggttatgaatctcatcagtaaattgtcagccaaatttggaggtcaagcgtaatgtccttctgataaataaagcccttgctgaaggaaaagcaacctagatcaccttatggatgtcgcaataatacaaaccagtgtacctctgaccttctcatcaagagagctggggtgctttgaagataatccctacccctctcccccaaatgcagctgaagcattttacagtggtttgccattagggtattcattcagataatgttttcctactaggaattacaaactttaaacactttttaaatcttcaaaatatttaaaacaaatttaaagggcctgttaattcttatatttttctttactaatcattttggatttttttctttgaattattggcagggaatatacttatgtatggaagattactgctctgagtgaaataaaagttattagtgcgaggcaaacataactcatttgaggataaagtttgtgttggatatgtggttcctgatgcattttgacttgtctttttaaatgctttatctttttctttaaagatttatttcaataaaactaattgggaccacccgtatttcagtaggacctgggtagggattggaagtacttggcagggcagcagcaatcttgctgtgtttgatataacatgcatccttgggcaggttgcccttaaatcttacactgtggtgaagggatgttttttttgtaatgctgcagtagagttggagtacttagttctcttgttgtccagtatatctaataagtgtttttcatattatttccacgtaagggaaataaggtagtacttttctttttatatttctatgcttaaaattctctttcctagtcaaaaattgcccaaatctgtgtttgctttctgcttgctacatttgtctcccttacttttcttgagctaaagacaggctttttccaccggcatcatcactgctatcatcattaacagcgtaattatacaagcatatttaatgctgagtttaatttaatatgtaatacatatggtaattgtagggtaatacccacaacaactgtagtttcttacttggccaagagaatgcttatttaagtgttagacttccattctggcaaaatcttgccttatcagaagacattggaaagagggattccctttggtgtttggtcttctacttagaaaaacctattgcagttagtttatcttgtagtattcatctttgtattctgaagataaggtttgaattaaattgatacacacagaggggaaccgattttttttatccaatgtgaattataaatgagataatccacagttattcattgtggagttgttgagactatgaaagactcattgtctttgtattcagctcttaaatagtgtaactatatccccacctctgcttgctttctttccctcccctccaatgataaagaaaatgataaattttctgttgtgcattcaattcttattttaaataagactaagtataggcattgtacctgacattgctacgtttctaccagtgtttcaatttaaagtgctagtgtttaaaaacattttcaagggataaggccttctgtactttgcttatttgaagaatcagtggtaggagcagtgaagtaaattctatggagtacatttctaaaataccacatttctgaaatcataaataagtttattcaggttctaaccctttgctgtacacaagcagacagaaatgcatctgttacataaatgagaaaaagctattatgctgatggagcatgctttttaaatcctttaaaaacactcaccatataaacttgcatttgagcttgtgtgttcttttgttaatgtgtagagttctcctttctcgaaattgccagtgtgtacttggcttaactcaagaacagtttcttctggattccttatttgatttatttaacctaattatattctaatattgcaaatattaccataagtgggtaaaagtaaaattcctcttctgaaaatgtgtcctgtgcttttagatttttaaattccataatatacattcttaattttcaactcaa

SEQ ID NO: 20461 - DNA, 592 bp, Homo sapiens
  misc_feature 1..592: note = ENST00000480048
  source 1..592: mol_type = unassigned DNA
acttttgtttcactttaggtgaactccagaaagccattgacttattcacagatgccatcaagctgaatcctcgcttggccattttgtatgccaagagggccaggtgagaactctaaacagaaaagcatcccctggcaaataatttctgcacatttgtttaaatagagttgcttctgtgttgatcccaaaacttttactgaaatgaatactttttaataacacacttatttttcagtgtcttcgtcaaattacagaagccaaatgctgccatccgagactgtgacagagccattgaaataaatcctgattcagctcagccttacaagtggcgggggaaagcacacaggcacagaaaattgcagaacatcggagaaagtatgagcgaaaacgtgaagagcgagagatcaaagaaagaatagaacgagttaagaaggctcgagaagagcatgagagagcccagagggaggaagaagccagacgacagtcaggagctcagtatggctcttttccaggtggctttcctgggggaatgcctggtaattttcccggaggaatgcctggaatgggagggggcatgcctggaatggctgga

SEQ ID NO: 20462 - DNA, 798 bp, Homo sapiens
  misc_feature 1..798: note = ENST00000455824
  source 1..798: mol_type = unassigned DNA
cgcggtcacgccgagccagcgcctgggcctggaaccgggccgtagcccccccagtttcgcccaccacctccctaccatggacccccgcaaagtgaacgagcttcgggcctttgtgaaaatgtgtaagcaggatccgagcgttctgcacaccgaggaaatgcgcttcctgagggagtgggtggagagaaattgataaagaaggtgtgattgaaccagacactgatgctcctcaagaaatgggagatgaaaatgcggagataacggaggagatgatggatcaggcaaatgataaaaaagtggctgctattgaagccctaaatgatggtgaactccagaaagccattgacttattcacagatgccatcaagctgaatcctcgcttggccattttgtatgccaagagggccagtgtcttcgtcaaattacagaagccaaatgctgccatccgagactgtgacagagccattgaaataaatcctgattcagctcagccttacaagtggcgggggaaagcacacagacttctaggccactgggaagaagcagcccatgatcttgcccttgcctgtaaattggattatgatgaagatgctagtgcaatgctgaaagaagttcaacctagggcacagaaaattgcagaacatcggagaaagtatgagcgaaaacgtgaagagcgagagatcaaagaaagaatagaacgagttaagaaggctcgagaagagcatgagagagcccagagggaggaagaagccagacgacagtcaggagctcagtatggctcttttccaggtggctttc

SEQ ID NO: 20463 - DNA, 630 bp, Homo sapiens
  misc_feature 1..630: note = ENST00000413424
  source 1..630: mol_type = unassigned DNA
gattgaaccagacactgatgctcctcaagaaatgggagatgaaaatgcggagataacggaggagatgatggatcaggcaaatgataaaaaagtggctgctattgaagccctaaatgatggtgaactccagaaagccattgacttattcacagatgccatcaagctgaatcctcgcttggccattttgtatgccaagagggccagtgtcttcgtcaaattacagaagccaaatgctgccatccgagactgtgacagagccattgaaataaatcctgattcagctcagccttacaagtggcgggggaaagcacacagacttctaggccactgggaagaagcagcccatgatcttgcccttgcctgtaaattggattatgatgaagatgctagtgcaatgctgaaagaagttcaacctagggtgtgtacaaccactttataaagcaagaagaccttgtggaagttaagaagtttcaggctttccggccaggcgcggtggctcatgcctgtaatcccagcactttgggaggccgaggcaggtggatcatgaggcacagaaaattgcagaacatcggagaaagtatgagcgaaaacgtgaagagcgagagatcaaagaaagaatagaacgagtta

SEQ ID NO: 20464 - DNA, 549 bp, Homo sapiens
  misc_feature 1..549: note = ENST00000411695
  source 1..549: mol_type = unassigned DNA
aacagtgtcctcctgacttgtgctggagtgattgtgcctatgtagagaattccactttaagcatgggtggtaaagtaccacctgctactcagaaagctaaatcagaagaaaataccaaggaagaaaaacctgatagtaagaaggtggaggaagacttaaaggcagacgaaccatcaagtgaggaaagtgatctagaaattgataaagaaggtgtgattgaaccagacactgatgctcctcaagaaatgggagatgaaaatgcggagataacggaggagatgatggatcaggcaaatgataaaaaagtggctgctattgaagccctaaatgatggtgaactccagaaagccattgacttattcacagatgccatcaagctgaatcctcgcttggccattttgtatgccaagagggccagtgtcttcgtcaaattacagaagccaaatgctgccatccgagactgtgacagagccattgaaataaatcctgattcagctcagccttacaagtggcgggggaaagcacacagacttctaggccactgggaag

SEQ ID NO: 20465 - DNA, 425 bp, Homo sapiens
  misc_feature 1..425: note = ENST00000495652
  source 1..425: mol_type = unassigned DNA
aaaactttttattaatatttttatcctctgaatatttctcgataacttttgtttcactttaggtgaactccagaaagccattgacttattcacagatgccatcaagctgaatcctcgcttggccattttgtatgccaagagggccagtgtcttcgtcaaattacagaagccaaatgctgccatccgagactgtgacagagccattgaaataaatcctgattcagctcagccttacaagtggcgggggaaagcacacaggtaaataattgaatttaattattttcagaactctttacatttaaatctgatgttttaagatgctttgtttaaacaaaaacacaaaagttcctaatgacttaattttcaaattagtgtgtacttagtatcaagaagtgagatagcttgtagacagctgcttaaaaggt

SEQ ID NO: 20466 - DNA, 944 bp, Homo sapiens
  misc_feature 1..944: note = ENST00000620312
  source 1..944: mol_type = unassigned DNA
cagtttcgcccaccacctccctaccatggacccccgcaaagtgaacgagcttcgggcctttgtgaaaatgtgtaagcaggatccgagcgttctgcacaccgaggaaatgcgcttcctgagggagtgggtggagagcatgggtggtaaagtaccacctgctactcagaaagctaaatcagaagaaaataccaaggaagaaaaacctgatagtaagaaggtggaggaagacttaaaggcagacgaaccatcaagtgaggaaagtgatctagaaattgataaagaaggtgtgattgaaccagacactgatgctcctcaagaaatgggagatgaaaatgcggagataacggaggagatgatggatcaggcaaatgataaaaaagtggctgctattgaagccctaaatgatggtgaactccagaaagccattgacttattcacagatgccatcaagctgaatcctcgcttggccattttgtatgccaagagggccagtgtcttcgtcaaattacagaagccaaatgctgccatccgagactgtgacagagccattgaaataaatcctgattcagctcagccttacaagtggcgggggaaagcacacagacttctaggccactgggaagaagcagcccatgatcttgcccttgcctggactcaatgaaattcttagtgatccagaggttcttgcagccatgcaggatccagaagttatggtggctttccaggatgtggctcagaacccagcaaatatgtcaaaataccagagcaacccaaaggttatgaatctcatcagtaaattgtcagccaaatttggaggtcaagcgtaatgtccttctgataaataaagcccttgctgaaggaaaagcaacctagatcaccttatggatgtcgcaataatacaaaccagtgtacctctgaccttctcatcaagagagctggggtgc

SEQ ID NO: 20467 - DNA, 6187 bp, Homo sapiens
  misc_feature 1..6187: note = ENST00000276480
  source 1..6187: mol_type = unassigned DNA
ctttttgtagggagaagggcaggatgtttttaactgaatgtgacctcaggggaatactagagaaaataataaaatttctgaatggggcagcgtggagaaatcctaagagaaatagcataagagcattttggaacacatccaggaaaagataactttcgacacacctgtagacgttcgccaggtaaaggagtgatggaaactctccagttcagatccagtagcttttagggaaggaactacagttgctgacttaagttgaagaagcatctatttaatgtctggtcaaatcctacaagaaacacagaaatctatgattaaaaagctgagcactttgatatactgcaaagggtagagaaggcaggacggtagaaattttctgcaagaaagaatgaatttcaggatttatcactaaataagacaaagtcatttatttagtccccctgacacagcagggcaaactgagttgacatacaagttacctggagaaaaagagagcaattccaggacttcctcttcagcctaaaagaaggtaccagatctgtgcactggggcgatgtggaagagacctgcttattgcccctgatgtaagctccagtaagaaaagacgtcaagtacaagtactaggaaatcactttatacatctgtttataggaatgacctcaggactttgtgttcatgttatagatggatgcagaggctgaagataaaacgctgcgtactcgctctaaaggaaccgaggtgccaatggattcactaatccaggagctcagtgttgcctatgattgctccatggcaaagaagagaacagctgaagatcaggctttgggggttccagtcaacaaaaggaaatccctgctaatgaagccccgacactacagcccaaaagcagactgccaagaagaccgcagtgacaggacagaggacgatggccccttggaaacacatggtcactctaccgcagaggaaatcatgataaaacctatggatgaaagtcttctttcaactgcacaagaaaactccagtaggaaggaagacagatactcttgttatcaagagctcatggtcaagtctttaatgcacttggggaaatttgaaaaaaatgtatctgttcagactgtaagtgaaaatttaaatgacagtggcatccagtctttaaaagcagagagcgatgaagcagacgagtgctttctgattcattctgatgatggaagagacaagattgatgattctcagccacccttctgctcctctgatgacaatgaaagtaactctgaaagtgcagaaaatggctgggacagtggctccaacttctcagaagaaaccaaaccacctagagtcccaaagtatgttttaacagatcataaaaaagacctattggaagttcctgaaataaaaactgaaggtgacaaatttatcccttgtgagaacaggtgtgattctgaaacagaaaggaaagacccgcagaatgctctcgcagaacccctggatggcaatgcccagccctcattccctgacgttgaggaggaagatagcgagagcctggcagtaatgacggaagagggtagtgacctggaaaaggccaaggggaatttaagtttgctggagcaggcaattgctctgcaggctgagcgaggttgtgttttccataacacctacaaagagctggataggttcctgctggagcacctagcaggggaaaggaggcaaaccaaagttatcgacatgggtggaagacaaatctttaacaataaacattcaccaaggcctgaaaagagggagaccaagtgcccgatccctggatgtgatggcacgggacacgtgacagggctctacccgcaccaccgcagcctttcggggtgcccccacaaagtgcgggttcccctggaaattcttgccatgcatgaaaatgtgctcaagtgtcccacgccgggatgcacaggaaggggtcatgtgaacagcaaccgcaacacccacaggagtctttctggttgtccaattgctgcagctgaaaaattggcaatgtcccaggataaaaatcagcttgattctccccaaactgggcagtgtcctgaccaggcccacaggacaagtttggtgaagcaaattgaattcaatttcccgtcacaagccatcacctctcccagagccacagtgtcaaaagaacaagagaagtttggaaaagtaccatttgattatgccagttttgatgcccaagttttcggtaaacgccctctcatacaaacagtgcaaggacgaaaaacaccaccatttcctgaatcaaagcattttccaaatccagtgaaatttcctaatcgactgcctagtgcaggcgcccacacccagagccctggccgtgccagctcttatagctacggtcaatgtagtgaagacacccacatagcagcagctgctgccatcctgaacctttccacccgctgcagggaagccacagacatcctctccaacaagccacagagtctgcatgccaagggagccgaaatagaagtggatgaaaatggcacattggacttaagcatgaaaaaaaatcgaatcctggacaagtctgcacccctaacttcctctaacacttctattccaactccttcctcttccccattcaaaacaagcagcattctggtcaatgcagcattctatcaggctctttgtgaccaagagggctgggacactcctatcaactatagcaaaactcacgggaagacagaggaggagaaagagaaagacccagtgagctctctagaaaatttagaggaaaaaaagtttcctggagaggcctctataccaagccctaaacccaagcttcatgcaagagatctcaaaaaggaactaatcacctgtccaacaccaggatgtgatggaagtggccacgtgacaggaaactatgcatctcatcgcagtgtttctggatgtcctttagcagataagactctaaaatccctcatggctgccaactctcaggagcttaagtgtccaaccccaggctgcgatggctcggggcacgtgactggaaactatgcttcccacagaagcttgtccggatgccctcgtgcaaggaaaggtggtgtcaaaatgacccctaccaaggaagaaaaagaagaccctgaactgaaatgtcctgtgatagggtgtgatggccaaggtcacatatcaggtaaatacacatcacaccgcacagcttctggctgtcctctggctgccaagagacagaaggagaatcctctcaatggagcctccctctcctggaaactgaacaaacaagagctaccacattgtcccttgccaggctgcaatgggctgggccatgtaaataatgtttttgtcacccaccgaagcttatctggatgtcctctcaatgcacaagttatcaaaaagggcaaggtttctgaagaactcatgaccatcaagctcaaagcaactgggggaatagagagtgatgaagaaattaggcatttggatgaagaaataaaggaactgaatgaatccaaccttaaaattgaagcagatatgatgaaacttcagacccagatcacatctatggagagcaacttaaagacgatagaggaggagaacaaactcatagaacagaacaatgaaagtctgctgaaagagctggcaggtctaagccaagctctcatttcaagccttgctgacatccagcttccacagatgggacctatcagtgagcagaattttgaagcatatgtaaatacactcacagatatgtacagcaatctggaacgggactattccccggaatgcaaagctctactggaaagtatcaaacaggcagtgaagggtatccatgtgtaggatcacagcgctgccgggcaacagaagttaccaacagcagtaaactccagatggatctgttagaggttcatgtactgctaaggcgtggaggttgccgtactgcatttacaatttgcaacattgcactaattttattttccccagctgatataaaaaggaaagaaaaactatgatagacttcttggattaaaagcaatgcagtcaattattagatcttatttattttcatatgtttttcttttatttcttcattgtactctttttttttttgtaaagtatatgtaaaataaatgtgacatttttataatttatttattactaatcaaagagttttttatcttttaactgcattttgaagtctgccgtatttttacaagtgtgtttattaatttattttccaataggatttaaatagaaatgctattctcaagtcatctttcttgctgggttttaatgaggaaacaggaaagggtgaaggaaatccttgtctaaggactgcactatagttgagtttgatttttattgcacacttcttcccccacctttcactgatttttgtatttataaatgaatttgcggtaaggtgagctgcacggaaggaataagaagacaaatggcgcccactagtggggaatccgcactcacaaaagcacaggatgctggaaaacagcctgctcagaatttgttagcaataattaaatatagcaatcagcaaagtattcgacttggctggacggttttcgttaatatgaattatttatttgaaatgttttaaagaaacataagcctttttagtgatgcagatttgtctgtttgtttttcaagtcatatcagatcgttggcaactcgtatcccaagatgaaaaataagacttggtgtgaccagccaggctttcctgccatatgttggtacaatatacaagtgacaatattggtgtagatttgtacttagcaaatacaaacacatccaaatgaaaaattttgtagataccatatcccctgaaatagcatttatcttactgggttgactggaaaggaatggaaaatatagtaacacatgaaaaaatgctactccaatctgaatgattacttcaaacactggcaccttgggtctcacccaccataggaaacaagacaacattcaatttgatagaaatcttgccacaaaacttcaaatgctacaaaatatacacacacactcacacacacaggcatactcacacacagacacacacacacacacacacacagactcatccacacttcaaattgagcccacaatcttgaatttctgaacggatcagagtttcatagtttctatagtaaaggcaatgtctatttcagggattgtaaagtagttaagcattgtttcaaaagtttttttatatttattttttttaaggaaaaggtatagacaaccagctaaactgcctttttggtgtgcacacacatttcatgtgcagacgtgcctctgtgtaaatgtacacatgaacttcatgtgggcttaattttctgtgctataaacaaaagtgtttattttttattaacctcatggatatttagatggaaagtgatggcattcacaggcttgatgtattccactgttattactgttacctgcacaaatgaaaaacaatactcaacagtaattccactcccatgaaactttggtcattgttatgcattaagtggggcttatctttggtttggagttcatttgaactcttgaaccttagtttagtgaagatgaactgtctgttcttaggtagaaacggtgtttatttaaaaatcagttttaaaaaatgagctaccatatgtgctgtctattataaatgggacaccaaacaaaattttctattacagttgtgtacttgcaaacattttgctatacagtacttcatagatgcatacaaatgagctcacttattacaaagacaaacgtttaatttgctaaatattttaacaagtttgttatatattttatttaatttaaaagaaatctcttaccaacctacatatttattactataatttgctatgacttcaggttaatttatttgtgtttgcatagtttgagcaggatgttttgtgaagtatgtttgtatttatttgcctactttgtacttgatgtgttttgtaatgtgcactgaatttgttttcttttcaactatgttaatgatcaatactgtaaattgggtcttttgtaaacaaaaaggcaatgatgtatgcattttttttaatttgaggtagtttgtttgtatactgtttctccaaacacttaatatttcttacatcaaagcaacaaaattgtgttcagtgctgtacatttggtgtatggtaggaaataaaaattgataacg

SEQ ID NO: 20468 - DNA, 3870 bp, Homo sapiens
  misc_feature 1..3870: note = ENST00000521824
  source 1..3870: mol_type = unassigned DNA
gcccctgatgtaagctccagtaagaaaagacgtcaagtacaagtactaggaaatcactttatacatctgtttatagatggatgcagaggctgaagataaaacgctgcgtactcgctctaaaggaaccgaggtgccaatggattcactaatccaggagctcagtgttgcctatgattgctccatggcaaagaagagaacagctgaagatcaggctttgggggttccagtcaacaaaaggaaatccctgctaatgaagccccgacactacagcccaaaagcagactgccaagaagaccgcagtgacaggacagaggacgatggccccttggaaacacatggtcactctaccaggaaatcatgataaaacctatggatgaaagtcttctttcaactgcacaagaaaactccagtaggaaggaagacagatactcttgttatcaagagctcatggtcaagtctttaatgcacttggggaaatttgaaaaaaatgtatctgttcagactgtaagtgaaaatttaaatgacagtggcatccagtctttaaaagcagagagcgatgaagcagacgagtgctttctgattcattctgatgatggaagagacaagattgatgattctcagccacccttctgctcctctgatgacaatgaaagtaactctgaaagtgcagaaaatggctgggacagtggctccaacttctcagaagaaaccaaaccacctagagtcccaaagtatgttttaacagatcataaaaaagacctattggaagttcctgaaataaaaactgaaggtgacaaatttatcccttgtgagaacaggtgtgattctgaaacagaaaggaaagacccgcagaatgctctcgcagaacccctggatggcaatgcccagccctcattccctgacgttgaggaggaagatagcgagagcctggcagtaatgacggaagagggtagtgacctggaaaaggccaaggggaatttaagtttgctggagcaggcaattgctctgcaggctgagcgaggttgtgttttccataacacctacaaagagctggataggttcctgctggagcacctagcaggggaaaggaggcaaaccaaagttatcgacatgggtggaagacaaatctttaacaataaacattcaccaaggcctgaaaagagggagaccaagtgcccgatccctggatgtgatggcacgggacacgtgacagggctctacccgcaccaccgcagcctttcggggtgcccccacaaagtgcgggttcccctggaaattcttgccatgcatgaaaatgtgctcaagtgtcccacgccgggatgcacaggaaggggtcatgtgaacagcaaccgcaacacccacaggagtctttctggttgtccaattgctgcagctgaaaaattggcaatgtcccaggataaaaatcagcttgattctccccaaactgggcagtgtcctgaccaggcccacaggacaagtttggtgaagcaaattgaattcaatttcccgtcacaagccatcacctctcccagagccacagtgtcaaaagaacaagagaagtttggaaaagtaccatttgattatgccagttttgatgcccaagttttcggtaaacgccctctcatacaaacagtgcaaggacgaaaaacaccaccatttcctgaatcaaagcattttccaaatccagtgaaatttcctaatcgactgcctagtgcaggcgcccacacccagagccctggccgtgccagctcttatagctacggtcaatgtagtgaagacacccacatagcagcagctgctgccatcctgaacctttccacccgctgcagggaagccacagacatcctctccaacaagccacagagtctgcatgccaagggagccgaaatagaagtggatgaaaatggcacattggacttaagcatgaaaaaaaatcgaatcctggacaagtctgcacccctaacttcctctaacacttctattccaactccttcctcttccccattcaaaacaagcagcattctggtcaatgcagcattctatcaggctctttgtgaccaagagggctgggacactcctatcaactatagcaaaactcacgggaagacagaggaggagaaagagaaagacccagtgagctctctagaaaatttagaggaaaaaaagtttcctggagaggcctctataccaagccctaaacccaagcttcatgcaagagatctcaaaaaggaactaatcacctgtccaacaccaggatgtgatggaagtggccacgtgacaggaaactatgcatctcatcgcagtgtttctggatgtcctttagcagataagactctaaaatccctcatggctgccaactctcaggagcttaagtgtccaaccccaggctgcgatggctcggggcacgtgactggaaactatgcttcccacagaagcttgtccggatgccctcgtgcaaggaaaggtggtgtcaaaatgacccctaccaaggaagaaaaagaagaccctgaactgaaatgtcctgtgatagggtgtgatggccaaggtcacatatcaggtaaatacacatcacaccgcacagcttctggctgtcctctggctgccaagagacagaaggagaatcctctcaatggagcctccctctcctggaaactgaacaaacaagagctaccacattgtcccttgccaggctgcaatgggctgggccatgtaaataatgtttttgtcacccaccgaagcttatctggatgtcctctcaatgcacaagttatcaaaaagggcaaggtttctgaagaactcatgaccatcaagctcaaagcaactgggggaatagagagtgatgaagaaattaggcatttggatgaagaaataaaggaactgaatgaatccaaccttaaaattgaagcagatatgatgaaacttcagacccagatcacatctatggagagcaacttaaagacgatagaggaggagaacaaactcatagaacagaacaatgaaagtctgctgaaagagctggcaggtctaagccaagctctcatttcaagccttgctgacatccagcttccacagatgggacctatcagtgagcagaattttgaagcatatgtaaatacactcacagatatgtacagcaatctggaacgggactattccccggaatgcaaagctctactggaaagtatcaaacaggcagtgaagggtatccatgtgtaggatcacagcgctgccgggcaacagaagttaccaacagcagtaaactccagatggatctgttagaggttcatgtactgctaaggcgtggaggttgccgtactgcatttacaatttgcaacattgcactaattttattttccccagctgatataaaaaggaaagaaaaactatgatagacttcttggattaaaagcaatgcagtcaattattagatcttatttattttcatatgtttttcttttatttcttcattgtactctttttttttttgtaaagtatatgtaaaataaatgtgacatttttataatttatttattactaatcaaagagttttttatcttttaactgcattttgaagtctgccgtatttttacaagtgtgtttattaatttattttccaataggatttaaatagaaatgctattctcaagtcatctttcttgctgggttttaatgaggaaacaggaaagggtgaaggaaatccttgtctaaggactgcactatagttgagtttgatttttattgcacacttcttcccccacctttcactgatttttgtatttataaatgaatttgcggtaaggtgagctgcacggaaggaataagaagacaaatggcgcccactagtggggaatccgcactcacaaaagcaca

SEQ ID NO: 20469 - DNA, 3963 bp, Homo sapiens
  misc_feature 1..3963: note = ENST00000522251
  source 1..3963: mol_type = unassigned DNA
tgcccctgatgtaagctccagtaagaaaagacgtcaagtacaagtactaggaaatcactttatacatctgtttatagatggatgcagaggctgaagataaaacgctgcgtactcgctctaaaggaaccgaggtgccaatggattcactaatccaggagctcagaatcagtgtgcccgtggacatgaggccacttacctggtgagggacaccagagtcctttaaaggaaccaagtcattcagagaaaaaaagtgttgcctatgattgctccatggcaaagaagagaacagctgaagatcaggctttgggggttccagtcaacaaaaggaaatccctgctaatgaagccccgacactacagcccaaaagcagactgccaagaagaccgcagtgacaggacagaggacgatggccccttggaaacacatggtcactctaccgcagaggaaatcatgataaaacctatggatgaaagtcttctttcaactgcacaagaaaactccagtaggaaggaagacagatactcttgttatcaagagctcatggtcaagtctttaatgcacttggggaaatttgaaaaaaatgtatctgttcagactgtaagtgaaaatttaaatgacagtggcatccagtctttaaaagcagagagcgatgaagcagacgagtgctttctgattcattctgatgatggaagagacaagattgatgattctcagccacccttctgctcctctgatgacaatgaaagtaactctgaaagtgcagaaaatggctgggacagtggctccaacttctcagaagaaaccaaaccacctagagtcccaaagtatgttttaacagatcataaaaaagacctattggaagttcctgaaataaaaactgaaggtgacaaatttatcccttgtgagaacaggtgtgattctgaaacagaaaggaaagacccgcagaatgctctcgcagaacccctggatggcaatgcccagccctcattccctgacgttgaggaggaagatagcgagagcctggcagtaatgacggaagagggtagtgacctggaaaaggccaaggggaatttaagtttgctggagcaggcaattgctctgcaggctgagcgaggttgtgttttccataacacctacaaagagctggataggttcctgctggagcacctagcaggggaaaggaggcaaaccaaagttatcgacatgggtggaagacaaatctttaacaataaacattcaccaaggcctgaaaagagggagaccaagtgcccgatccctggatgtgatggcacgggacacgtgacagggctctacccgcaccaccgcagcctttcggggtgcccccacaaagtgcgggttcccctggaaattcttgccatgcatgaaaatgtgctcaagtgtcccacgccgggatgcacaggaaggggtcatgtgaacagcaaccgcaacacccacaggagtctttctggttgtccaattgctgcagctgaaaaattggcaatgtcccaggataaaaatcagcttgattctccccaaactgggcagtgtcctgaccaggcccacaggacaagtttggtgaagcaaattgaattcaatttcccgtcacaagccatcacctctcccagagccacagtgtcaaaagaacaagagaagtttggaaaagtaccatttgattatgccagttttgatgcccaagttttcggtaaacgccctctcatacaaacagtgcaaggacgaaaaacaccaccatttcctgaatcaaagcattttccaaatccagtgaaatttcctaatcgactgcctagtgcaggcgcccacacccagagccctggccgtgccagctcttatagctacggtcaatgtagtgaagacacccacatagcagcagctgctgccatcctgaacctttccacccgctgcagggaagccacagacatcctctccaacaagccacagagtctgcatgccaagggagccgaaatagaagtggatgaaaatggcacattggacttaagcatgaaaaaaaatcgaatcctggacaagtctgcacccctaacttcctctaacacttctattccaactccttcctcttccccattcaaaacaagcagcattctggtcaatgcagcattctatcaggctctttgtgaccaagagggctgggacactcctatcaactatagcaaaactcacgggaagacagaggaggagaaagagaaagacccagtgagctctctagaaaatttagaggaaaaaaagtttcctggagaggcctctataccaagccctaaacccaagcttcatgcaagagatctcaaaaaggaactaatcacctgtccaacaccaggatgtgatggaagtggccacgtgacaggaaactatgcatctcatcgcagtgtttctggatgtcctttagcagataagactctaaaatccctcatggctgccaactctcaggagcttaagtgtccaaccccaggctgcgatggctcggggcacgtgactggaaactatgcttcccacagaagcttgtccggatgccctcgtgcaaggaaaggtggtgtcaaaatgacccctaccaaggaagaaaaagaagaccctgaactgaaatgtcctgtgatagggtgtgatggccaaggtcacatatcaggtaaatacacatcacaccgcacagcttctggctgtcctctggctgccaagagacagaaggagaatcctctcaatggagcctccctctcctggaaactgaacaaacaagagctaccacattgtcccttgccaggctgcaatgggctgggccatgtaaataatgtttttgtcacccaccgaagcttatctggatgtcctctcaatgcacaagttatcaaaaagggcaaggtttctgaagaactcatgaccatcaagctcaaagcaactgggggaatagagagtgatgaagaaattaggcatttggatgaagaaataaaggaactgaatgaatccaaccttaaaattgaagcagatatgatgaaacttcagacccagatcacatctatggagagcaacttaaagacgatagaggaggagaacaaactcatagaacagaacaatgaaagtctgctgaaagagctggcaggtctaagccaagctctcatttcaagccttgctgacatccagcttccacagatgggacctatcagtgagcagaattttgaagcatatgtaaatacactcacagatatgtacagcaatctggaacgggactattccccggaatgcaaagctctactggaaagtatcaaacaggcagtgaagggtatccatgtgtaggatcacagcgctgccgggcaacagaagttaccaacagcagtaaactccagatggatctgttagaggttcatgtactgctaaggcgtggaggttgccgtactgcatttacaatttgcaacattgcactaattttattttccccagctgatataaaaaggaaagaaaaactatgatagacttcttggattaaaagcaatgcagtcaattattagatcttatttattttcatatgtttttcttttatttcttcattgtactctttttttttttgtaaagtatatgtaaaataaatgtgacatttttataatttatttattactaatcaaagagttttttatcttttaactgcattttgaagtctgccgtatttttacaagtgtgtttattaatttattttccaataggatttaaatagaaatgctattctcaagtcatctttcttgctgggttttaatgaggaaacaggaaagggtgaaggaaatccttgtctaaggactgcactatagttgagtttgatttttattgcacacttcttcccccacctttcactgatttttgtatttataaatgaatttgcggtaaggtgagctgcacggaaggaataagaagacaaatggcgcccactagtggggaatccgcactcacaaaagcaca

SEQ ID NO: 20470 - DNA, 3928 bp, Homo sapiens
  misc_feature 1..3928: note = ENST00000521582
  source 1..3928: mol_type = unassigned DNA
tgcccctgatgtaagctccagtaagaaaagacgtcaagtacaagtactaggaaatcactttatacatctgtttatagatggatgcagaggctgaagataaaacgctgcgtactcgctctaaaggaaccgaggtgccaatggattcactaatccaggagctcagtgttgcctatgattgctccatggcaaagaagagaacagctgaagatcaggctttgggggttccagtcaacaaaaggaaatccctgctaatgaagccccgacactacagcccaaaagcagactgccaagaagaccgcagtgacaggacagaggacgatggccccttggaaacacatggtcactctaccgcagaggaaatcatgataaaacctatggatgaaagtcttctttcaactgcacaagaaaactccagtaggaaggaagacagatactcttgttatcaagagctcatggtcaagtctttaatgcacttggggaaatttgaaaaaaatgtatctgttcagactgtaagtgaaaatttaaatgacagtggcatccagtctttaaaagcagagagcgatgaagcagacgagtgctttctgattcattctgatgatggaagagacaagattgatgattctcagccacccttctgctcctctgatgacaatgaaagtaactctgaaagtgcagaaaatggctgggacagtggctccaacttctcagaagaaaccaaaccacctagagtcccaaagtatgttttaacagatcataaaaaagacctattggaagttcctgaaataaaaactgaaggtgacaaatttatcccttgtgagaacaggtgtgattctgaaacagaaaggaaagacccgcagaatgctctcgcagaacccctggatggcaatgcccagccctcattccctgacgttgaggaggaagatagcgagagcctggcagtaatgacggaagagggtagtgacctggaaaaggccaaggggaatttaagtttgctggagcaggcaattgctctgcaggctgagcgaggttgtgttttccataacacctacaaagagctggataggttcctgctggagcacctagcaggggaaaggaggcaaaccaaagttatcgacatgggtggaagacaaatctttaacaataaacattatcctccaatcaagctgtgttaattttggactattttcacacatgaaaaaagattcaccaaggcctgaaaagagggagaccaagtgcccgatccctggatgtgatggcacgggacacgtgacagggctctacccgcaccaccgcagcctttcggggtgcccccacaaagtgcgggttcccctggaaattcttgccatgcatgaaaatgtgctcaagtgtcccacgccgggatgcacaggaaggggtcatgtgaacagcaaccgcaacacccacaggagtctttctggttgtccaattgctgcagctgaaaaattggcaatgtcccaggataaaaatcagcttgattctccccaaactgggcagtgtcctgaccaggcccacaggacaagtttggtgaagcaaattgaattcaatttcccgtcacaagccatcacctctcccagagccacagtgtcaaaagaacaagagaagtttggaaaagtaccatttgattatgccagttttgatgcccaagttttcggtaaacgccctctcatacaaacagtgcaaggacgaaaaacaccaccatttcctgaatcaaagcattttccaaatccagtgaaatttcctaatcgactgcctagtgcaggcgcccacacccagagccctggccgtgccagctcttatagctacggtcaatgtagtgaagacacccacatagcagcagctgctgccatcctgaacctttccacccgctgcagggaagccacagacatcctctccaacaagccacagagtctgcatgccaagggagccgaaatagaagtggatgaaaatggcacattggacttaagcatgaaaaaaaatcgaatcctggacaagtctgcacccctaacttcctctaacacttctattccaactccttcctcttccccattcaaaacaagcagcattctggtcaatgcagcattctatcaggctctttgtgaccaagagggctgggacactcctatcaactatagcaaaactcacgggaagacagaggaggagaaagagaaagacccagtgagctctctagaaaatttagaggaaaaaaagtttcctggagaggcctctataccaagccctaaacccaagcttcatgcaagagatctcaaaaaggaactaatcacctgtccaacaccaggatgtgatggaagtggccacgtgacaggaaactatgcatctcatcgcagtgtttctggatgtcctttagcagataagactctaaaatccctcatggctgccaactctcaggagcttaagtgtccaaccccaggctgcgatggctcggggcacgtgactggaaactatgcttcccacagaagcttgtccggatgccctcgtgcaaggaaaggtggtgtcaaaatgacccctaccaaggaagaaaaagaagaccctgaactgaaatgtcctgtgatagggtgtgatggccaaggtcacatatcaggtaaatacacatcacaccgcacagcttctggctgtcctctggctgccaagagacagaaggagaatcctctcaatggagcctccctctcctggaaactgaacaaacaagagctaccacattgtcccttgccaggctgcaatgggctgggccatgtaaataatgtttttgtcacccaccgaagcttatctggatgtcctctcaatgcacaagttatcaaaaagggcaaggtttctgaagaactcatgaccatcaagctcaaagcaactgggggaatagagagtgatgaagaaattaggcatttggatgaagaaataaaggaactgaatgaatccaaccttaaaattgaagcagatatgatgaaacttcagacccagatcacatctatggagagcaacttaaagacgatagaggaggagaacaaactcatagaacagaacaatgaaagtctgctgaaagagctggcaggtctaagccaagctctcatttcaagccttgctgacatccagcttccacagatgggacctatcagtgagcagaattttgaagcatatgtaaatacactcacagatatgtacagcaatctggaacgggactattccccggaatgcaaagctctactggaaagtatcaaacaggcagtgaagggtatccatgtgtaggatcacagcgctgccgggcaacagaagttaccaacagcagtaaactccagatggatctgttagaggttcatgtactgctaaggcgtggaggttgccgtactgcatttacaatttgcaacattgcactaattttattttccccagctgatataaaaaggaaagaaaaactatgatagacttcttggattaaaagcaatgcagtcaattattagatcttatttattttcatatgtttttcttttatttcttcattgtactctttttttttttgtaaagtatatgtaaaataaatgtgacatttttataatttatttattactaatcaaagagttttttatcttttaactgcattttgaagtctgccgtatttttacaagtgtgtttattaatttattttccaataggatttaaatagaaatgctattctcaagtcatctttcttgctgggttttaatgaggaaacaggaaagggtgaaggaaatccttgtctaaggactgcactatagttgagtttgatttttattgcacacttcttcccccacctttcactgatttttgtatttataaatgaatttgcggtaaggtgagctgcacggaaggaataagaagacaaatggcgcccactagtggggaatccgcactcacaaaagca

SEQ ID NO: 20471 - DNA, 725 bp, Homo sapiens
  misc_feature 1..725: note = ENST00000518053
  source 1..725: mol_type = unassigned DNA
gagatgtggaaatgagcttgtcggcagcagtcagagagatcacataattttgctttgttctttgtcgggtccctatttcagcttgtccggatgccctcgtgcaaggaaaggtggtgtcaaaatgacccctaccaaggaagaaaaagaagaccctgaactgaaatgtcctgtgatagggtgtgatggccaaggtcacatatcaggtaaatacacatcacaccgcacagcttctggctgtcctctggctgccaagagacagaaggagaatcctctcaatggagcctccctctcctggaaactgaacaaacaagagctaccacattgtcccttgccaggctgcaatgggctgggccatgtaaataatgtttttgtcacccaccgaagcttatctggatgtcctctcaatgcacaagttatcaaaaagggcaaggtttctgaagaactcatgaccatcaagctcaaagcaactgggggaatagagagtgatgaagaaattaggcatttggatgaagaaataaaggaactgaatgaatccaaccttaaaattgaagcagatatgatgaaacttcagacccagatcacatctatggagagcaacttaaagacgatagaggaggagaacaaactcatagaacagaacaatgaaagtctgctgaaagagctggcaggtctaagccaagctctcatttcaagccttgctgacatccagcttccacagatggtaa

SEQ ID NO: 20472 - DNA, 567 bp, Homo sapiens
  misc_feature 1..567: note = ENST00000522861
  source 1..567: mol_type = unassigned DNA
atttcagcttgtccggatgccctcgtgcaaggaaaggtggtgtcaaaatgacccctaccaaggaagaaaaagaagaccctgaactgaaatgtcctgtgatagggtgtgatggccaaggtcacatatcaggtaaatacacatcacaccgcacagcttctggctgtcctctggctgccaagagacagaaggagaatcctctcaatggagcctccctctcctggaaactgaacaaacaagagctaccacattgtcccttgccaggctgcaatgggctgggccatgtaaataatgtttttgtcacccaccgaagcttatctggatgtcctctcaatgcacaagttatcaaaaagggcaaggtttctgaagaactcatgaccatcaagctcaaagcaactgggggtaagagcacagggctggctgtcaccacctcctgcagggtgtagaccctggctccccaaagcgttccgtgtgtcaaagtattctctaggtgggaagcataattttaatgtacaagaagaaaggtttcctcagatttgaactaaaattataactttgtttaaaaaccaa

SEQ ID NO: 20473 - DNA, 558 bp, Homo sapiens
  misc_feature 1..558: note = ENST00000518501
  source 1..558: mol_type = unassigned DNA
atttttcaaatgaattaaaacatctttgattgctaactgacaacatcacaaggacatcactttcccacatcaatggaatcaaataatcgaatgtgatgttgaaacaggtacctaaggaagtaactcatcatgctatgatttttagttttctttcaggtagtccactggttcttatataatataaatccttggtacactagcttctgcatgtcctatactgtgttaacttatctcgcacagagaagctacctcctccgtaatctactgggcagaggaaatgaacctgggaaatgcgcttgactctaatgatgtattttctattgactcagctgtccaacaccaggatgtgatggaagtggccacgtgacaggaaactatgcatctcatcgcagtgtttctggatgtcctttagcagataagactctaaaatccctcatggctgccaactctcaggagcttaagtgtccaaccccaggctgcgatggctcggggcacgtgactggaaactatgcttcccacagaagcttgtccggatgccctcgtgcaaggaaaggtggt

SEQ ID NO: 20474 - DNA, 2579 bp, Homo sapiens
  misc_feature 1..2579: note = ENST00000517580
  source 1..2579: mol_type = unassigned DNA
ggtaaataacacagagcaaagttagcaagttgcagcgcctctgcgttctgattctatggaacctttttgtagggagaagggcaggatgtttttaactgaatgtgacctcaggggaatactagagaaaataataaaatttctgaatggggcagcgtggagaaatcctaagagaaatagcataagagcattttggaacacatccaggaaaagataactttcgacacacctgtagacgttcgccaggtaaaggagtgatggaaactctccagttcagatccagtagcttttagggaaggaactacagttgctgacttaagttgaagaagcatctatttaatgtctggtcaaatcctacaagaaacacagaaatctatgattaaaaagctgagcactttgatatactgcaaagggtagagaaggcaggacggtagaaattttctgcaagaaagaatgaatttcaggatttatcactaaataagacaaagtcatttatttagtccccctgacacagcagggcaaactgagttgacatacaagttacctggagaaaaagagagcaattccaggacttcctcttcagcctaaaagaaggtaccagatctgtgcactggggcgatgtggaagagacctgcttattgcccctgatgtaagctccagtaagaaaagacgtcaagtacaagtactaggaaatcactttatacatctgtttataggtttatggatgcagaggctgaagataaaacgctgcgtactcgctctaaaggaaccgaggtgccaatggattcactaatccaggagctcagtgttgcctatgattgctccatggcaaagaagagaacagctgaagatcaggctttgggggttccagtcaacaaaaggaaatccctgctaatgaagccccgacactacagcccaaaagcagactgccaagaagaccgcagtgacaggacagaggacgatggccccttggaaacacatggtcactctaccgcagaggaaatcatgataaaacctatggatgaaagtcttctttcaactgcacaagaaaactccagtaggaaggaagacagatactcttgttatcaagagctcatggtcaagtctttaatgcacttggggaaatttgaaaaaaatgtatctgttcagactgtaagtgaaaatttaaatgacagtggcatccagtctttaaaagcagagagcgatgaagcagacgagtgctttctgattcattctgatgatggaagagacaagattgatgattctcagccacccttctgctcctctgatgacaatgaaagtaactctgaaagtgcagaaaatggctgggacagtggctccaacttctcagaagaaaccaaaccacctagagtcccaaagtatgttttaacagatcataaaaaagacctattggaagttcctgaaataaaaactgaaggtgacaaatttatcccttgtgagaacaggtgtgattctgaaacagaaaggaaagacccgcagaatgctctcgcagaacccctggatggcaatgcccagccctcattccctgacgttgaggaggaagatagcgagagcctggcagtaatgacggaagagggtagtgacctggaaaaggccaaggggaatttaagtttgctggagcaggcaattgctctgcaggctgagcgaggttgtgttttccataacacctacaaagagctggataggttcctgctggagcacctagcaggggaaaggaggcaaaccaaagttatcgacatgggtggaagacaaatctttaacaataaacattcaccaaggcctgaaaagagggagaccaagtgcccgatccctggatgtgatggcacgggacacgtgacagggctctacccgcaccaccgcagcctttcggggtgcccccacaaagtgcgggttcccctggaaattcttgccatgcatgaaaatgtgctcaagtgtcccacgccgggatgcacaggaaggggtcatgtgaacagcaaccgcaacacccacaggagtctttctggttgtccaattgctgcagctgaaaaattggcaatgtcccaggataaaaatcagcttgattctccccaaactgggcagtgtcctgaccaggcccacaggacaagtttggtgaagcaaattgaattcaatttcccgtcacaagccatcacctctcccagagccacagtgtcaaaagaacaagagaagtttggaaaagtaccatttgattatgccagttttgatgcccaagttttcggtaaacgccctctcatacaaacagtgcaaggacgaaaaacaccaccatttcctgaatcaaagcattttccaaatccagtgaaatttcctaatcgactgcctagtgcaggcgcccacacccagagccctggccgtgccagctcttatagctacggtcaatgtagtgaagacacccacatagcagcagctgctgccatcctgaacctttccacccgctgcagggaagccacagacatcctctccaacaagccacagagtctgcatgccaagggagccgaaatagaagtggatgaaaatggcacattggacttaagcatgaaaaaaaa

SEQ ID NO: 20475 - DNA, 697 bp, Homo sapiens
  misc_feature 1..697: note = ENST00000520257
  source 1..697: mol_type = unassigned DNA
gtactaggaaatcactttatacatctgtttatagatggatgcagaggctgaagataaaacgctgcgtactcgctctaaaggaaccgaggtgccaatggattcactaatccaggagctcagattgcccctgtgagaatagagagaagtagactcctagactcacaaagtgctcaaggtaattctctcgagcccctaaggaccatcctcctggtctttggaagctgacccagagcctacagtctgtcctggaagatcagcaagctctgcgttcttgaaggaaaagctggaaggctcacacaaccctggccattgtcaaagaaacttggcttcccaacattgcaacctccctggtttcctctacctctcagactgcatcttctcaggtctccttgctggtttctcaacaccccagtctctgacactggattccccaagtgttgcctatgattgctccatggcaaagaagagaacagctgaagatcaggctttgggggttccagtcaacaaaaggaaatccctgctaatgaagccccgacactacagcccaaaagcagactgccaagaagaccgcagtgacaggacagaggacgatggccccttggaaacacatggtcactctaccgcagaggaaatcatgataaaacctatggatgaaagtcttctttcaactgcacaagaaaactccagtaggaaggaa

SEQ ID NO: 20476 - DNA, 955 bp, Homo sapiens
  misc_feature 1..955: note = ENST00000521549
  source 1..955: mol_type = unassigned DNA
tggaacctttttgtagggagaagggcaggatgtttttaactgaatgtgacctcaggggaatactagaggtaaggagagaaaaataattgaggtaactgtgggtgttttacatctcggaaaccatggcttttaataaggccacatgaagagagaagctggcatcatcccacgcaaaaaccagtgcctggcagagttgtggaagaaaataataaaatttctgaatggggcagcgtggagaaatcctaagagaaatagcataagagcattttggaacacatccaggaaaagataactttcgacacacctgtagacgttcgccaggtaaaggagtgatggaaactctccagttcagatccagtagcttttagggaaggaactacagttgctgacttaagttgaagaagcatctatttaatgtctggtcaaatcctacaagaaacacagaaatctatgattaaaaagctgagcactttgatatactgcaaagggtagagaaggcaggacggtagaaattttctgcaagaaagaatgaatttcaggatttatcactaaataagacaaagtcatttatttagtccccctgacacagcagggcaaactgagttgacatacaagttacctggagaaaaagagagcaattccaggacttcctcttcagcctaaaagaaggtaccagatctgtgcactggggcgatgtggaagagacctgcttattgcccctgatgtaagctccagtaagaaaagacgtcaagtacaagtactaggaaatcactttatacatctgtttataggtttatggatgcagaggctgaagataaaacgctgcgtactcgctctaaaggaaccgaggtgccaatggattcactaatccaggagctcagattgcccctgtgagaatagagagaagtagactcctagactcacaaagtgctcaagtgttgcctatgattgctcc

SEQ ID NO: 20477 - DNA, 808 bp, Homo sapiens
  misc_feature 1..808: note = ENST00000518037
  source 1..808: mol_type = unassigned DNA
agcccccaattttgtgagtgtccctgaagcattgtgacaattccattttatgtgtctgcgtgctcatatcaagactaaggagtgatggaaactctccagttcagatccagtagcttttagggaaggaactacagttgctgacttaagttgaagaagcatctatttaatgtctggtcaaatcctacaagaaacacagaaatctatgattaaaaagctgagcactttgatatactgcaaagggtagagaaggcaggacggtagaaattttctgcaagaaagaatgaatttcaggatttatcactaaataagacaaagtcatttatttagtccccctgacacagcagggcaaactgagttgacatacaagttacctggagaaaaagagagatggatgcagaggctgaagataaaacgctgcgtactcgctctaaaggaaccgaggtgccaatggattcactaatccaggagctcaggccagacctgaacattagaatccaagaaactgacaccttcaagaaaaccctttttacctataagccactttgagagggactcaagactgatcacccaagaagctgatgataaaaattaatttagaagagaagtgtccctccagggtgtggcagaggcatctgtagggttcagccaccccggcatcggccttgtccatgcctctgtgtgatggaggggctccgtgtggaacatgaggctggaggcctcacaccaacagaagcattccagagattattttatgtttactgtactgttcttactagggcagaaaagtgtcttaaaatatattggggaa

SEQ ID NO: 20478 - DNA, 818 bp, Homo sapiens
  misc_feature 1..818: note = ENST00000517456
  source 1..818: mol_type = unassigned DNA
agcccccaattttgtgagtgtccctgaagcattgtgacaattccattttatgtgtctgcgtgctcatatcaagactaaggagtgatggaaactctccagttcagatccagtagcttttagggaaggaactacagttgctgacttaagttgaagaagcatctatttaatgtctggtcaaatcctacaagaaacacagaaatctatgattaaaaagctgagcactttgatatactgcaaagggtagagaaggcaggacggtagaaattttctgcaagaaagaatgaatttcaggatttatcactaaataagacaaagtcatttatttagtccccctgacacagcagggcaaactgagttgacatacaagttacctggagaaaaagagagcaattccaggacttcctcttcagcctaaaagaaggtaccagatctgtgcactggggcgatgtggaagagacctgcttattgcccctgatatggatgcagaggctgaagataaaacgctgcgtactcgctctaaaggaaccgaggtgccaatggattcactaatccaggagctcagaatcagtgtgcccgtggacatgaggccacttacctggtgagggacaccagagtcctttaaaggaaccaagtcattcagagaaaaaaaggccagacctgaacattagaatccaagaaactgacaccttcaagaaaaccctttttacctataagccactttgagagggactcaagactgatcacccaagaagctgatgataaaaattaatttagaagagaagtgtccctccagggtgtggcagaggcatctgtagggt

SEQ ID NO: 20479 - DNA, 629 bp, Homo sapiens
  misc_feature 1..629: note = ENST00000519118
  source 1..629: mol_type = unassigned DNA
agaggatgtttagttcaagagaggatgatattgttacaagacattcagagcccccaattttgtgagtgtccctgaagcattgtgacaattccattttatgtgtctgcgtgctcatatcaagactaaggagtgatggaaactctccagttcagatccagtagcttttagggaaggaactacagttgctgacttaagttgaagaagcatctatttaatgtctggtcaaatcctacaagaaacacagaaatctatgattaaaaagctgagcactttgatatactgcaaagggtagagaaggcaggacggtagaaattttctgcaagaaagaatgaatttcaggatttatcactaaataagacaaagtcatttatttagtccccctgacacagcagggcaaactgagttgacatacaagttacctggagaaaaagagagcaattccaggacttcctcttcagcctaaaagaaggtaccagatctgtgcactggggcgatgtggaagagacctgcttattgcccctgatgtaagctccagtaagaaaagacgtcaagtacaagtactaggaaatcactttatacatctgtttatagatggatgcagaggctgaagataaaacgctgcgtactcg

SEQ ID NO: 20480 - DNA, 572 bp, Homo sapiens
  misc_feature 1..572: note = ENST00000518545
  source 1..572: mol_type = unassigned DNA
atcactgcttccctgatgtcagcgtgagaggcagaacaaaggctaggaggcaccgagcccccaattttgtgagtgtccctgaagcattgtgacaattccattttatgtgtctgcgtgctcatatcaagactaaggagtgatggaaactctccagttcagatccagtagcttttagggaaggaactacagttgctgacttaagttgaagaagcatctatttaatgtctggtcaaatcctacaagaaacacagaaatctatgattaaaaagctgagcactttgatatactgcaaagggtagagaaggcaggacggtagaaattttctgcaagaaagaatgaatttcaggatttatcactaaataagacaaagtcatttatttagtccccctgacacagcagggcaaactgagttgacatacaagttacctggagaaaaagagagcaattccaggacttcctcttcagcctaaaagaaggtaccagatctgtgcactggggcgatgtggaagagacctgcttattgcccctgatgtaagctccagtaagaaaagacgtcaagtacaagtactagg

SEQ ID NO: 20481 - DNA, 584 bp, Homo sapiens
  misc_feature 1..584: note = ENST00000521119
  source 1..584: mol_type = unassigned DNA
gtcatatcatgggaactacctttcaaagaaacagctttagtgtttccgttcagcccaccagggaggagagaaatataagttttggaaacaaacaaaaaagagtgatggaaactctccagttcagatccagtagcttttagggaaggaactacagttgctgacttaagttgaagaagcatctatttaatgtctggtcaaatcctacaagaaacacagaaatctatgattaaaaagctgagcactttgatatactgcaaagggtagagaaggcaggacggtagaaattttctgcaagaaagaatgaatttcaggatttatcactaaataagacaaagtcatttatttagtccccctgacacagcagggcaaactgagttgacatacaagttacctggagaaaaagagaggtaaggcgacatttttatttattaaaaagtagaacatgttgaaagaaaatgaattcaatcaaagaatttatacgaaagctctcctctacaacagctctttctctgtggattcgcttacaaatttattgttagtgttgaatttagaattgcaatttttgtcagaaatacagccattta

SEQ ID NO: 20482 - DNA, 573 bp, Homo sapiens
  misc_feature 1..573: note = ENST00000518453
  source 1..573: mol_type = unassigned DNA
ttactttcaggatttagaaagagctttgtttgccagtgtgactgttttccaggatcttttgttttaggttagtgtatggcaaacaaaggggaataggcaggtggaaagcttcagaactctttctgaactgagggcgcaatagaataggccaaaaacatttggagagaaagccgtttttttttttttagttgcaatcaaacgcaaactaagaattcccaagctcctgtgctacttttcaattcttacatcatgtgcagtaatctgctctatcacttgagagttttatctccatttttccccaggaactacagttgctgacttaagttgaagaagcatctatttaatgtctggtcaaatcctacaagaaacacagaaatctatgattaaaaagctgagcactttgatatactgcaaagggtagagaaggcaggacggtagaaattttctgcaagaaagaatgaatttcaggatttatcactaaataagacaaagtcatttatttagtccccctgacacagcagggcaaactgagttgacatacaagttacctggagaaaaagagaggtaaggcga

SEQ ID NO: 20483 - DNA, 664 bp, Homo sapiens
  misc_feature 1..664: note = ENST00000520279
  source 1..664: mol_type = unassigned DNA
gattctatggaacctttttgtagggagaagggcaggatgtttttaactgaatgtgacctcaggggaatactagagaaaataataaaatttctgaatggggcagcgtggagaaatcctaagagaaatagcataagagcattttggaacacatccaggaaaagataactttcgacacacctgtagacgttcgccaggtaaagagcccccaattttgtgagtgtccctgaagcattgtgacaattccattttatgtgtctgcgtgctcatatcaagactaaggagtgatggaaactctccagttcagatccagtagcttttagggaaggtaagtaaaagctatttaaaaataaacttttcccccaaagaaaaagaatctccaacttttcaacatccatcaaaaacctgagaagttaaggaacttcattttagaggaccagaaaagatgcttgctttggttattgttggcatcctcatggtaatttgggttatgttcatatagatttttgaggagtgtttacacctgttcatcctgattcatgacttcatatgtttgatattaggggcattaatatgtaagacattcagaattaacatgtatgattttaaaatgtggtagacaggataaagtacccctccccaaaatatccatgaaatctctgaaatc

SEQ ID NO: 20484 - DNA, 540 bp, Homo sapiens
  misc_feature 1..540: note = ENST00000519201
  source 1..540: mol_type = unassigned DNA
gagcaaagttagcaagttgcagcgcctctgcgttctgattctatggaacctttttgtagggagaagggcaggatgtttttaactgaatgtgacctcaggggaatactagagaaaataataaaatttctgaatggggcagcgtggagaaatcctaagagaaatagcataagagcattttggaacacatccaggaaaagataactttcgacacacctgtagacgttcgccaggtaaagatggagttccgctcttgtcgcccaggcggagtacaatggcacagtctcagctcactgcaacctctgcctcctgggttcaagcaattctcgtgcctcagcctcccaagtggctgggattacaagtgtctgccaccacgaccggctaatttttgtatttttggtagagatggggtttcaccatgttggccaggctggtctcagaatcctgacctcaggtgattcacctgcctcagcctctcaaagtgctgggattacaaggcttgaaccactgtgtccagcctcctgcgtttttttttcatttccc

SEQ ID NO: 20485 - DNA, 576 bp, Homo sapiens
  misc_feature 1..576: note = ENST00000524183
  source 1..576: mol_type = unassigned DNA
agcgcctctgcgttctgattctatggaacctttttgtagggagaagggcaggatgtttttaactgaatgtgacctcaggggaatactagagaaaataataaaatttctgaatggggcagcgtggagaaatcctaagagaaatagcataagagcattttggaacacatccaggaaaagataactttcgacacacctgtagacgttcgccaggtaaagtggctgaagaagagtgcgggagtacagcaggagtggcagaaatccagtggagcacaaacactaagtatgggctcatacagaagaggaggaatcatgccacacccttgccaccccacctgtgccaccccattctcttattcagctcagaaccaggaaggactccttcctggggggaaaaggtaagcaggaggtacccagcagcccctattaccattgtggacaccagcagtcttcaccactggagaattctacagtcctcaaggtccctgagctcagcttggggagctgcctggagttcacatagctgcactgctccaaagaaggagcccacattgtgcctcaactcttgtaggccaagct

SEQ ID NO: 20486 - DNA, 4739 bp, Homo sapiens
  misc_feature 1..4739: note = ENST00000522102
  source 1..4739: mol_type = unassigned DNA
actcggcgccagccccacggccatcaccggaccgctggagatgtgactgggctcgggacatgagcccgcttgttcgctcactctcagtgaaaagagttttgaaatgagttctgaatagacagcattttctttgtgcggttggtaaataacacagagcaaagttagcaagttgcagcgcctctgcgttctgattctatggaacctttttgtagggagaagggcaggatgtttttaactgaatgtgacctcaggggaatactagaggtaaggagagaaaaataattgaggtaactgtgggtgttttacatctcggaaaccatggcttttaataaggccacatgaagagagaagctggcatcatcccacgcaaaaaccagtgcctggcagagttgtggaagaaaataataaaatttctgaatggggcagcgtggagaaatcctaagagaaatagcataagagcattttggaacacatccaggaaaagataactttcgacacacctgtagacgttcgccaggtaaaggaaatccaggcccttgagcaatgtattgatgaattggggtggaaatggaggaggatggaaacgatggcggcactggactgttttccagaaaccatttacacaggctcaccagaagagggcagcgcagagcaatgaactctccgaggagtttccaaacagatgtcttgaaacttaaagtgaaaatctctgcatgaaagtagccgtttttggacagcgtcctccaccaaaaccatatatctctaaaataataataaaactccccaaacatgctaatctcgaaatgggtccctcaacatggaaggattgagttgcaagggacaaaattttacttccctgtcagagatgttttcacttcgattatccttttgatttattttattataaaagactatgtgaagtctagtattagtcatgtgcacaaatattcattatgcagctttttggggtgatttttttgataaaaatattgaaaaaatcacaaattcagattcgtggaagattccctacgcaacacagcgtttgaagcaaaatgcagcttaaggaagtttcccattaaatccatatttccttgatgcaaaatgatatcacattgttttacttgttaatttttttcttctcagaattaccacagaaaatattttttgttttataataaaacacgtgatactctacattggacatacattttacacttgaaatctggaaagaaaaacctactagactggaacagaattccaaagaacgtgaggggacaaatctatggagacatttatattttgttttagggttattataaaactctagtttcatcgtctatgcataaatgtttaggggatctaaatatcttcactaaattttattctgtaatcggaaagttggcatttaagatgatcattcttataggctaattaggatgataaaatcctttcctcttttcaaaagttcacgaacgcataacaaattggaactacttttacaagccgagtgtccctcttatgccattagctttcttggatttaccttctagatgactttggctcctgttaacttcagatctttgacatatcaagtatggttgttttcaaaggtttcccaggcaactgcaacaattcatctggttctagtcaaaagtgcccttgaactctcagctcacttcccttccctgtatgagtaatgtgtgtagcaaaaggaaaaacaccaaagacttcatgtaatggctaatgtgaatgatttggtgaagagaggaatggatttcacaaaaggatccacttggatgttaagacctcagctggctgcctgcgggttccctttgtcaagctctcatttgcatttagggggaaggccacaacccacatcatgtgttcggggttctgtttaactcttcctcacagttcctagggccccaaactcttaccctaggtggccccaaggactccttcaaggccagatcgctggcccgccagggagtgactgcccccaaatctctgagagatgcctcaggactccagctgactcacacacacgctgacctgtgagaatcattctgtgcttcttgtttctcacataacccactgggaagcaatggttggagtcttgttgcattttacttacaggaagagttttataattacctcccaagaagttcctgaagaacagaggagggagtaattggaatctctgatcctgttgtttgtgaaaggttcctctgctttacattaattacattctgtgttgcgtttaaaagaaaagatttcacctcatctaggcagacagtgcagttagaccatcaccttttttcccctttattttgactcttgtcttcacagctaatttactagtgactaaaatgatggcaaataaggcaatataatatggacagcctgcaaatcccactcatggagctctgtaagtgggagcagattgctgtctgagtacagggcttctgcagaagtctccctatcaactccacgtcgaactcaaagtctagagagcttcaacaattaatgatatgtcatctggatccagtcataaaagcatgatgaccaccccttcccccacccctcaccattcctttctccttggatttgttatatttcattctgttcaatataattactgagatgtaaacattccattgaaatgtgtctaagtaggcagatttttaagaatctacttttatgggtctataacaaattttaggaaggctatttcattgatatgtgaaagtgtataatagttgctttagctactagcccttccaacagctacatttaccactgtgattgtcactttgaataatccttgtgttattaaaattaatacagataaatataattttatagtaggaaatgtagttgtcaggatgtgaaacaatagtaatcaatttgaataaatatttgctatttgttttcataaaagttttaatcctcaaaagagaactctgaccaaaataggaatatagcaggatcaatgaaacaggtggcatgagtcatctcactggcttttaattaaaaaggatgctgtggttgttggcgtggactggactgcgcataggcagttttagaatttcttaagctgaaatccagctggagagttcttaatcagaatggacttattttgataatttataatctgtgtattcagagcattgatgttatagttttgatacctaaatcaccgttttaaaaattcaaagagatatatgaatcctgagtctcggacagttattcctgagccaaaggatttctgtgcaatgctaatatgtataatagagaatcagtctttcactgtacagttttgtcatcatgtttcaataactgaatgaatattctgaattaataagcataacgtttgtataagctaaagactaatctaagctctgcattcattgatgggaaccttaagcaaatgtttcttttcatcagcttgttcaaaaggcataaacataattacagttctgaggcgataacatatcgactggttaaatagtaagtgggtctggacaaggtaacttaaagttatgggctgcacgttgttttgagtacttggaagcatctggaaaaaataatttttttaaaaagatatttttactgtttatcttatagaaaaacagtatgagcattaaacccccactagaattttggaggttttctttttctaaagcgttggttaaaattcagataagttgatacttacagcttgagagaaaagatggggaagtggtagaaatatcaaatcatgagttagttttaaatttctcagaatgctcagggggcagtgagggaaagagggacttgctggccatgtccccacacctccgctttgcaccttttgctgaagttagttcccgaaaacagtgctgggtgtttgggttacatctggttcagccttcttttcctccttccttctttatccgtcacatggcctgccctctatctcttaaatcttaggtctgttgtgagactggggaaggagtgatgtgaacatgtgctcctgggcctggaaatgcccctctgccccgactccttctgtctcagcagtgcttgtcattaattctcccaacaaatacctgagcccttctctgtgcaggatgggtctcagtgctttgaatgtgctgtctcgtttaattctctcaaaagccctttattgacaatgctcttataatattttatacagaaagaatggaaagctaatccaatctttttctaatgtggttaatcaaatttatttatttttaattaatggtggcttagaaagctttctttcagcattactatcctttatgagattgtcataaatgtttactatttttcattgttcatggcaaggcggcaatagatcttattcagaattgataatcagtgtgatttatctggtagccaaaccaaaaatcaaactattatgctgtttagatataatggtagccactagaagatttacatcaaatgttagaccagaagccctttccatcagtgaccaggtttggtatctgctaggagggaaaagcctggtaactgatcaccagtgtttctgttctttttactttatagtttgtaatttaccaaggcatgattaattttgctgatgtttaagttacttacaatcatattaagagttagagaggagtgatatcagcaagatggctgactaaaagtgcccaacacccatttcctggactacccccacaaaaaatgaataaacaatgaataaacaacta

SEQ ID NO: 20487 - DNA, 501 bp, Homo sapiens
  misc_feature 1..501: note = ENST00000520811
  source 1..501: mol_type = unassigned DNA
agcgcctctgcgttctgattctatggaacctttttgtagggagaagggcaggatgtttttaactgaatgtgacctcaggggaatactagagaaaataataaaatttctgaatggggcagcgtggagaaatcctaagagaaatagcataagagcattttggaacacatccaggaaaagataactttcgacacacctgtagacgttcgccaggtaaagctaatttactagtgactaaaatgatggcaaataaggcaatataatatggacagcctgcaaatcccactcatggagctctgtaagtgggagcagattgctgtctgagtacagggcttctgcagaagtctccctatcaactccacgtcgaactcaaagtctagagagcttcaacaattaatgatatgtcatctggatccagtcataaaagcatgatgaccaccccttcccccacccctcaccattcctttctccttggatttgttatatttcattctgttcaatata

SEQ ID NO: 20488 - DNA, 836 bp, Homo sapiens
  misc_feature 1..836: note = ENST00000524078
  source 1..836: mol_type = unassigned DNA
gcccgcttgttcgctcactctcagtgaaaagagttttgaaatgagttctgaatagacagcattttctttgtgcggttggtaaataacacagagcaaagttagcaagttgcagcgcctctgcgttctgattctatggaacctttttgtagggagaagggcaggatgtttttaactgaatgtgacctcaggggaatactagaggtaaggagagaaaaataattgaggtaactgtgggtgttttacatctcggaaaccatggcttttaataaggccacatgaagagagaagctggcatcatcccacgcaaaaaccagtgcctggcagagttgtggaaggtgctatcacattggcttggcatttgtgtagctttgattgaaaatcaatggttttcttatgataattttcacatcatattttttttcttctttagaaaataataaaatttctgaatggggcagcgtggagaaatcctaagagaaatagcataagagcattttggaacacatccaggaaaagataactttcgacacacctgtagacgttcgccaggtaaaggaaatccaggcccttgagcaatgtattgatgaattggggtggaaatggaggaggatggaaacgatggcggcactggactgttttccagaaaccatttacacaggctcaccagaagagggcagcgcagagcaatgaactctccgaggagtttccaaacagatgtcttgaaacttaaagtgaaaatctctgcatgaaagtagccgtttttggacagcgtcctccaccaaaaccatatatctctaaaataataataaaactccccaaacatgctaatctcgaaa

SEQ ID NO: 20489 - DNA, 575 bp, Homo sapiens
  misc_feature 1..575: note = ENST00000520716
  source 1..575: mol_type = unassigned DNA
cgcttgttcgctcactctcagtgaaaagagttttgaaatgagttctgaatagacagcattttctttgtgcggttggtaaataacacagagcaaagttagcaagttgcagcgcctctgcgttctgattctatggaacctttttgtagggagaagggcaggatgtttttaactgaatgtgacctcaggggaatactagagaaaataataaaatttctgaatggggcagcgtggagaaatcctaagagaaatagcataagagcattttggaacacatccaggaaaagataactttcgacacacctgtagacgttcgccaggtaaaggaaatccaggcccttgagcaatgtattgatgaattggggtggaaatggaggaggatggaaacgatggcggcactggactgttttccagaaaccatttacacaggctcaccagaagagggcagcgcagagcaatgaactctccgaggagtttccaaacagatgtcttgaaacttaaagtgaaaatctctgcatgaaagtagccgtttttggacagcgtcctccaccaaaaccatatatctctaaaataataat

SEQ ID NO: 20490 - DNA, 545 bp, Homo sapiens
  misc_feature 1..545: note = ENST00000523652
  source 1..545: mol_type = unassigned DNA
atgtgagttcttcaaaattgtcagacgacgtttcccttcagctggtttggagctcattttccaactgctttgcaaaaaataataaaatttctgaatggggcagcgtggagaaatcctaagagaaatagcataagagcattttggaacacatccaggaaaagataactttcgacacacctgtagacgttcgccaggtaaaggtaagaaaaaatattgtaaaatgcatttaagttattttattacatcgcactgggttgaactttgagagaaaacataccactggcgcaagatgcgcaaggaggagttaggagggctcaccttttgcccctccctctcgtgggcatgggcatggcagccctgtgtccaccatgaccatcagcggccacctgagttgtttctaatgccggctgtggagcagtcgaagacatgttcaccaggtcgaggggatctgactgagtatgatactcggcagacagttctgcgaaaaagtcaatgtatttaatactgcaaatgttacttgtacagtaaggaatttcttttagatt

SEQ ID NO: 20491 - DNA, 8872 bp, Homo sapiens
  misc_feature 1..8872: note = ENST00000393640
  source 1..8872: mol_type = unassigned DNA
aatatgctcgttccattccctgctggctttgtggccacaaatggaggggcagctacgtttcttgaacacagagcctgagaggccttgtatgcagctgctggaagcagccaggagaccccaaaagtgggctggagacttcaacaaggacagggaacagggctgcactgagaggcccaggggctaggtcagcagcaccgctaggcagatttggaggggagctggggagaggcgaggcagccagctttgcaagattcccacggcacacagccagtgctcaggggttcccttctcagcgttcctctcacctggtgtggctccctcacgcttggcatggatctgagctcctttccttatggctgagacccaaactgcctacaagtggccttttctccctgttcttgcctgcaagggcagcatggggcctcaggctgtcagtgctaccagggacgctggcattcactttgtccataatgtacagatggatgtagacaactgccctcagggctgtccgggggcaggaccaagcccagcaaccacacctcctgacacagccaggttctcccccaacggcggagctgacaggactgttcatggttcattgagtggacccagcaatacctcatcgataatccacagtcgagagaagaggggcggtcagagaccggccagccctcccttctgattgggagaggcctctgcaggcactgacaggctccagagagtgctgtggggggcagtcagtgtccatagtcccctggaatcttctctgggctgttttctctgacttttcacctgaaattaactgtacatagctgggctaggaactctctaaatctgaaagcatgtggcttagggaaaatcacttgactcgtttaccttctggctaagaagtgaagactctgggctaatctagtcctccaggccctggagtcccacacagtgatgctatctgtgcagctagagggcagagcccttggtcatgtccaccctctgattaagtgggcatctcctctcctgctagctttggggcttggggtggggctgggacaaagcctggtgcccgtgtgattcatccgcacattatttctcctctctgccattctagggtcgtgctgcggcagcctggcgcccgacatgtgaaggggaacctgccaggggattactgtgagctcacagcaggataggctggccccgggggagtggggatgggcagaacctgggccaggagtattaggaaggagacctggaccctggtagggagctcagcacaagctcgcctgacccagatggtattggacacagtgccccgctgaacagcagctgttcccagcgccagaggaccccacagccacagtaggagctttgcgacccctacgcaactgcagctggggctggggccaccaggagaagggaccagcacctcagatgggaagcagaagggcaagacctactgcggaaaggatctcgatctctgcagcggagttttcccacactcacagagcttcctgtttttgtcctctcagggttggggtctggctcccctcctctggcagaggttttgggccaggaggtgggacaacacttgcatggaacccaagtcccctgaagcccctgtgctctctgttgtgattggagttctagggcttccccgctgccgggaacgaggggccgcctcattgtctgctcatgaaccacaaggaccccgactgctccagactggattatttcaagccgccaaagagggggacccctagagctggcagccagcaatcccaagggactagagggctgcaatggactgacctccccctcaccagggtggcaggagaggcagagcctctgtggcctagctagtgacggagagacccgatgaagccctaagcaggggccccgcctgactcagggacaggacagccactcctgccaacgtgtgttctccctacatgagggagggcgtggcaagggacccctgccactgtcccctgctgcagcacgtgcccctatgccctttgcatgtggtgccagaataggcaggctacgccgtggctggcccctcagcgggctgggaaaagagtggccacggtgaccgtcacccgcctgccggcaccatgaagtgctccctgcgggtgtggttcctctccgtggccttcctgctggtgttcatcatgtccctgctcttcacctactcgcaccacagcatggccacgctcccctacctggactcaggggccctggatgggacgcaccgggtgaagctggtgcccggctatgccggcctgcagcgcctcagcaaggagaggctctcgggcaagagctgtgcctgtcgccgctgcatgggcgatgccggtgcctccgactggtttgacagccactttgacggtaacatttcccccgtctggacccgagagaacatggatcttccaccggacgtccagaggtggtggatgatgctgcagccccagttcaagtcacacaacaccaatgaggtgctggagaagctgttccagatagtgcctggcgagaacccctaccgcttccgggacccccaccagtgccggcgctgtgccgtggtggggaactcgggcaacctgcggggctctggctatgggcaggacgtggacgggcacaacttcatcatgaggatgaatcaggcgccaaccgtgggctttgagcaggatgttggcagccgaaccacccaccatttcatgtaccctgagagtgccaagaacctgcccgccaacgtcagcttcgtgctggtgcccttcaaggtcctggaccttctgtggatcgccagcgccttgtccacggggcagatccgattcacctacgccccagtgaagtccttccttcgagtggataaagaaaaggtccagatctacaacccagccttcttcaagtatatccacgacaggtggacagagcatcacgggcggtacccttccacggggatgctggtgcttttctttgccctgcatgtgtgtgatgaggtgaacgtgtacgggttcggggccgacagccggggcaactggcaccactactgggagaacaaccggtacgcgggcgagttccggaagactggcgtgcacgacgcggacttcgaggcccacatcatcgacatgctggccaaggccagcaagatcgaagtctaccggggcaactgagccgggcctcgccgcgacccttccggcccatctatcgggcaccggggctccggcccgggacccaggaccagcaacccgcgaccaatcatgctgcagcccaggggcgtctgctgtgccccgccaatcacgagactgggggaccggccgggcctggcaccaatctgcgctgcggtcgggcggagcttctgtttctcccagccaatcatgtgactcaaggaaaacttccggcgctgtgtccagtctcctccaatcaatggccttcgggggcgggccagcggccgctcaatccccactccctcatgctttgggttagggttttctttcacgctttctgaggaggagagcatggcgcgggcctcggcgaagcacttccgtcagcctcgggcggaggatcgtcttagtagctggccagacctggaggagagcgggcggtctttgcgggcctcaggagataggtggccgcccggcccctttccccgcctgcccggataggtgcgtgcagacccaccaaagaaaagcggtcgctgcgggacccccagtcccacctcggccgcgctgtgggatggctgcgcccccagggcttcctgcgtctccaggaagccgggagtggcgccctctgcggggtggggtgctcccgggccgaactccggacaggtggaggggacagggcagagctcgaggaagccctgtccccttcagtgcaaggtgctgtcactcacgtgtgccctcgaccctcccgttcacccgcagccttctcagcgcctctccctgggccggaggcctcctcaccagcctacctgttgctctggaaaaaaatcccgtcccccgactccgtccctacccccagtcttcggccggctctggcccctggggagggggctgcacggcggaaggaggctggctatgggcccggctgcccgctgcatgtacctcctcctccacccatcgcctcttgcctgggggtaactttgcctggggctcattctttggttaagctgaagctgccgtgggtggccaaaccgcagattctttgcaaattctgagctggcagagctcgcagccgggagccggccggggaagaggagacttgcgcgccgcaagccgcctgcctccaccctgctctccatctcccgctctagaagggctgggaagctcgcggccggggttccacctggaagctgcttgcatggctgaacccagcttaggtccctgacggggctgctggtggaattctcccccttcgaagctggggaggtttaggagggggaaggcttctgtgaagctctcaaaccactaatagagccccctccccaacagtgacggcgcagatgctcccccttttcttagttgacaccaccaggcagcttcctggccgttggtaggttcctgcagctggctgagggaacagggaccggcaggggactttgttaggggagggttgggatgggcagtgggcccctgaaagttaatatattggaacctagctcgagtgtcgttctttccaattccgaaagtagaaagagtaaaaataggggtgattggggtggggttagtagaatgcctctctcagggcgctcccccctcccccaccgttttagagagctaggcctcagccagtcttgccactcccatctcagtgcttcctgaagaggctgttttgagtgttgatgaaaagcaatgcaattatgccaaacagtattgagcagaataatttatttcttttttttcttttgctttaaatcatgaatcccgccaggtacggtggctcacacctgtcatcccagcactttgggaggccaaggcgggcggattacttaatacttaaggtcaggagttcgagaccagcctggccaatatggtgaaacctcgtctctaccaaaaaaaaaaaaaaatacaaaaattagccaggcgcagtggtgcgcacctgtaatcccagctacttggaaggctgaggcaggagaatcccttgaaccgaggaggcgaaggttgcagtgagccgagattgtgccactgcactccagcctgggcgacagagcaagaccctgtctcaaaaaaattaaatcatgaatccccatcctggaagaggtaggtcccagcatccagccagattttctgcaatagtaatttaaacacacttttttatttccttccctttctgaattaaaaggaacaaaaaactgtctagtccttcattgttctgaaatgggcatgatggaagaaggcgggtctggtaggatagctgtgactgataatggctgagaacgttgggggatatgggaggggcgagatgactcccagataccctcccccacctatacaggaggcacctcattcctggactctgcgctccaagacactgaaatctgagcgggtacaagcattttggttaaaaatcagctcgttgtcgcctcttgagtttcctccaggagaggagttcattggagaggattcctggtagcagctcctcgcagtggctgtcctgtaaccactttggcctctgtcaacatgatgtctccaggtatccatcaggctccgatacatttgggtggccacaggctgggctgtccccacctctcagggaagtgcatctaagtcaggttttcccctctggcacagccctgcctccacagcccaatttccaccatgccacaggcaacccgcatttttatttatttaatttatttatttattgagacagagtcttgttctgttacccaggctggagtgcaatggcccgatgtcggctcatcccaacctccacctcctgggttcaagcgattcttctgcctcaggagagtagggagtagctgggattacaggcatgcaccaccactcccggataattttatatttttagtagagacgggttttctccatgttggtcaggctagtcttgaactccagacctcaggtgatctgcccgcctcggcctcccaaagtgctgggattacaggcgtgagccagtgtgcctggccgattttttttttttgagactgattctcactctcgcccaggctggagtgcagtggtgggatctcggctcattgcaagctccgcctcccgggttcacgccattctcctgcctcagtctcccgagtagctgagactacaggtgaccgccacgatgcccggcagtttttttgtatttttagtagagacggggtttcactgttagccaggatggtctccatctcctgacctcgtgatctccccgcctcagcctcccaaagtgctgggattacaggcgtgagccaccgcgcctggcttttttttttttttttttttgagatggagtcttgctctgtcacccaggctggagtgcagtggcgcgatcttggctcactgcaacctccgcctcccaagttcacccacctcaacctcccgagtagctggaattacaggggtgtgccaccacacccagctaatttttgtatttttagtagagacggggtttcaccatgttggccaggctggtctcgaactcctgaccacaggtcatccaccccctttggcctcccaatgtttgaccacacccagcccataatagatttttaaaactcctataaatatcattctacttccctttattgctaaaatgggagctttttcatccagttttttgggtgtgttccaaatattttgttaaatttcccgtctattgctgttattgtttccatttatttgcccatgtgagttgatacctttttcattcctttcccatagctttagtgacgttgtgggaagggaagttaggtaagtgatgtttcatcttgtacttactagacacctttttcttccttgatttcctgagttccctgcctccacaggtgtgtttcactcctggttgcttatatttttttatttttgagatggagttttgctctgttgaccaggctggagtgcagtggcatgatctcggctcactgcaacctgtgcctcctgggttcaagcgattctcctgcctcagccacccaaatagctgggattacagatgcgcaccaccatgcccagctaatttttgtatttttagtagagacggggtttcaccatgttggccaggctggtcttgaactcctgacctcgtgatctgcccaccttggcctcccaaggtgctggcattacaggtgtgagccaccgtgcccggcctctggttgcttatttaacccctttgtcacgatggaggcttttctcttttttttttttttttttcagatggagtctctctccattgcccaggctggaatgcagtggtgctatgtccgctcactgcaagctccgcctcccgggttcacaccattctcctgtctcagcctcctgagtagctgggattacaggcatgcactaccacgcccggctaattttgtatttttagtagagacggggtttctccatgttggtcaggctggtcttgaactcctgacgtcaggtgatccgcctgccttggcctcccaaatggtaggattacaggcgtgagccaccagaccctttttttttttttttttttttttttaagagacagggtctcctgtcgcccagactggtgcagagctcactgcagcctcaaaaactcctggattcaagtgatcctcccacctcagcctccagagcagctagagcctagctaaaaaattttttaaaaacattttatggccaggcacggtggctcatgcctataatcccagcattttgggaggctgaggcaggtgaatcacgaggtcaggagttcaagaccagcctggccaagatggtgaaaccccgtctctactaaaaatacaaaaaattggccaggcttagtggcagacggctgtgatcccagctactcgggagaccgaggcagagaattgcttgaacctgggaggtggaagttgtggtgagccgagattgagccactgcactccagcctgagcgacagagtaagactccgtctcaaaaaaaaaaaagtattttacccatccacaggcagcagacaaggaagtaccttctgtgactgtctggcaaggtcagaggcatcagggaaggtaaaatactgaaactatatttttaaaaataaaagtattcccttttgagtgtgaattaggaatcaatgccccttctcactacttttgtgaaaaaaatcacagctcctgcagcaagtctatgcctgggtaacaaccaacccacaaaatccaagaggaggtccccctctcccgcctctgtgaggcttgaggagcagtatgtatctgggccagcctggtcctcagagtgtggaattaacacctttcctctagcaactgtttgtgctgctgagaacagcacagactctctggcagcctggttctctccagagggaagcctgtgaagcagaagaaacatatggcatctgcactcagggcgcccagttccatccggccttgctataaaatgactttgcctttccttttttaaaattacaaaaataattcaaccaatacataaacatatgaagtgaatcacggagggccttcctgcgatatctttttttgcctaccatttgtcatggaatgggtaaaggggaccacagagggaagagacgctgccccttcgcagggccatggcagtcccctgggctgcgtctccacggtgcttcctgtgaaacgctgttaccacgggcaccgcactggagaccatgaaagggaagagtttgacatctcagctgtctttgctataaatagaaataaataaaccttaactaa

SEQ ID NO: 20492 - DNA, 689 bp, Homo sapiens
  misc_feature 1..689: note = ENST00000567822
  source 1..689: mol_type = unassigned DNA
ggagggtgagcaggttggagtggaccctgtccaggaccccggagccacctgagggatgaatcaggcgccaaccgtgggctttgagcaggatgttggcagccgaaccacccaccatttcatgtaccctgagagtgccaagaacctgcccgccaacgtcagcttcgtgctggtgcccttcaaggtcctggaccttctgtggatcgccagcgccttgtccacggggcagatccgattcacctacgccccagtgaagtccttccttcgagtggataaagaaaaggtccagatctacaacccagccttcttcaagtatatccacgacaggtggacagagcatcacgggcggtacccttccacggggatgctggtgcttttctttgccctgcatgtgtgtgatgaggtgaacgtgtacgggttcggggccgacagccggggcaactggcaccactactgggagaacaaccggtacgcgggcgagttccggaagactggcgtgcacgacgcggacttcgaggcccacatcatcgacatgctggccaaggccagcaagatcgaagtctaccggggcaactgagccgggcctcgccgcgacccttccggcccatctatcgggcaccggggctccggcccgggacccaggaccagcaacccgcgaccaatcatgctgcagcccaggggcgtctgctgtg

SEQ ID NO: 20493 - DNA, 904 bp, Homo sapiens
  misc_feature 1..904: note = ENST00000566097
  source 1..904: mol_type = unassigned DNA
gaggatgtgaatggggtgggggcagtcgcccctgtcccccacccttcccttcaagccgggcaggggtggggggaggggccgggctgaggcggcggcggcggcggcgctcggggagggttgggccaggcaagggcgggactagcccacggcgggcggacgagagagctgcgagctaacgggtccggacgacggcggcggcggcggcggcggcggcgacggctttctgcgcgggcggcggcggcggccggagcggcgagcatggcccgcgcggcgccgggcgctgactgagggtcgtgctgcggcagcctggcgcccgacatgtgaaggggaacctgccaggggattactgtgagctcacagcaggataggctggccccgggggagtggggatgggcagaacctgggccaggagtattaggaaggagacctggaccctggtagggagctcagcacaagctcgcctgacccagatggtattggacacagtgccccgctgaacagcagctgttcccagcgccagaggaccccacagccacagtaggagctttgcgacccctacgcaactgcagctggggctggggccaccaggagaagggaccagcacctcagatgggaagcagaagggcaagacctactgcggaaaggatctcgatctctgcagcggagttttcccacactcacagagcttcctgtttttgtcctctcagggttggggtctggctcccctcctctggcagaggttttgggccaggaggtgggacaacacttgcatggaacccaagtcccctgaagcccctgtgctctctgttgtgattggagttctagggcttccccgctgccgggaacgaggggccgcctcattgtctgctcatgaaccacaaggaccccgactgctccagactgg

SEQ ID NO: 20494 - DNA, 581 bp, Homo sapiens
  misc_feature 1..581: note = ENST00000561708
  source 1..581: mol_type = unassigned DNA
actgggatgaggacatggctctggtgtggctgtgttttctcaattctgttgagggatttggggtgagtcgtgctccccctctgtctcctcctttggaagagaatgcccaggacagtggtgccagtttcagggtcgtgctgcggcagcctggcgcccgacatgtgaaggggaacctgccaggggattactgtgagctcacagcaggataggctggccccgggggagtggggatgggcagaacctgggccaggagtattaggaaggagacctggaccctggtagggagctcagcacaagctcgcctgacccagatggtattggacacagtgccccgctgaacagcagctgttcccagcgccagaggaccccacagccacagtaggagctttgcgacccctacgcaactgcagctggggctggggccaccaggagaagggaccagcacctcagatgggaagcagaagggcaagacctactgcggaaaggatctcgatctctgcagcggagttttcccacactcacagagcttcctgtttttgtcctctcagggttggggtctggctcccctcctctggcagagg

SEQ ID NO: 20495 - DNA, 557 bp, Homo sapiens
  misc_feature 1..557: note = ENST00000567586
  source 1..557: mol_type = unassigned DNA
acggctttctgcgcgggcggcggcggcggccggagcggcgagcatggcccgcgcggcgccgggcgctgactgaggtcacaggaagctgggagcgggaccctgaaagaactcgagttctgtccttagatgttgggcatgcagcaggcaaagggagaatgagaggagacaaggacctggcttcccatctacagactgttcagccaaggccatgcctagagtgggatctgctaaatgggcacagcagaacattggaagaagcacctttgagccagtgctgctggggtctccgtggattagagccaggagccctgatgaggcctgtgggcggggcttcactttcgaccctgagaagccaactccacatctccttccctctcacccttgagccgtgggtagttcagggaggccacagccttctttctgtgccatggcctatcccaaagtcacctccactcacaacgtcgtgaccttagggtcgtgctgcggcagcctggcgcccgacatgtgaaggggaacctgccaggggattactgtgagctcacagcaggataggctgg

SEQ ID NO: 20496 - DNA, 4450 bp, Homo sapiens
  misc_feature 1..4450: note = ENST00000342907
  source 1..4450: mol_type = unassigned DNA
cgggcggacgagagagctgcgagctaacgggtccggacgacggcggcggcggcggcggcggcggcgacggctttctgcgcgggcggcggcggcggccggagcggcgagcatggcccgcgcggcgccgggcgctgactgagggtcgtgctgcggcagcctggcgcccgacatgtgaaggggaacctgccaggggattactgtgagctcacagcaggataggctggccccgggggagtggggatgggcagaacctgggccaggagtattaggaaggagacctggaccctggtagggagctcagcacaagctcgcctgacccagatggtattggacacagtgccccgctgaacagcagctgttcccagcgccagaggaccccacagccacagtaggagctttgcgacccctacgcaactgcagctggggctggggccaccaggagaagggaccagcacctcagatgggaagcagaagggcaagacctactgcggaaaggatctcgatctctgcagcggagttttcccacactcacagagcttcctgtttttgtcctctcagggttggggtctggctcccctcctctggcagaggttttgggccaggaggtgggacaacacttgcatggaacccaagtcccctgaagcccctgtgctctctgttgtgattggagttctagggcttccccgctgccgggaacgaggggccgcctcattgtctgctcatgaaccacaaggaccccgactgctccagactggattatttcaagccgccaaagagggggacccctagagctggcagccagcaatcccaagggactagagggctgcaatggactgacctccccctcaccagggtggcaggagaggcagagcctctgtggcctagctagtgacggagagacccgatgaagccctaagcaggggccccgcctgactcagggacaggacagccactcctgccaacgtgtgttctccctacatgagggagggcgtggcaagggacccctgccactgtcccctgctgcagcacgtgcccctatgccctttgcatgtggtgccagaataggcaggctacgccgtggctggcccctcagcgggctgggaaaagagtggccacggtgaccgtcacccgcctgccggcaccatgaagtgctccctgcgggtgtggttcctctccgtggccttcctgctggtgttcatcatgtccctgctcttcacctactcgcaccacagcatggccacgctcccctacctggactcaggggccctggatgggacgcaccgggtgaagctggtgcccggctatgccggcctgcagcgcctcagcaaggagaggctctcgggcaagagctgtgcctgtcgccgctgcatgggcgatgccggtgcctccgactggtttgacagccactttgacggtaacatttcccccgtctggacccgagagaacatggatcttccaccggacgtccagaggtggtggatgatgctgcagccccagttcaagtcacacaacaccaatgaggtgctggagaagctgttccagatagtgcctggcgagaacccctaccgcttccgggacccccaccagtgccggcgctgtgccgtggtggggaactcgggcaacctgcggggctctggctatgggcaggacgtggacgggcacaacttcatcatgaggatgaatcaggcgccaaccgtgggctttgagcaggatgttggcagccgaaccacccaccatttcatgtaccctgagagtgccaagaacctgcccgccaacgtcagcttcgtgctggtgcccttcaaggtcctggaccttctgtggatcgccagcgccttgtccacggggcagatccgattcacctacgccccagtgaagtccttccttcgagtggataaagaaaaggtccagatctacaacccagccttcttcaagtatatccacgacaggtggacagagcatcacgggcggtacccttccacggggatgctggtgcttttctttgccctgcatgtgtgtgatgaggtgaacgtgtacgggttcggggccgacagccggggcaactggcaccactactgggagaacaaccggtacgcgggcgagttccggaagactggcgtgcacgacgcggacttcgaggcccacatcatcgacatgctggccaaggccagcaagatcgaagtctaccggggcaactgagccgggcctcgccgcgacccttccggcccatctatcgggcaccggggctccggcccgggacccaggaccagcaacccgcgaccaatcatgctgcagcccaggggcgtctgctgtgccccgccaatcacgagactgggggaccggccgggcctggcaccaatctgcgctgcggtcgggcggagcttctgtttctcccagccaatcatgtgactcaaggaaaacttccggcgctgtgtccagtctcctccaatcaatggccttcgggggcgggccagcggccgctcaatccccactccctcatgctttgggttagggttttctttcacgctttctgaggaggagagcatggcgcgggcctcggcgaagcacttccgtcagcctcgggcggaggatcgtcttagtagctggccagacctggaggagagcgggcggtctttgcgggcctcaggagataggtggccgcccggcccctttccccgcctgcccggataggtgcgtgcagacccaccaaagaaaagcggtcgctgcgggacccccagtcccacctcggccgcgctgtgggatggctgcgcccccagggcttcctgcgtctccaggaagccgggagtggcgccctctgcggggtggggtgctcccgggccgaactccggacaggtggaggggacagggcagagctcgaggaagccctgtccccttcagtgcaaggtgctgtcactcacgtgtgccctcgaccctcccgttcacccgcagccttctcagcgcctctccctgggccggaggcctcctcaccagcctacctgttgctctggaaaaaaatcccgtcccccgactccgtccctacccccagtcttcggccggctctggcccctggggagggggctgcacggcggaaggaggctggctatgggcccggctgcccgctgcatgtacctcctcctccacccatcgcctcttgcctgggggtaactttgcctggggctcattctttggttaagctgaagctgccgtgggtggccaaaccgcagattctttgcaaattctgagctggcagagctcgcagccgggagccggccggggaagaggagacttgcgcgccgcaagccgcctgcctccaccctgctctccatctcccgctctagaagggctgggaagctcgcggccggggttccacctggaagctgcttgcatggctgaacccagcttaggtccctgacggggctgctggtggaattctcccccttcgaagctggggaggtttaggagggggaaggcttctgtgaagctctcaaaccactaatagagccccctccccaacagtgacggcgcagatgctcccccttttcttagttgacaccaccaggcagcttcctggccgttggtaggttcctgcagctggctgagggaacagggaccggcaggggactttgttaggggagggttgggatgggcagtgggcccctgaaagttaatatattggaacctagctcgagtgtcgttctttccaattccgaaagtagaaagagtaaaaataggggtgattggggtggggttagtagaatgcctctctcagggcgctcccccctcccccaccgttttagagagctaggcctcagccagtcttgccactcccatctcagtgcttcctgaagaggctgttttgagtgttgatgaaaagcaatgcaattatgccaaacagtattgagcagaataatttatttcttttttttcttttgctttaaatcatgaatcccgccaggtacggtggctcacacctgtcatcccagcactttgggaggccaaggcgggcggattacttaatacttaaggtcaggagttcgagaccagcctggccaatatggtgaaacctcgtctctaccaaaaaaaaaaaaaaatacaaaaattagccaggcgcagtggtgcgcacctgtaatcccagctacttggaaggctgaggcaggagaatcccttgaaccgaggaggcgaaggttgcagtgagccgagattgtgccactgcactccagcctgggcgacagagcaagaccctgtctcaaaaaaattaaatcatgaatccccatcctggaagaggtaggtcccagcatccagccagattttctgcaatagtaatttaaacacacttttttatttccttccctttctgaattaaaaggaacaaaaaactgtctagtccttcattgttctgaaatgggcatgatggaagaaggcgggtctggtaggatagctgtgactgataatg

SEQ ID NO: 20497 - DNA, 4431 bp, Homo sapiens
  misc_feature 1..4431: note = ENST00000638572
  source 1..4431: mol_type = unassigned DNA
ctcgtgacgtcagaccccgcccacgcgcccctcctccgcatctgagcgggggagcggcggcccccagctgaatgggcgcgagagcggcgctgggggcgggtgggggcgcggggtaccgggctggcggccggccggcgccccctcattagtatgcggacgaaggcggcgggctgcgcggagcggcgtcccctgcagccgcggaccgaggcagcggcggcacctgccggccgagcaatgccaagtgagtacacctatgtgaaactgagaagtgattgctcgaggccttccctgcaatggtacacccgagctcaaagcaagatgagaaggcccagcttgttattaaaagacatcctcaaatgtacattgcttgtgtttggagtgtggatcctttatatcctcaagttaaattatactactgaagaatgtgacatgaaaaaaatgcattatgtggaccctgaccatgtaaagagagctcagaaatatgctcagcaagtcttgcagaaggaatgtcgtcccaagtttgccaagacatcaatggcgctgttatttgagcacaggtatagcgtggacttactcccttttgtgcagaaggcccccaaagacagtgaagctgagtccaagtacgatcctccttttgggttccggaagttctccagtaaagtccagaccctcttggaactcttgccagagcacgacctccctgaacacttgaaagccaagacctgtcggcgctgtgtggttattggaagcggaggaatactgcacggattagaactgggccacaccctgaaccagttcgatgttgtgataaggttaaacagtgcaccagttgagggatattcagaacatgttggaaataaaactactataaggatgacttatccagagggcgcaccactgtctgaccttgaatattattccaatgacttatttgttgctgttttatttaagagtgttgatttcaactggcttcaagcaatggtaaaaaaggaaaccctgccattctgggtacgactcttcttttggaagcaggtggcagaaaaaatcccactgcagccaaaacatttcaggattttgaatccagttatcatcaaagagactgcctttgacatccttcagtactcagagcctcagtcaaggttctggggccgagataagaacgtccccacaatcggtgtcattgccgttgtcttagccacacatctgtgcgatgaagtcagtttggcgggttttggatatgacctcaatcaacccagaacacctttgcactacttcgacagtcaatgcatggctgctatgaactttcagaccatgcataatgtgacaacggaaaccaagttcctcttaaagctggtcaaagagggagtggtgaaagatctcagtggaggcattgatcgtgaattttgaacacagaaaacctcagttgaaaatgcaactctaactctgagagctgtttttgacagccttcttgatgtatttctccatcctgcagatactttgaagtgcagctcatgtttttaacttttaatttaaaaacacaaaaaaaattttagctcttcccactttttttttcctatttatttgaggtcagtgtttgtttttgcacaccattttgtaaatgaaacttaagaattgaattggaaagacttctcaaagagaattgtatgtaacgatgttgtattgatttttaagaaagtaatttaatttgtaaaacttctgctcgtttacactgcacattgaatacaggtaactaattggaaggagaggggaggtcactcttttgatggtggccctgaacctcattctggttccctgctgcgctgcttggtgtgacccacggaggatccactcccaggatgacgtgctccgtagctctgctgctgatactgggtctgcgatgcagcggcgtgaggcctgggctggttggagaaggtcacaacccttctctgttggtctgccttctgctgaaagactcgagaaccaaccagggaagctgtcctggaggtccctggtcggagagggacatagaatctgtgacctctgacaactgtgaagccaccctgggctacagaaaccacagtcttcccagcaattattacaattcttgaattccttggggattttttactgccctttcaaagcacttaagtgttagatctaacgtgttccagtgtctgtctgaggtgacttaaaaaatcagaacaaaacttctattatccagagtcatgggagagtacaccctttccaggaataatgttttgggaaacactgaaatgaaatcttcccagtattataaattgtgtatttaaaaaaaagaaacttttctgaatgcctacctggcggtgtataccaggcagtgtgccagtttaaaaagatgaaaaagaataaaaacttttgaggaactctcgtagtctggttaatttgggtgcttatgtctatgaatctacccaaaacctccttcttggatgctgctgctaggcggagacctctctgtggatgccagtagtgagggacagagaattaaggcacctggtcctgcaagctgcttgagtccagacaactgtgaacccttctgaagagatgctgggtgtcggtggcttcctccccaaagacaggctgcccctagcttctgtctcttaatggctctagcctctgatatcagaagatctgctactctgttcccagcctgccccagactcggctgccgccatcgctgttctccactctgtggctgctcttgtcactaatgctacctgcctccactttcccttcctgcaactgcttgtgcagccccagtgcagccttggccccagcccattcgaacgtcttcccatctccctcctcctcaccatatgcagggccaggagtcaggtcatagcattcaaagcagagtcccttctgtctcctggggtctgggatccagctcagagtggccaggagagcaaaagtcatatttctctcgttttgtgtctttacagataattttgtatgaattttatttcctactctataagctactgcttgtttaagagaaaatgttttaagattatcacccatcaaatgagtttagaaaattgagactctggaagatggtccacagctcccttgtggctcaggtggtgctgggcttacaccacacagctccacccctacatccctcagggggttattggagaagccggaacttcctcagacaacgttcttaatgctacgagcgcctccttgctggtatgaggagacttgcctacctgcttctcaaggctgctgggatgtgtggtgctcaaagcttccacttggtcagcttgcagccattctcaggcctgctcccatccccatccctcctccctgtaaggcccttcttgcatccttaggttgctttgctcatgtctctcaacttttacttactcaggtggtaagcagataccctaaaaaggtatatttttgtagaccttttatagagtccaccagccaataggagttggctggagatcattctcaagaacttttcacactttggcattcatttgttggaagttgcatcttcacttcagagctgtgcccccattactcccccaccccacacacactcttctgaaaacagacctttgctaggtgcctctgggtgttctaaagttgatctccagtaactgagaattcactgccacactaacagctttgtattgcattctagacccgcacacacaccctccgacataaatgaaatcactggttctgaggcaacttaggaagacttacacatgttctgtattttaacatgcttctagaactttgagctgcagaaaatttcagttttagggttttttaattttaatttttgattgatacatagtgatgtgcatattttgagggtccatgtgataatgtaatacatttgtgtaattataaggagcaaatctgtgtaactgggatatctgtcacattaaatatttgtctttatggtagaaacatttgaattattctagtgattttgaaatacacagtaaattattgtaaactataggcattctactgacctatcaaacactaggtcttgtttcttttatcaaactgtatgtttgtacccattaatcaacctctcttcatttccccctacccttcttggcctctggtaactaccaatctactctctatcttcatgagatccacttttttagctcctacataggaatgagaacatgtgatatttgtctttctgtgtttggcttatttcacttaacatcacctccagttccatccatcttgctgcagataacatgatttcaacctttttatggcagaataatattccattgtgtatatataccacattttctttattcattcacccattgatggacacttaggttgatttcatgttttggctatgtgaatagcgctgcaataaatatgggagtatagatatatcttcaa

SEQ ID NO: 20498 - DNA, 6180 bp, Homo sapiens
  misc_feature 1..6180: note = ENST00000639867
  source 1..6180: mol_type = unassigned DNA
aaaaaaaagaaaaaaaaagaagaaaattaagtttgaaacctgaaattaacctcttggtgagaatggaaatggaatgaaatttcactcctttccagatgcagcttctgaagaggagacctggcagcctggcgagcatccagctcgctcacgcacctctttctagtcccgtggccatcagtgagcttctccgggtccctcttgccacttctcagatgttcctttctgtcctaggagatttgtaaaaccagatacttaggatatgattctctagtggagggttaggcctttaggtctctaaaaattgccattcatgaccttcgggcctagggttttgagatgaatgtgcagtgtgtgtggccgctctgtgtgtcccgcttccaccagcttggcattaagcacccggagcatcacctgctgggcaggcctggccaggggtgagcccctccattcgggggctcagggtcaaggcagattccttgcttggctttcctgctgatttcctcatgaagatgccaattcgtatttaaacatttgttatcaatggtggtgtttgtgtgctgatttctataggtagaggctgttgttttaggagccaggtttgctgggccagctcagacctcttacaaagtgaagatactaatgatcgtcttgcaaggtgccatagtgtcgtgagggtgaactgaggcagtggctatgcatggtgtctgcagcagcgtttctgaggctccaagaatatcagttcctttttcagaaatggggccagattcttcggatgtagacagtgttctcttcacggatgctaacaacttatcaaagctataatatattaagtatctctgttataataggatagatgcattcctaaaaaaatgtgttaagcaaaaatcagaaaatgaaaataaaaataacaaggccttgaggaaaagcatagttgggatgaacatttaaacctataccccagtaataatcctcataatgatactgacaaagttgaaaagatatgttgaattcctaataaatatcccagtaaatataggattacacacacacacacacacacacacacacacacacttctgcctgtgagaaggtagtgaataggaggagtaatgcagggccaattccaaggctgctaaatatggagacaaggataaaaaagcacaaagataggaagaactacctgacaggggttctgagtcagcatttgtccagctgagccaagaggaagactggggtgaatggacacgcataccatattcctccaaggttgcgtttttgttttttggggggttttttgtttgtttttttgttttttgagacagagtctcgctctgttgcccaggctggagtatagtggcacgatctcggctcactgcaagctctgcctcccgggttcacaccattctcctgcctcagcctcccgagtagctgggactacaggtgcccaccaccacgtgcccggctaatttttgtatttttagtagagacgagtttcaccgtattagccaggatggtcatgtttttgttcttgtttttgttttagagacagggtctccctctgtcacccaggctggagtgcagtggcacaatcacagctcactacagtgtcaaccttccaggttgaggatcactcgatactcatgcctcagcctcccatgtagctggggccacaggggcacaccaccactcctgacccattttttaaaaaattttttgtataggtggggtctcaccatgttgcccaggctagcctcgaactcctgggctcaagcaaccctctcaccttggcctcccaaagtgctgagattataggtgtgacccgccatgcccgcctttcctctgagttttgttgcattcacgcagctcctggctgaggcaaaacattaaaatgcatatggaaatgcaggctgggaaaatgctttgaaaccaatgcaatttctgtgttaaggggacattccctgattctttcaggtaatttgcattctagactgtgacattctgtatctcaactgataaataagcctgtttgtcatcctgctagatgagaacctgatatatgaaaccttttttttaatcgtggttaaaaaaaacataaaatttaccatcataattatttttaaatgtaccatttggcagcattaagtatatttaaactcttgtgaaacaaatttctagaatgttttcatcttgcaaaaccgaaacgctgtacctattaaacaactccccttttctccctctcttcaaccctggtaaccatgtttttatgaatttgactactttagatacctcatataagtcaggtcatacagtatttgtctctttgtgactggcttcacttagcataatgtcctcaaagtttaactatgttgtagcatgtatcagaattttatgaaacatgaagtcttagacaccccgaagtacattttcaccccaaatgtatttgaacagtgttaggctgggggtgggaggcgggagtccttcttgctttgcctgtgcaatgaaatgaataccctgctgtgtttatctccttgtcatgtgattctcccaggttgtttcttcaagtttctgagccaaacttaactctaaaaagcaaatattctgtgttaaaagacagtaatcaacacgggagctacatcagacatcataggacaaattgtcatctagaagagtatatttttaatgcaggagagtttttaaaacccagattggtgtgatttcattccagagagctcagaaatatgctcagcaagtcttgcagaaggaatgtcgtcccaagtttgccaagacatcaatggcgctgttatttgagcacaggtatagcgtggacttactcccttttgtgcagaaggcccccaaagacagtgaagctgagtccaagtacgatcctccttttgggttccggaagttctccagtaaagtccagaccctcttggaactcttgccagagcacgacctccctgaacacttgaaagccaagacctgtcggcgctgtgtggttattggaagcggaggaatactgcacggattagaactgggccacaccctgaaccagttcgatgttgtgataaggttaaacagtgcaccagttgagggatattcagaacatgttggaaataaaactactataaggatgacttatccagagggcgcaccactgtctgaccttgaatattattccaatgacttatttgttgctgttttatttaagagtgttgatttcaactggcttcaagcaatggtaaaaaaggaaaccctgccattctgggtacgactcttcttttggaagcaggtggcagaaaaaatcccactgcagccaaaacatttcaggattttgaatccagttatcatcaaagagactgcctttgacatccttcagtactcagagcctcagtcaaggttctggggccgagataagaacgtccccacaatcggtgtcattgccgttgtcttagccacacatctgtgcgatgaagtcagtttggcgggttttggatatgacctcaatcaacccagaacacctttgcactacttcgacagtcaatgcatggctgctatgaactttcagaccatgcataatgtgacaacggaaaccaagttcctcttaaagctggtcaaagagggagtggtgaaagatctcagtggaggcattgatcgtgaattttgaacacagaaaacctcagttgaaaatgcaactctaactctgagagctgtttttgacagccttcttgatgtatttctccatcctgcagatactttgaagtgcagctcatgtttttaacttttaatttaaaaacacaaaaaaaattttagctcttcccactttttttttcctatttatttgaggtcagtgtttgtttttgcacaccattttgtaaatgaaacttaagaattgaattggaaagacttctcaaagagaattgtatgtaacgatgttgtattgatttttaagaaagtaatttaatttgtaaaacttctgctcgtttacactgcacattgaatacaggtaactaattggaaggagaggggaggtcactcttttgatggtggccctgaacctcattctggttccctgctgcgctgcttggtgtgacccacggaggatccactcccaggatgacgtgctccgtagctctgctgctgatactgggtctgcgatgcagcggcgtgaggcctgggctggttggagaaggtcacaacccttctctgttggtctgccttctgctgaaagactcgagaaccaaccagggaagctgtcctggaggtccctggtcggagagggacatagaatctgtgacctctgacaactgtgaagccaccctgggctacagaaaccacagtcttcccagcaattattacaattcttgaattccttggggattttttactgccctttcaaagcacttaagtgttagatctaacgtgttccagtgtctgtctgaggtgacttaaaaaatcagaacaaaacttctattatccagagtcatgggagagtacaccctttccaggaataatgttttgggaaacactgaaatgaaatcttcccagtattataaattgtgtatttaaaaaaaagaaacttttctgaatgcctacctggcggtgtataccaggcagtgtgccagtttaaaaagatgaaaaagaataaaaacttttgaggaactctcgtagtctggttaatttgggtgcttatgtctatgaatctacccaaaacctccttcttggatgctgctgctaggcggagacctctctgtggatgccagtagtgagggacagagaattaaggcacctggtcctgcaagctgcttgagtccagacaactgtgaacccttctgaagagatgctgggtgtcggtggcttcctccccaaagacaggctgcccctagcttctgtctcttaatggctctagcctctgatatcagaagatctgctactctgttcccagcctgccccagactcggctgccgccatcgctgttctccactctgtggctgctcttgtcactaatgctacctgcctccactttcccttcctgcaactgcttgtgcagccccagtgcagccttggccccagcccattcgaacgtcttcccatctccctcctcctcaccatatgcagggccaggagtcaggtcatagcattcaaagcagagtcccttctgtctcctggggtctgggatccagctcagagtggccaggagagcaaaagtcatatttctctcgttttgtgtctttacagataattttgtatgaattttatttcctactctataagctactgcttgtttaagagaaaatgttttaagattatcacccatcaaatgagtttagaaaattgagactctggaagatggtccacagctcccttgtggctcaggtggtgctgggcttacaccacacagctccacccctacatccctcagggggttattggagaagccggaacttcctcagacaacgttcttaatgctacgagcgcctccttgctggtatgaggagacttgcctacctgcttctcaaggctgctgggatgtgtggtgctcaaagcttccacttggtcagcttgcagccattctcaggcctgctcccatccccatccctcctccctgtaaggcccttcttgcatccttaggttgctttgctcatgtctctcaacttttacttactcaggtggtaagcagataccctaaaaaggtatatttttgtagaccttttatagagtccaccagccaataggagttggctggagatcattctcaagaacttttcacactttggcattcatttgttggaagttgcatcttcacttcagagctgtgcccccattactcccccaccccacacacactcttctgaaaacagacctttgctaggtgcctctgggtgttctaaagttgatctccagtaactgagaattcactgccacactaacagctttgtattgcattctagacccgcacacacaccctccgacataaatgaaatcactggttctgaggcaacttaggaagacttacacatgttctgtattttaacatgcttctagaactttgagctgcagaaaatttcagttttagggttttttaattttaatttttgattgatacatagtgatgtgcatattttgagggtccatgtgataatgtaatacatttgtgtaattataaggagcaaatctgtgtaa

SEQ ID NO: 20499 - DNA, 3487 bp, Homo sapiens
  misc_feature 1..3487: note = ENST00000461206
  source 1..3487: mol_type = unassigned DNA
gtggcacgatctcggctcactgcaagctctgcctcccgggttcacaccattctcctgcctcagcctcccgagtagctgggactacaggtgcccaccaccacgtgcccggctaatttttgtatttttagtagagacgagtttcaccgtattagccaggatggtcatgtttttgttcttgtttttgttttagagacagggtctccctctgtcacccaggctggagtgcagtggcacaatcacagctcactacagtgtcaaccttccaggttgaggatcactcgatactcatgcctcagcctcccatgtagctggggccacaggggcacaccaccactcctgacccattttttaaaaaattttttgtataggtggggtctcaccatgttgcccaggctagcctcgaactcctgggctcaagcaaccctctcaccttggcctcccaaagtgctgagattataggtgtgacccgccatgcccgcctttcctctgagttttgttgcattcacgcagctcctggctgaggcaaaacattaaaatgcatatggaaatgcaggctgggaaaatgctttgaaaccaatgcaatttctgtgttaaggggacattccctgattctttcaggtaatttgcattctagactgtgacattctgtatctcaactgataaataagcctgtttgtcatcctgctagatgagaacctgatatatgaaaccttttttttaatcgtggttaaaaaaaacataaaatttaccatcataattatttttaaatgtaccatttggcagcattaagtatatttaaactcttgtgaaacaaatttctagaatgttttcatcttgcaaaaccgaaacgctgtacctattaaacaactccccttttctccctctcttcaaccctggtaaccatgtttttatgaatttgactactttagatacctcatataagtcaggtcatacagtatttgtctctttgtgactggcttcacttagcataatgtcctcaaagtttaactatgttgtagcatgtatcagaattttatgaaacatgaagtcttagacaccccgaagtacattttcaccccaaatgtatttgaacagtgttaggctgggggtgggaggcgggagtccttcttgctttgcctgtgcaatgaaatgaataccctgctgtgtttatctccttgtcatgtgattctcccaggttgtttcttcaagtttctgagccaaacttaactctaaaaagcaaatattctgtgttaaaagacagtaatcaacacgggagctacatcagacatcataggacaaattgtcatctagaagagtatatttttaatgcaggagagtttttaaaacccagattggtgtgatttcattccagagagctcagaaatatgctcagcaagtcttgcagaaggaatgtcgtcccaagtttgccaagacatcaatggcgctgttatttgagcacaggtatagcgtggacttactcccttttgtgcagaaggcccccaaagacagtgaagctgagtccaagtacgatcctccttttgggttccggaagttctccagtaaagtccagaccctcttggaactcttgccagagcacgacctccctgaacacttgaaagccaagacctgtcggcgctgtgtggttattggaagcggaggaatactgcacggattagaactgggccacaccctgaaccagttcgatgttgtgataagaactcagtgcactgctcttggtcagtgtggctccaggaacagtgagggacacaggaagctcttcacagtccctgcccacaagggacttaacgtttgagaagttgaaacaaaaacacaaaatggttggatgctccaaactgtcatactgaccctaagttggaggagcatgctgctggctacagttaaacagtgcaccagttgagggatattcagaacatgttggaaataaaactactataaggatgacttatccagagggcgcaccactgtctgaccttgaatattattccaatgacttatttgttgctgttttatttaagagtgttgatttcaactggcttcaagcaatggtaaaaaaggaaaccctgccattctgggtacgactcttcttttggaagcaggtggcagaaaaaatcccactgcagccaaaacatttcaggattttgaatccagttatcatcaaagagactgcctttgacatccttcagtactcagagcctcagtcaaggttctggggccgagataagaacgtccccacaatcggtgtcattgccgttgtcttagccacacatctgtgcgatgaagtcagtttggcgggttttggatatgacctcaatcaacccagaacacctttgcactacttcgacagtcaatgcatggctgctatgaactttcagaccatgcataatgtgacaacggaaaccaagttcctcttaaagctggtcaaagagggagtggtgaaagatctcagtggaggcattgatcgtgaattttgaacacagaaaacctcagttgaaaatgcaactctaactctgagagctgtttttgacagccttcttgatgtatttctccatcctgcagatactttgaagtgcagctcatgtttttaacttttaatttaaaaacacaaaaaaaattttagctcttcccactttttttttcctatttatttgaggtcagtgtttgtttttgcacaccattttgtaaatgaaacttaagaattgaattggaaagacttctcaaagagaattgtatgtaacgatgttgtattgatttttaagaaagtaatttaatttgtaaaacttctgctcgtttacactgcacattgaatacaggtaactaattggaaggagaggggaggtcactcttttgatggtggccctgaacctcattctggttccctgctgcgctgcttggtgtgacccacggaggatccactcccaggatgacgtgctccgtagctctgctgctgatactgggtctgcgatgcagcggcgtgaggcctgggctggttggagaaggtcacaacccttctctgttggtctgccttctgctgaaagactcgagaaccaaccagggaagctgtcctggaggtccctggtcggagagggacatagaatctgtgacctctgacaactgtgaagccaccctgggctacagaaaccacagtcttcccagcaattattacaattcttgaattccttggggattttttactgccctttcaaagcacttaagtgttagatctaacgtgttccagtgtctgtctgaggtgacttaaaaaatcagaacaaaacttctattatccagagtcatgggagagtacaccctttccaggaataatgttttgggaaacactgaaatgaaatcttcccagtattataaattgtgtatttaaaaaaaagaaacttttctgaatgcctacctggcggtgtataccaggcagtgtgccagtttaaaaagatgaaaaagaataaaaacttttgaggaa

SEQ ID NO: 20500 - DNA, 2407 bp, Homo sapiens
  misc_feature 1..2407: note = ENST00000640378
  source 1..2407: mol_type = unassigned DNA
gaagaatgtgacatgaaaaaaatgcattatgtggaccctgaccatgtaaagacctacaccgtgcctttaaaggaagcagggccctccctgctgaagcattcagtgagcccaggcaccagcatcttcaaaccgagtcttttctctccttagtgctgctccccgctttccaggccttcctgggatatcttagagctcctgaaggtgcggcactcgccttgaggcactttcttctgagctgtgagctatgggcaagcagtggagggggaagagagcagctgaagcagatgccggttcaacttacttaaagatgtgggacaagctctgaggaagcccccaagacaatgatgtctggttgtgcaccattgaagcaagaacagaaaccatcccagagtggaggacatggcccatgtggtcctcctgttctgagtggctatgagatggagttctgtgtgagctctctacagaaaaagccctgtctccaggcaatcagtggagatctgttaaacgagttgaaacaaaagaggacaaggaattgctgtggctttagacgttgccaggacatgtagaaactcactcaggatttactactgcatccactgtcacttaggcgcaggaggggtcacagtcagaagagagctcagaaatatgctcagcaagtcttgcagaaggaatgtcgtcccaagtttgccaagacatcaatggcgctgttatttgagcacaggtatagcgtggacttactcccttttgtgcagaaggcccccaaagacagtgaagctgagtccaagtacgatcctccttttgggttccggaagttctccagtaaagtccagaccctcttggaactcttgccagagcacgacctccctgaacacttgaaagccaagacctgtcggcgctgtgtggttattggaagcggaggaatactgcacggattagaactgggccacaccctgaaccagttcgatgttgtgataaggttaaacagtgcaccagttgagggatattcagaacatgttggaaataaaactactataaggatgacttatccagagggcgcaccactgtctgaccttgaatattattccaatgacttatttgttgctgttttatttaagagtgttgatttcaactggcttcaagcaatggtaaaaaaggaaaccctgaacgtccccacaatcggtgtcattgccgttgtcttagccacacatctgtgcgatgaagtcagtttggcgggttttggatatgacctcaatcaacccagaacacctttgcactacttcgacagtcaatgcatggctgctatgaactttcagaccatgcataatgtgacaacggaaaccaagttcctcttaaagctggtcaaagagggagtggtgaaagatctcagtggaggcattgatcgtgaattttgaacacagaaaacctcagttgaaaatgcaactctaactctgagagctgtttttgacagccttcttgatgtatttctccatcctgcagatactttgaagtgcagctcatgtttttaacttttaatttaaaaacacaaaaaaaattttagctcttcccactttttttttcctatttatttgaggtcagtgtttgtttttgcacaccattttgtaaatgaaacttaagaattgaattggaaagacttctcaaagagaattgtatgtaacgatgttgtattgatttttaagaaagtaatttaatttgtaaaacttctgctcgtttacactgcacattgaatacaggtaactaattggaaggagaggggaggtcactcttttgatggtggccctgaacctcattctggttccctgctgcgctgcttggtgtgacccacggaggatccactcccaggatgacgtgctccgtagctctgctgctgatactgggtctgcgatgcagcggcgtgaggcctgggctggttggagaaggtcacaacccttctctgttggtctgccttctgctgaaagactcgagaaccaaccagggaagctgtcctggaggtccctggtcggagagggacatagaatctgtgacctctgacaactgtgaagccaccctgggctacagaaaccacagtcttcccagcaattattacaattcttgaattccttggggattttttactgccctttcaaagcacttaagtgttagatctaacgtgttccagtgtctgtctgaggtgacttaaaaaatcagaacaaaacttctattatccagagtcatgggagagtacaccctttccaggaataatgttttgggaaacactgaaatgaaatcttcccagtattataaattgtgtatttaaaaaaaagaaacttttctgaatgcctacctggcggtgtataccaggcagtgtgccagtttaaaaagatgaaaaagaataaaaacttttgaggaa

SEQ ID NO: 20501 - DNA, 2236 bp, Homo sapiens
  misc_feature 1..2236: note = ENST00000393808
  source 1..2236: mol_type = unassigned DNA
ctggggagtaatagcatgggcaaccattatcctgtctcgccgccacccaggacatggcttctgttccaatgccaagtgagtacacctatgtgaaactgagaagtgattgctcgaggccttccctgcaatggtacacccgagctcaaagcaagatgagaaggcccagcttgttattaaaagacatcctcaaatgtacattgcttgtgtttggagtgtggatcctttatatcctcaagttaaattatactactgaagaatgtgacatgaaaaaaatgcattatgtggaccctgaccatgtaaagagagctcagaaatatgctcagcaagtcttgcagaaggaatgtcgtcccaagtttgccaagacatcaatggcgctgttatttgagcacaggtatagcgtggacttactcccttttgtgcagaaggcccccaaagacagtgaagctgagtccaagtacgatcctccttttgggttccggaagttctccagtaaagtccagaccctcttggaactcttgccagagcacgacctccctgaacacttgaaagccaagacctgtcggcgctgtgtggttattggaagcggaggaatactgcacggattagaactgggccacaccctgaaccagttcgatgttgtgataaggttaaacagtgcaccagttgagggatattcagaacatgttggaaataaaactactataaggatgacttatccagagggcgcaccactgtctgaccttgaatattattccaatgacttatttgttgctgttttatttaagagtgttgatttcaactggcttcaagcaatggtaaaaaaggaaaccctgccattctgggtacgactcttcttttggaagcaggtggcagaaaaaatcccactgcagccaaaacatttcaggattttgaatccagttatcatcaaagagactgcctttgacatccttcagtactcagagcctcagtcaaggttctggggccgagataagaacgtccccacaatcggtgtcattgccgttgtcttagccacacatctgtgcgatgaagtcagtttggcgggttttggatatgacctcaatcaacccagaacacctttgcactacttcgacagtcaatgcatggctgctatgaactttcagaccatgcataatgtgacaacggaaaccaagttcctcttaaagctggtcaaagagggagtggtgaaagatctcagtggaggcattgatcgtgaattttgaacacagaaaacctcagttgaaaatgcaactctaactctgagagctgtttttgacagccttcttgatgtatttctccatcctgcagatactttgaagtgcagctcatgtttttaacttttaatttaaaaacacaaaaaaaattttagctcttcccactttttttttcctatttatttgaggtcagtgtttgtttttgcacaccattttgtaaatgaaacttaagaattgaattggaaagacttctcaaagagaattgtatgtaacgatgttgtattgatttttaagaaagtaatttaatttgtaaaacttctgctcgtttacactgcacattgaatacaggtaactaattggaaggagaggggaggtcactcttttgatggtggccctgaacctcattctggttccctgctgcgctgcttggtgtgacccacggaggatccactcccaggatgacgtgctccgtagctctgctgctgatactgggtctgcgatgcagcggcgtgaggcctgggctggttggagaaggtcacaacccttctctgttggtctgccttctgctgaaagactcgagaaccaaccagggaagctgtcctggaggtccctggtcggagagggacatagaatctgtgacctctgacaactgtgaagccaccctgggctacagaaaccacagtcttcccagcaattattacaattcttgaattccttggggattttttactgccctttcaaagcacttaagtgttagatctaacgtgttccagtgtctgtctgaggtgacttaaaaaatcagaacaaaacttctattatccagagtcatgggagagtacaccctttccaggaataatgttttgggaaacactgaaatgaaatcttcccagtattataaattgtgtatttaaaaaaaagaaacttttctgaatgcctacctggcggtgtataccaggcagtgtgccagtttaaaaagatgaaaaagaataaaaacttttgaggaa

SEQ ID NO: 20502 - DNA, 2344 bp, Homo sapiens
  misc_feature 1..2344: note = ENST00000393805
  source 1..2344: mol_type = unassigned DNA
gtcacttggagaaggagagattcatacgaactgcgagagcatataaccagcatgtcttgagtcttttacccatgtgcctgttatatggatgctgctgtttttgtaagatgaaatgacccttggatattctgggttatgatcagcatttcttcgtctaggcgagaaaagaaacagcaatgccaagtgagtacacctatgtgaaactgagaagtgattgctcgaggccttccctgcaatggtacacccgagctcaaagcaagatgagaaggcccagcttgttattaaaagacatcctcaaatgtacattgcttgtgtttggagtgtggatcctttatatcctcaagttaaattatactactgaagaatgtgacatgaaaaaaatgcattatgtggaccctgaccatgtaaagagagctcagaaatatgctcagcaagtcttgcagaaggaatgtcgtcccaagtttgccaagacatcaatggcgctgttatttgagcacaggtatagcgtggacttactcccttttgtgcagaaggcccccaaagacagtgaagctgagtccaagtacgatcctccttttgggttccggaagttctccagtaaagtccagaccctcttggaactcttgccagagcacgacctccctgaacacttgaaagccaagacctgtcggcgctgtgtggttattggaagcggaggaatactgcacggattagaactgggccacaccctgaaccagttcgatgttgtgataaggttaaacagtgcaccagttgagggatattcagaacatgttggaaataaaactactataaggatgacttatccagagggcgcaccactgtctgaccttgaatattattccaatgacttatttgttgctgttttatttaagagtgttgatttcaactggcttcaagcaatggtaaaaaaggaaaccctgccattctgggtacgactcttcttttggaagcaggtggcagaaaaaatcccactgcagccaaaacatttcaggattttgaatccagttatcatcaaagagactgcctttgacatccttcagtactcagagcctcagtcaaggttctggggccgagataagaacgtccccacaatcggtgtcattgccgttgtcttagccacacatctgtgcgatgaagtcagtttggcgggttttggatatgacctcaatcaacccagaacacctttgcactacttcgacagtcaatgcatggctgctatgaactttcagaccatgcataatgtgacaacggaaaccaagttcctcttaaagctggtcaaagagggagtggtgaaagatctcagtggaggcattgatcgtgaattttgaacacagaaaacctcagttgaaaatgcaactctaactctgagagctgtttttgacagccttcttgatgtatttctccatcctgcagatactttgaagtgcagctcatgtttttaacttttaatttaaaaacacaaaaaaaattttagctcttcccactttttttttcctatttatttgaggtcagtgtttgtttttgcacaccattttgtaaatgaaacttaagaattgaattggaaagacttctcaaagagaattgtatgtaacgatgttgtattgatttttaagaaagtaatttaatttgtaaaacttctgctcgtttacactgcacattgaatacaggtaactaattggaaggagaggggaggtcactcttttgatggtggccctgaacctcattctggttccctgctgcgctgcttggtgtgacccacggaggatccactcccaggatgacgtgctccgtagctctgctgctgatactgggtctgcgatgcagcggcgtgaggcctgggctggttggagaaggtcacaacccttctctgttggtctgccttctgctgaaagactcgagaaccaaccagggaagctgtcctggaggtccctggtcggagagggacatagaatctgtgacctctgacaactgtgaagccaccctgggctacagaaaccacagtcttcccagcaattattacaattcttgaattccttggggattttttactgccctttcaaagcacttaagtgttagatctaacgtgttccagtgtctgtctgaggtgacttaaaaaatcagaacaaaacttctattatccagagtcatgggagagtacaccctttccaggaataatgttttgggaaacactgaaatgaaatcttcccagtattataaattgtgtatttaaaaaaaagaaacttttctgaatgcctacctggcggtgtataccaggcagtgtgccagtttaaaaagatgaaaaagaataaaaacttttgaggaa

SEQ ID NO: 20503 - DNA, 2368 bp, Homo sapiens
  misc_feature 1..2368: note = ENST00000640322
  source 1..2368: mol_type = unassigned DNA
tttgagaggaagagatgtagggggctttgcacctttgccagacaggactcctgatcaaaggacagcggtgaaacacagggcagcagacagagcctgtgttctgttggctacagctgtgctccagcccccgagggcctgcggaagagacaacgtctcagggggaccagacagaagtccaacataaaaagacaatgcttcacaatgccaagtgagtacacctatgtgaaactgagaagtgattgctcgaggccttccctgcaatggtacacccgagctcaaagcaagatgagaaggcccagcttgttattaaaagacatcctcaaatgtacattgcttgtgtttggagtgtggatcctttatatcctcaagttaaattatactactgaagaatgtgacatgaaaaaaatgcattatgtggaccctgaccatgtaaagagagctcagaaatatgctcagcaagtcttgcagaaggaatgtcgtcccaagtttgccaagacatcaatggcgctgttatttgagcacaggtatagcgtggacttactcccttttgtgcagaaggcccccaaagacagtgaagctgagtccaagtacgatcctccttttgggttccggaagttctccagtaaagtccagaccctcttggaactcttgccagagcacgacctccctgaacacttgaaagccaagacctgtcggcgctgtgtggttattggaagcggaggaatactgcacggattagaactgggccacaccctgaaccagttcgatgttgtgataaggttaaacagtgcaccagttgagggatattcagaacatgttggaaataaaactactataaggatgacttatccagagggcgcaccactgtctgaccttgaatattattccaatgacttatttgttgctgttttatttaagagtgttgatttcaactggcttcaagcaatggtaaaaaaggaaaccctgccattctgggtacgactcttcttttggaagcaggtggcagaaaaaatcccactgcagccaaaacatttcaggattttgaatccagttatcatcaaagagactgcctttgacatccttcagtactcagagcctcagtcaaggttctggggccgagataagaacgtccccacaatcggtgtcattgccgttgtcttagccacacatctgtgcgatgaagtcagtttggcgggttttggatatgacctcaatcaacccagaacacctttgcactacttcgacagtcaatgcatggctgctatgaactttcagaccatgcataatgtgacaacggaaaccaagttcctcttaaagctggtcaaagagggagtggtgaaagatctcagtggaggcattgatcgtgaattttgaacacagaaaacctcagttgaaaatgcaactctaactctgagagctgtttttgacagccttcttgatgtatttctccatcctgcagatactttgaagtgcagctcatgtttttaacttttaatttaaaaacacaaaaaaaattttagctcttcccactttttttttcctatttatttgaggtcagtgtttgtttttgcacaccattttgtaaatgaaacttaagaattgaattggaaagacttctcaaagagaattgtatgtaacgatgttgtattgatttttaagaaagtaatttaatttgtaaaacttctgctcgtttacactgcacattgaatacaggtaactaattggaaggagaggggaggtcactcttttgatggtggccctgaacctcattctggttccctgctgcgctgcttggtgtgacccacggaggatccactcccaggatgacgtgctccgtagctctgctgctgatactgggtctgcgatgcagcggcgtgaggcctgggctggttggagaaggtcacaacccttctctgttggtctgccttctgctgaaagactcgagaaccaaccagggaagctgtcctggaggtccctggtcggagagggacatagaatctgtgacctctgacaactgtgaagccaccctgggctacagaaaccacagtcttcccagcaattattacaattcttgaattccttggggattttttactgccctttcaaagcacttaagtgttagatctaacgtgttccagtgtctgtctgaggtgacttaaaaaatcagaacaaaacttctattatccagagtcatgggagagtacaccctttccaggaataatgttttgggaaacactgaaatgaaatcttcccagtattataaattgtgtatttaaaaaaaagaaacttttctgaatgcctacctggcggtgtataccaggcagtgtgccagtttaaaaagatgaaaaagaataaaaacttttgagga

SEQ ID NO: 20504 - DNA, 4598 bp, Homo sapiens
  misc_feature 1..4598: note = ENST00000640712
  source 1..4598: mol_type = unassigned DNA
gttttcttctagtatgtttataacatactacctcttacatttaggtctttgattcgttttgcattaatttttgtatatggtatattagtccattttcactactgataaagacatacctaagactgggcaatttacagaagaggtttaattgtagttacaactccacatggcaggggaagcctcacaatcatggcagaaggcaaggaggagcaagtcacgtcttacatgaatggcagcaggcaaaagagagaaactgtgcagggaaactcccatttttaaaaccatcagatctcatgagacccattcactaccacaagaacggcacaggaaagacctgcccccatgattcagtcatctaccactgggtccttcccacaacacatgggaattatgggagctaccagatgagatttgggtggggacaaagagtcaaaccatatcagtgtgaggtcagggtccaaggtcatccttttgcatgttgttctccagttgtcccaggaccatttgttgaaaagaactttcctctatttgctgcattctttctttctttgctgcctagagcctttccctgcccttcgcccttctgttactcgtattttaagtcaagtctcagctcagcggttaccccttctaagaggctatccctgatcgtccctctgtgtgtgtgagagagccccctcatgccttaatcctgatgtttatcattgtaggatttcagctgttcatcttccccacttgttttccaggccaggtcttgggagacaggggctgtgtgcttaacatcttacattacttaatatgcacttacatatattcaacttcagggggaaggggagatagtacttgaatcacagtgtaatcttccattacctgtgaactctagattgtacagaaaatccggttataacttgtaattctttgagtacatcagtaatgcaccttaggtttaatgtgaggaacaggactgatagttctcttcaacctaaacatccactggtagacagggaaaagcccagcacccgctccctgccccttctccctgaaccatggaatgtaagtcctttcattaggctactgggccaatttttagacctaagctcatggctggaccaatagtagccttcatagatgccaatgcccttccttgatgggcttcagtgaggactcctgaccaatcactgacgaggggggttgggaggacttctgatgggggagttggcctccctggtcctacacctacctgcctggagaaggagccaaagccacttaagcaaaactgagcagcagcccacagtgtccatctaccatgtcaccccagtgctgagcgatttctaaaaggttacttttttcaattatttaaaaaaaacaccaaaaattcaagtaatacggaaataagtaaaggagaaagtcccctgtaatttttcatagagaaagaggaaggaatggggggcagctgtgtaagtcaaacatgtttgtaaaactccgtgagtttgaaactagtaaaatagaaagtgaaagcctgctataattatggtggaattgagggtgtcttattgtgttactagagaatttttttaagtaggtttttaacattttgaccttgttaaaatgctccacttttcaaaacggtcctgacaggatatcctgcttccttccacgcagaagaggtggtttgtgcagaagtgcaggcctcagaatgctttgcacatgagaggaatggcaagagttgcctatcactgaggatttggggaggagggatcacaggatatgggactgaaaatgagacagggccagatagcaaaaggccttgaatgctacactaagcacgaagcagctccttaatttgtgcatcactgaagcaagaatagagtggaggacatggcccgtgtggtcctcgtgttctgagtggctatgacatggagttctgtgtgagctctccatgaagaaaatcccgtctccaggcagtcagtggagatttgatccttaccacaagagcacgtggacaaatttgaattatcgtggatgtatatgggcagaagaaggtctcagagccataagggtggggccctgttagctctgttggttccactcagcagcccacagtgtgagtgggaccctgccagccctgctagacttgagcattgtctggtgacgctggtccccgccttcattactgcagcagaggaagtgtggctgtggcagttgtgggttttgtattttctatttaaatatgtcccttaatgtgccagttgttaaaaagactaccagtgggctctgaagggatgcctggacactttgaaagtgtggttcagatgtgaaattgcactcaaaagatgttttaagagagacgagggcacgttgatgtcagtttcggtttgggctgtgtagtagcagcattttgaacttggccctctctcctttctgagagctaaagaccttatctccctgcggatggcattgcgtgcagttaattatggccagatggactcagccgcttcttcatcgtcttctctcggactctgcagacctacaccgtgcctttaaaggaagcagggccctccctgctgaagcattcagtgagcccaggcaccagcatcttcaaaccgagtcttttctctccttagtgctgctccccgctttccaggccttcctgggatatcttagagagagctcagaaatatgctcagcaagtcttgcagaaggaatgtcgtcccaagtttgccaagacatcaatggcgctgttatttgagcacaggtatagcgtggacttactcccttttgtgcagaaggcccccaaagacagtgaagctgagtccaagtacgatcctccttttgggttccggaagttctccagtaaagtccagaccctcttggaactcttgccagagcacgacctccctgaacacttgaaagccaagacctgtcggcgctgtgtggttattggaagcggaggaatactgcacggattagaactgggccacaccctgaaccagttcgatgttgtgataaggttaaacagtgcaccagttgagggatattcagaacatgttggaaataaaactactataaggatgacttatccagagggcgcaccactgtctgaccttgaatattattccaatgacttatttgttgctgttttatttaagagtgttgatttcaactggcttcaagcaatggtaaaaaaggaaaccctgccattctgggtacgactcttcttttggaagcaggtggcagaaaaaatcccactgcagccaaaacatttcaggattttgaatccagttatcatcaaagagactgcctttgacatccttcagtactcagagcctcagtcaaggttctggggccgagataagaacgtccccacaatcggtgtcattgccgttgtcttagccacacatctgtgcgatgaagtcagtttggcgggttttggatatgacctcaatcaacccagaacacctttgcactacttcgacagtcaatgcatggctgctatgaactttcagaccatgcataatgtgacaacggaaaccaagttcctcttaaagctggtcaaagagggagtggtgaaagatctcagtggaggcattgatcgtgaattttgaacacagaaaacctcagttgaaaatgcaactctaactctgagagctgtttttgacagccttcttgatgtatttctccatcctgcagatactttgaagtgcagctcatgtttttaacttttaatttaaaaacacaaaaaaaattttagctcttcccactttttttttcctatttatttgaggtcagtgtttgtttttgcacaccattttgtaaatgaaacttaagaattgaattggaaagacttctcaaagagaattgtatgtaacgatgttgtattgatttttaagaaagtaatttaatttgtaaaacttctgctcgtttacactgcacattgaatacaggtaactaattggaaggagaggggaggtcactcttttgatggtggccctgaacctcattctggttccctgctgcgctgcttggtgtgacccacggaggatccactcccaggatgacgtgctccgtagctctgctgctgatactgggtctgcgatgcagcggcgtgaggcctgggctggttggagaaggtcacaacccttctctgttggtctgccttctgctgaaagactcgagaaccaaccagggaagctgtcctggaggtccctggtcggagagggacatagaatctgtgacctctgacaactgtgaagccaccctgggctacagaaaccacagtcttcccagcaattattacaattcttgaattccttggggattttttactgccctttcaaagcacttaagtgttagatctaacgtgttccagtgtctgtctgaggtgacttaaaaaatcagaacaaaacttctattatccagagtcatgggagagtacaccctttccaggaataatgttttgggaaacactgaaatgaaatcttcccagtattataaattgtgtatttaaaaaaaagaaacttttctgaatgcctacctggcggtgtataccaggcagtgtgccagtttaaaaagatgaaaaagaataaaaacttttgagg

SEQ ID NO: 20505 - DNA, 2298 bp, Homo sapiens
  misc_feature 1..2298: note = ENST00000638659
  source 1..2298: mol_type = unassigned DNA
tgcggacgaaggcggcgggctgcgcggagcggcgtcccctgcagccgcggaccgaggcagcggcggcacctgccggccgaggcactgtgaagacagtggtgtgcaaagcagagacccctgcttgcatggaatctgcattctagtgggggagacaagacaaacgtgtaattcaaaagtaaaaaacttatgaagaatcacatgtctcatgattagtgttataaagaaaaaagaaagcatgcatacaggaatatccacataagcaattttgcaatgccaagtgagtacacctatgtgaaactgagaagtgattgctcgaggccttccctgcaatggtacacccgagctcaaagcaagatgagaaggcccagcttgttattaaaagacatcctcaaatgtacattgcttgtgtttggagtgtggatcctttatatcctcaagttaaattatactactgaagaatgtgacatgaaaaaaatgcattatgtggaccctgaccatgtaaagaaggcccccaaagacagtgaagctgagtccaagtacgatcctccttttgggttccggaagttctccagtaaagtccagaccctcttggaactcttgccagagcacgacctccctgaacacttgaaagccaagacctgtcggcgctgtgtggttattggaagcggaggaatactgcacggattagaactgggccacaccctgaaccagttcgatgttgtgataaggttaaacagtgcaccagttgagggatattcagaacatgttggaaataaaactactataaggatgacttatccagagggcgcaccactgtctgaccttgaatattattccaatgacttatttgttgctgttttatttaagagtgttgatttcaactggcttcaagcaatggtaaaaaaggaaaccctgccattctgggtacgactcttcttttggaagcaggtggcagaaaaaatcccactgcagccaaaacatttcaggattttgaatccagttatcatcaaagagactgcctttgacatccttcagtactcagagcctcagtcaaggttctggggccgagataagaacgtccccacaatcggtgtcattgccgttgtcttagccacacatctgtgcgatgaagtcagtttggcgggttttggatatgacctcaatcaacccagaacacctttgcactacttcgacagtcaatgcatggctgctatgaactttcagaccatgcataatgtgacaacggaaaccaagttcctcttaaagctggtcaaagagggagtggtgaaagatctcagtggaggcattgatcgtgaattttgaacacagaaaacctcagttgaaaatgcaactctaactctgagagctgtttttgacagccttcttgatgtatttctccatcctgcagatactttgaagtgcagctcatgtttttaacttttaatttaaaaacacaaaaaaaattttagctcttcccactttttttttcctatttatttgaggtcagtgtttgtttttgcacaccattttgtaaatgaaacttaagaattgaattggaaagacttctcaaagagaattgtatgtaacgatgttgtattgatttttaagaaagtaatttaatttgtaaaacttctgctcgtttacactgcacattgaatacaggtaactaattggaaggagaggggaggtcactcttttgatggtggccctgaacctcattctggttccctgctgcgctgcttggtgtgacccacggaggatccactcccaggatgacgtgctccgtagctctgctgctgatactgggtctgcgatgcagcggcgtgaggcctgggctggttggagaaggtcacaacccttctctgttggtctgccttctgctgaaagactcgagaaccaaccagggaagctgtcctggaggtccctggtcggagagggacatagaatctgtgacctctgacaactgtgaagccaccctgggctacagaaaccacagtcttcccagcaattattacaattcttgaattccttggggattttttactgccctttcaaagcacttaagtgttagatctaacgtgttccagtgtctgtctgaggtgacttaaaaaatcagaacaaaacttctattatccagagtcatgggagagtacaccctttccaggaataatgttttgggaaacactgaaatgaaatcttcccagtattataaattgtgtatttaaaaaaaagaaacttttctgaatgcctacctggcggtgtataccaggcagtgtgccagtttaaaaagatgaaaaa

SEQ ID NO: 20506 - DNA, 2347 bp, Homo sapiens
  misc_feature 1..2347: note = ENST00000639311
  source 1..2347: mol_type = unassigned DNA
tatgcggacgaaggcggcgggctgcgcggagcggcgtcccctgcagccgcggaccgaggcagcggcggcacctgccggccgagcaatgccaagtgagtacacctatgtgaaactgagaagtgattgctcgaggccttccctgcaatggtacacccgagctcaaagcaagatgagaaggcccagcttgttattaaaagacatcctcaaatgtacattgcttgtgtttggagtgtggatcctttatatcctcaagttaaattatactactgaagaatgtgacatgaaaaaaatgcattatgtggaccctgaccatgtaaaggtctgagattctgtggttctcagcaatttgccagtgcctgactggaagatggaggctggtttcgtaacctggggctttcaaagttctgaattctgggtggagttgtctcaaacgagagctcagaaatatgctcagcaagtcttgcagaaggaatgtcgtcccaagtttgccaagacatcaatggcgctgttatttgagcacaggtatagcgtggacttactcccttttgtgcagaaggcccccaaagacagtgaagctgagtccaagtacgatcctccttttgggttccggaagttctccagtaaagtccagaccctcttggaactcttgccagagcacgacctccctgaacacttgaaagccaagacctgtcggcgctgtgtggttattggaagcggaggaatactgcacggattagaactgggccacaccctgaaccagttcgatgttgtgataaggttaaacagtgcaccagttgagggatattcagaacatgttggaaataaaactactataaggatgacttatccagagggcgcaccactgtctgaccttgaatattattccaatgacttatttgttgctgttttatttaagagtgttgatttcaactggcttcaagcaatggtaaaaaaggaaaccctgccattctgggtacgactcttcttttggaagcaggtggcagaaaaaatcccactgcagccaaaacatttcaggattttgaatccagttatcatcaaagagactgcctttgacatccttcagtactcagagcctcagtcaaggttctggggccgagataagaacgtccccacaatcggtgtcattgccgttgtcttagccacacatctgtgcgatgaagtcagtttggcgggttttggatatgacctcaatcaacccagaacacctttgcactacttcgacagtcaatgcatggctgctatgaactttcagaccatgcataatgtgacaacggaaaccaagttcctcttaaagctggtcaaagagggagtggtgaaagatctcagtggaggcattgatcgtgaattttgaacacagaaaacctcagttgaaaatgcaactctaactctgagagctgtttttgacagccttcttgatgtatttctccatcctgcagatactttgaagtgcagctcatgtttttaacttttaatttaaaaacacaaaaaaaattttagctcttcccactttttttttcctatttatttgaggtcagtgtttgtttttgcacaccattttgtaaatgaaacttaagaattgaattggaaagacttctcaaagagaattgtatgtaacgatgttgtattgatttttaagaaagtaatttaatttgtaaaacttctgctcgtttacactgcacattgaatacaggtaactaattggaaggagaggggaggtcactcttttgatggtggccctgaacctcattctggttccctgctgcgctgcttggtgtgacccacggaggatccactcccaggatgacgtgctccgtagctctgctgctgatactgggtctgcgatgcagcggcgtgaggcctgggctggttggagaaggtcacaacccttctctgttggtctgccttctgctgaaagactcgagaaccaaccagggaagctgtcctggaggtccctggtcggagagggacatagaatctgtgacctctgacaactgtgaagccaccctgggctacagaaaccacagtcttcccagcaattattacaattcttgaattccttggggattttttactgccctttcaaagcacttaagtgttagatctaacgtgttccagtgtctgtctgaggtgacttaaaaaatcagaacaaaacttctattatccagagtcatgggagagtacaccctttccaggaataatgttttgggaaacactgaaatgaaatcttcccagtattataaattgtgtatttaaaaaaaagaaacttttctgaatgcctacctggcggtgtataccaggcagtgtgccagtttaaaaagatgaaaaa

SEQ ID NO: 20507 - DNA, 2165 bp, Homo sapiens
  misc_feature 1..2165: note = ENST00000377332
  source 1..2165: mol_type = unassigned DNA
gggtgggggcgcggggtaccgggctggcggccggccggcgccccctcattagtatgcggacgaaggcggcgggctgcgcggagcggcgtcccctgcagccgcggaccgaggcagcggcggcacctgccggccgagcaatgccaagtgagtacacctatgtgaaactgagaagtgattgctcgaggccttccctgcaatggtacacccgagctcaaagcaagatgagaaggcccagcttgttattaaaagacatcctcaaatgtacattgcttgtgtttggagtgtggatcctttatatcctcaagttaaattatactactgaagaatgtgacatgaaaaaaatgcattatgtggaccctgaccatgtaaagaaggcccccaaagacagtgaagctgagtccaagtacgatcctccttttgggttccggaagttctccagtaaagtccagaccctcttggaactcttgccagagcacgacctccctgaacacttgaaagccaagacctgtcggcgctgtgtggttattggaagcggaggaatactgcacggattagaactgggccacaccctgaaccagttcgatgttgtgataaggttaaacagtgcaccagttgagggatattcagaacatgttggaaataaaactactataaggatgacttatccagagggcgcaccactgtctgaccttgaatattattccaatgacttatttgttgctgttttatttaagagtgttgatttcaactggcttcaagcaatggtaaaaaaggaaaccctgccattctgggtacgactcttcttttggaagcaggtggcagaaaaaatcccactgcagccaaaacatttcaggattttgaatccagttatcatcaaagagactgcctttgacatccttcagtactcagagcctcagtcaaggttctggggccgagataagaacgtccccacaatcggtgtcattgccgttgtcttagccacacatctgtgcgatgaagtcagtttggcgggttttggatatgacctcaatcaacccagaacacctttgcactacttcgacagtcaatgcatggctgctatgaactttcagaccatgcataatgtgacaacggaaaccaagttcctcttaaagctggtcaaagagggagtggtgaaagatctcagtggaggcattgatcgtgaattttgaacacagaaaacctcagttgaaaatgcaactctaactctgagagctgtttttgacagccttcttgatgtatttctccatcctgcagatactttgaagtgcagctcatgtttttaacttttaatttaaaaacacaaaaaaaattttagctcttcccactttttttttcctatttatttgaggtcagtgtttgtttttgcacaccattttgtaaatgaaacttaagaattgaattggaaagacttctcaaagagaattgtatgtaacgatgttgtattgatttttaagaaagtaatttaatttgtaaaacttctgctcgtttacactgcacattgaatacaggtaactaattggaaggagaggggaggtcactcttttgatggtggccctgaacctcattctggttccctgctgcgctgcttggtgtgacccacggaggatccactcccaggatgacgtgctccgtagctctgctgctgatactgggtctgcgatgcagcggcgtgaggcctgggctggttggagaaggtcacaacccttctctgttggtctgccttctgctgaaagactcgagaaccaaccagggaagctgtcctggaggtccctggtcggagagggacatagaatctgtgacctctgacaactgtgaagccaccctgggctacagaaaccacagtcttcccagcaattattacaattcttgaattccttggggattttttactgccctttcaaagcacttaagtgttagatctaacgtgttccagtgtctgtctgaggtgacttaaaaaatcagaacaaaacttctattatccagagtcatgggagagtacaccctttccaggaataatgttttgggaaacactgaaatgaaatcttcccagtattataaattgtgtatttaaaaaaaagaaacttttctgaatgcctacctggcggtgtataccaggcagtgtgccagtttaaaaagatgaaaaa

SEQ ID NO: 20508 - DNA, 2131 bp, Homo sapiens
  misc_feature 1..2131: note = ENST00000639119
  source 1..2131: mol_type = unassigned DNA
ggggcgggtgggggcgcggggtaccgggctggcggccggccggcgccccctcattagtatgcggacgaaggcggcgggctgcgcggagcggcgtcccctgcagccgcggaccgaggcagcggcggcacctgccggccgagcaatgccaagtgagtacacctatgtgaaactgagaagtgattgctcgaggccttccctgcaatggtacacccgagctcaaagcaagatgagaaggcccagcttgttattaaaagacatcctcaaatgtacattgcttgtgtttggagtgtggatcctttatatcctcaagttaaattatactactgaagaatgtgacatgaaaaaaatgcattatgtggaccctgaccatgtaaagagagctcagaaatatgctcagcaagtcttgcagaaggaatgtcgtcccaagtttgccaagacatcaatggcgctgttatttgagcacaggtatagcgtggacttactcccttttgtgcagaaggcccccaaagacagtgaagctgagtccaagtacgatcctccttttgggttccggaagttctccagtaaagtccagaccctcttggaactcttgccagagcacgacctccctgaacacttgaaagccaagacctgtcggcgctgtgtggttattggaagcggaggaatactgcacggattagaactgggccacaccctgaaccagttcgatgttgtgataaggttaaacagtgcaccagttgagggatattcagaacatgttggaaataaaactactataaggatgacttatccagagggcgcaccactgtctgaccttgaatattattccaatgacttatttgttgctgttttatttaagagtgttgatttcaactggcttcaagcaatggtaaaaaaggaaaccctgaacgtccccacaatcggtgtcattgccgttgtcttagccacacatctgtgcgatgaagtcagtttggcgggttttggatatgacctcaatcaacccagaacacctttgcactacttcgacagtcaatgcatggctgctatgaactttcagaccatgcataatgtgacaacggaaaccaagttcctcttaaagctggtcaaagagggagtggtgaaagatctcagtggaggcattgatcgtgaattttgaacacagaaaacctcagttgaaaatgcaactctaactctgagagctgtttttgacagccttcttgatgtatttctccatcctgcagatactttgaagtgcagctcatgtttttaacttttaatttaaaaacacaaaaaaaattttagctcttcccactttttttttcctatttatttgaggtcagtgtttgtttttgcacaccattttgtaaatgaaacttaagaattgaattggaaagacttctcaaagagaattgtatgtaacgatgttgtattgatttttaagaaagtaatttaatttgtaaaacttctgctcgtttacactgcacattgaatacaggtaactaattggaaggagaggggaggtcactcttttgatggtggccctgaacctcattctggttccctgctgcgctgcttggtgtgacccacggaggatccactcccaggatgacgtgctccgtagctctgctgctgatactgggtctgcgatgcagcggcgtgaggcctgggctggttggagaaggtcacaacccttctctgttggtctgccttctgctgaaagactcgagaaccaaccagggaagctgtcctggaggtccctggtcggagagggacatagaatctgtgacctctgacaactgtgaagccaccctgggctacagaaaccacagtcttcccagcaattattacaattcttgaattccttggggattttttactgccctttcaaagcacttaagtgttagatctaacgtgttccagtgtctgtctgaggtgacttaaaaaatcagaacaaaacttctattatccagagtcatgggagagtacaccctttccaggaataatgttttgggaaacactgaaatgaaatcttcccagtattataaattgtgtatttaaaaaaaagaaacttttctgaatgcctacctggcggtgtataccaggcagtgtgccagtttaaaaagatgaaaaa

SEQ ID NO: 20509 - DNA, 4594 bp, Homo sapiens
  misc_feature 1..4594: note = ENST00000640763
  source 1..4594: mol_type = unassigned DNA
gaaaaaaatgcattatgtggaccctgaccatgtaaagatgcagcttctgaagaggagacctggcagcctggcgagcatccagctcgctcacgcacctctttctagtcccgtggccatcagtgagcttctccgggtccctcttgccacttctcagatgttcctttctgtcctaggagatttgtaaaaccagatacttaggatatgattctctagtggagggttaggcctttaggtctctaaaaattgccattcatgaccttcgggcctagggttttgagatgaatgtgcagtgtgtgtggccgctctgtgtgtcccgcttccaccagcttggcattaagcacccggagcatcacctgctgggcaggcctggccaggggtgagcccctccattcgggggctcagggtcaaggcagattccttgcttggctttcctgctgatttcctcatgaagatgccaattcgtatttaaacatttgttatcaatggtggtgtttgtgtgctgatttctataggtagaggctgttgttttaggagccaggtttgctgggccagctcagacctcttacaaagtgaagatactaatgatcgtcttgcaaggtgccatagtgtcgtgagggtgaactgaggcagtggctatgcatggtgtctgcagcagcgtttctgaggctccaagaatatcagttcctttttcagaaatggggccagattcttcggatgtagacagtgttctcttcacggatgctaacaacttatcaaagctataatatattaagtatctctgttataataggatagatgcattcctaaaaaaatgtgttaagcaaaaatcagaaaatgaaaataaaaataacaaggccttgaggaaaagcatagttgggatgaacatttaaacctataccccagtaataatcctcataatgatactgacaaagttgaaaagatatgttgaattcctaataaatatcccagtaaatataggattacacacacacacacacacacacacacacacacacttctgcctgtgagaaggtagtgaataggaggagtaatgcagggccaattccaaggctgctaaatatggagacaaggataaaaaagcacaaagataggaagaactacctgacaggggttctgagtcagcatttgtccagctgagccaagaggaagactggggtgaatggacacgcataccatattcctccaaggttgcgtttttgttttttggggggttttttgtttgtttttttgttttttgagacagagtctcgctctgttgcccaggctggagtatagtggcacgatctcggctcactgcaagctctgcctcccgggttcacaccattctcctgcctcagcctcccgagtagctgggactacaggtgcccaccaccacgtgcccggctaatttttgtatttttagtagagacgagtttcaccgtattagccaggatggtcatgtttttgttcttgtttttgttttagagacagggtctccctctgtcacccaggctggagtgcagtggcacaatcacagctcactacagtgtcaaccttccaggttgaggatcactcgatactcatgcctcagcctcccatgtagctggggccacaggggcacaccaccactcctgacccattttttaaaaaattttttgtataggtggggtctcaccatgttgcccaggctagcctcgaactcctgggctcaagcaaccctctcaccttggcctcccaaagtgctgagattataggtgtgacccgccatgcccgcctttcctctgagttttgttgcattcacgcagctcctggctgaggcaaaacattaaaatgcatatggaaatgcaggctgggaaaatgctttgaaaccaatgcaatttctgtgttaaggggacattccctgattctttcaggtaatttgcattctagactgtgacattctgtatctcaactgataaataagcctgtttgtcatcctgctagatgagaacctgatatatgaaaccttttttttaatcgtggttaaaaaaaacataaaatttaccatcataattatttttaaatgtaccatttggcagcattaagtatatttaaactcttgtgaaacaaatttctagaatgttttcatcttgcaaaaccgaaacgctgtacctattaaacaactccccttttctccctctcttcaaccctggtaaccatgtttttatgaatttgactactttagatacctcatataagtcaggtcatacagtatttgtctctttgtgactggcttcacttagcataatgtcctcaaagtttaactatgttgtagcatgtatcagaattttatgaaacatgaagtcttagacaccccgaagtacattttcaccccaaatgtatttgaacagtgttaggctgggggtgggaggcgggagtccttcttgctttgcctgtgcaatgaaatgaataccctgctgtgtttatctccttgtcatgtgattctcccaggttgtttcttcaagtttctgagccaaacttaactctaaaaagcaaatattctgtgttaaaagacagtaatcaacacgggagctacatcagacatcataggacaaattgtcatctagaagagtatatttttaatgcaggagagtttttaaaacccagattggtgtgatttcattccagagagctcagaaatatgctcagcaagtcttgcagaaggaatgtcgtcccaagtttgccaagacatcaatggcgctgttatttgagcacaggtatagcgtggacttactcccttttgtgcagaaggcccccaaagacagtgaagctgagtccaagtacgatcctccttttgggttccggaagttctccagtaaagtccagaccctcttggaactcttgccagagcacgacctccctgaacacttgaaagccaagacctgtcggcgctgtgtggttattggaagcggaggaatactgcacggattagaactgggccacaccctgaaccagttcgatgttgtgataagaactcagtgcactgctcttggtcagtgtggctccaggaacagtgagggacacaggaagctcttcacagtccctgcccacaagggacttaacgtttgagaagttgaaacaaaaacacaaaatggttggatgctccaaactgtcatactgaccctaagttggaggagcatgctgctggctacagttaaacagtgcaccagttgagggatattcagaacatgttggaaataaaactactataaggatgacttatccagagggcgcaccactgtctgaccttgaatattattccaatgacttatttgttgctgttttatttaagagtgttgatttcaactggcttcaagcaatggtaaaaaaggaaaccctgaacgtccccacaatcggtgtcattgccgttgtcttagccacacatctgtgcgatgaagtcagtttggcgggttttggatatgacctcaatcaacccagaacacctttgcactacttcgacagtcaatgcatggctgctatgaactttcagaccatgcataatgtgacaacggaaaccaagttcctcttaaagctggtcaaagagggagtggtgaaagatctcagtggaggcattgatcgtgaattttgaacacagaaaacctcagttgaaaatgcaactctaactctgagagctgtttttgacagccttcttgatgtatttctccatcctgcagatactttgaagtgcagctcatgtttttaacttttaatttaaaaacacaaaaaaaattttagctcttcccactttttttttcctatttatttgaggtcagtgtttgtttttgcacaccattttgtaaatgaaacttaagaattgaattggaaagacttctcaaagagaattgtatgtaacgatgttgtattgatttttaagaaagtaatttaatttgtaaaacttctgctcgtttacactgcacattgaatacaggtaactaattggaaggagaggggaggtcactcttttgatggtggccctgaacctcattctggttccctgctgcgctgcttggtgtgacccacggaggatccactcccaggatgacgtgctccgtagctctgctgctgatactgggtctgcgatgcagcggcgtgaggcctgggctggttggagaaggtcacaacccttctctgttggtctgccttctgctgaaagactcgagaaccaaccagggaagctgtcctggaggtccctggtcggagagggacatagaatctgtgacctctgacaactgtgaagccaccctgggctacagaaaccacagtcttcccagcaattattacaattcttgaattccttggggattttttactgccctttcaaagcacttaagtgttagatctaacgtgttccagtgtctgtctgaggtgacttaaaaaatcagaacaaaacttctattatccagagtcatgggagagtacaccctttccaggaataatgttttgggaaacactgaaatgaaatcttcccagtattataaattgtgtatttaaaaaaaagaaacttttctgaatgcctacctggcggtgtataccaggcagtgtgccagtttaaaaa

SEQ ID NO: 20510 - DNA, 2467 bp, Homo sapiens
  misc_feature 1..2467: note = ENST00000640418
  source 1..2467: mol_type = unassigned DNA
gttgctcctcctccccagcctgcctgtaaacttgaaattttttcttttttgctttttcttttttctttttgagacaggggctcgctctgtcacccaggtcggagtgtaatggtgtgatcacagctcactgcagcctcaaccttctgggctcaagtgatccttatgcctcagcctcctgagcaactgggactacaggcatgtgccaccatgcccagggcagcagacagagcctgtgttctgttggctacagctgtgctccagcccccgagggcctgcggaagagacaacgtctcagggggaccagacagaagtccaacataaaaagacaatgcttcacaatgccaagtgagtacacctatgtgaaactgagaagtgattgctcgaggccttccctgcaatggtacacccgagctcaaagcaagatgagaaggcccagcttgttattaaaagacatcctcaaatgtacattgcttgtgtttggagtgtggatcctttatatcctcaagttaaattatactactgaagaatgtgacatgaaaaaaatgcattatgtggaccctgaccatgtaaagagagctcagaaatatgctcagcaagtcttgcagaaggaatgtcgtcccaagtttgccaagacatcaatggcgctgttatttgagcacaggtatagcgtggacttactcccttttgtgcagaaggcccccaaagacagtgaagctgagtccaagtacgatcctccttttgggttccggaagttctccagtaaagtccagaccctcttggaactcttgccagagcacgacctccctgaacacttgaaagccaagacctgtcggcgctgtgtggttattggaagcggaggaatactgcacggattagaactgggccacaccctgaaccagttcgatgttgtgataaggttaaacagtgcaccagttgagggatattcagaacatgttggaaataaaactactataaggatgacttatccagagggcgcaccactgtctgaccttgaatattattccaatgacttatttgttgctgttttatttaagagtgttgatttcaactggcttcaagcaatggtaaaaaaggaaaccctgccattctgggtacgactcttcttttggaagcaggtggcagaaaaaatcccactgcagccaaaacatttcaggattttgaatccagttatcatcaaagagactgcctttgacatccttcagtactcagagcctcagtcaaggttctggggccgagataagaacgtccccacaatcggtgtcattgccgttgtcttagccacacatctgtgcgatgaagtcagtttggcgggttttggatatgacctcaatcaacccagaacacctttgcactacttcgacagtcaatgcatggctgctatgaactttcagaccatgcataatgtgacaacggaaaccaagttcctcttaaagctggtcaaagagggagtggtgaaagatctcagtggaggcattgatcgtgaattttgaacacagaaaacctcagttgaaaatgcaactctaactctgagagctgtttttgacagccttcttgatgtatttctccatcctgcagatactttgaagtgcagctcatgtttttaacttttaatttaaaaacacaaaaaaaattttagctcttcccactttttttttcctatttatttgaggtcagtgtttgtttttgcacaccattttgtaaatgaaacttaagaattgaattggaaagacttctcaaagagaattgtatgtaacgatgttgtattgatttttaagaaagtaatttaatttgtaaaacttctgctcgtttacactgcacattgaatacaggtaactaattggaaggagaggggaggtcactcttttgatggtggccctgaacctcattctggttccctgctgcgctgcttggtgtgacccacggaggatccactcccaggatgacgtgctccgtagctctgctgctgatactgggtctgcgatgcagcggcgtgaggcctgggctggttggagaaggtcacaacccttctctgttggtctgccttctgctgaaagactcgagaaccaaccagggaagctgtcctggaggtccctggtcggagagggacatagaatctgtgacctctgacaactgtgaagccaccctgggctacagaaaccacagtcttcccagcaattattacaattcttgaattccttggggattttttactgccctttcaaagcacttaagtgttagatctaacgtgttccagtgtctgtctgaggtgacttaaaaaatcagaacaaaacttctattatccagagtcatgggagagtacaccctttccaggaataatgttttgggaaacactgaaatgaaatcttcccagtattataaattgtgtatttaaaaaaaagaaacttttctgaatgcctacctggcggtgtataccaggcagtgtgcc

SEQ ID NO: 20511 - DNA, 3062 bp, Homo sapiens
  misc_feature 1..3062: note = ENST00000639472
  source 1..3062: mol_type = unassigned DNA
aaatgatgatcactctctttgtagaaacccctcagcaattcttttttttggggatggagtctcattctgttgtccaggctagagggctggagtgcagtggtgcagtcttggctctctgcagcctccgcatcccaggttcaagcaattctcctgcctcagcctcccgagtagctaggattacaggcgcctgccaccacgcccagttaatttttgtatttttaatagagatggggtttcaccatgttggccaggctggtctcaaactcctgacctcaggagatccacccgcctcagcctccaaaagtgctgggattacaaacatgagccactgcacctggccctcttccagtggttcttgcacatgggcaggttggagaattcctggtagagacagtggtgagggtgtttataatttaaactgaacaaatactaggagctagtgggagatttgttgggtgcggtctcagcaccggcacttcctcagtgcttttgatttcatgggtgaaatttcacactcctgagagacaaatgagaccctgccccccagttgaaatcggaaagtaccatacagtgggagtatttttccttttggtggcgggaatggagtgagatggttataaagaggccctgctgcagttgtgtcaatccaggagtgggtgctttcctcctatgtctgtgtacagctgtacactctgcatggatgggccagacctaattaagagtcgcatgaaaatggtgatcattgcttaatgggaatatccagattgtgaccaaaattgctgttactgaggttgttcacccaccttgttctccagacatgaacttgcatagcttttggctagttccagaaattagacttacttagatggatataagcctttttgagggtattcaaaagcatataaaaatcaaggaatactctaaagagctccaaaaatgctttggtcagtggttcccttgttggaataaattcatggcattccagaagggcagctatggaggagatggccctcacttggtcatattccttttgtctttattggtcacattactttatagtctcacccattatattcaaatacatttcagaggtcagctgtcgaggagtgtatgcacatgtatagacatatgcacaaactagctgtctgtgaaactaatgggacgtattcaacttttcacgtaaactccatgtgatgacaaatttgtatttccaaagctgattctatatcagtcatcatggtcttctggattttctattgggcagaagttctagttggaagatgaagcatatatgaaacgacttcatgggactaggaaatagagtaagtgagagaggatgcgaggtgagggcagtttcagcacttaatagccttaaattggacctattcacttgggcttccctagacaaaatgatggtgttagcaccattgaggaatgtctacctcaaacaaatacaagctggttctgcaattcatctctttgtccagtgccgcctgtgtgaagtggctatttcagagttacttttttgagttggagtgccggatttgcgtagcttttgcaatctataggagtagattgcttcagaaggcagtgcacagggccacatggggtcacacccacagccttggtctgatgagtgggaatgctttctcccctcccctagaaggatgactaacaactgcttgcttgctttccttagccattctgggtacgactcttcttttggaagcaggtggcagaaaaaatcccactgcagccaaaacatttcaggattttgaatccagttatcatcaaagagactgcctttgacatccttcagtactcagagcctcagtcaaggttctggggccgagataagaacgtccccacaatcggtgtcattgccgttgtcttagccacacatctgtgcgatgaagtcagtttggcgggttttggatatgacctcaatcaacccagaacacctttgcactacttcgacagtcaatgcatggctgctatgaactttcagaccatgcataatgtgacaacggaaaccaagttcctcttaaagctggtcaaagagggagtggtgaaagatctcagtggaggcattgatcgtgaattttgaacacagaaaacctcagttgaaaatgcaactctaactctgagagctgtttttgacagccttcttgatgtatttctccatcctgcagatactttgaagtgcagctcatgtttttaacttttaatttaaaaacacaaaaaaaattttagctcttcccactttttttttcctatttatttgaggtcagtgtttgtttttgcacaccattttgtaaatgaaacttaagaattgaattggaaagacttctcaaagagaattgtatgtaacgatgttgtattgatttttaagaaagtaatttaatttgtaaaacttctgctcgtttacactgcacattgaatacaggtaactaattggaaggagaggggaggtcactcttttgatggtggccctgaacctcattctggttccctgctgcgctgcttggtgtgacccacggaggatccactcccaggatgacgtgctccgtagctctgctgctgatactgggtctgcgatgcagcggcgtgaggcctgggctggttggagaaggtcacaacccttctctgttggtctgccttctgctgaaagactcgagaaccaaccagggaagctgtcctggaggtccctggtcggagagggacatagaatctgtgacctctgacaactgtgaagccaccctgggctacagaaaccacagtcttcccagcaattattacaattcttgaattccttggggattttttactgccctttcaaagcacttaagtgttagatctaacgtgttccagtgtctgtctgaggtgacttaaaaaatcagaacaaaacttctattatccagagtcatgggagagtacaccctttccaggaataatgttttgggaaacactgaaatgaaatcttcccagtattataaattgtgtatttaaaaaaaagaaacttttctgaatgcctacctggcggtgtataccaggcagtgtgc

SEQ ID NO: 20512 - DNA, 1890 bp, Homo sapiens
  misc_feature 1..1890: note = ENST00000640315
  source 1..1890: mol_type = unassigned DNA
gcggagcggcgtcccctgcagccgcggaccgaggcagcggcggcacctgccggccgagcaatgccaagtgagtacacctatgtgaaactgagaagtgattgctcgaggccttccctgcaatggtacacccgagctcaaagcaagatgagaaggcccagcttgttattaaaagacatcctcaaatgtacattgcttgtgtttggagtgtggatcctttatatcctcaagttaaattatactactgaagaatgtgacatgaaaaaaatgcattatgtggaccctgaccatgtaaagagagctcagaaatatgctcagcaagtcttgcagaaggaatgtcgtcccaagtttgccaagacatcaatggcgctgttatttgagcacaggtatagcgtggacttactcccttttgtgcagaaggcccccaaagacagtgaagctgagtccaagtacgatcctccttttgggttccggaagttctccagtaaagtccagaccctcttggaactcttgccagagcacgacctccctgaacacttgaaagccaagacctgtcggcgctgtgtggttattggaagcggaggaatactgcacggattagaactgggccacaccctgaaccagttcgatgttgtgataagagtgttgatttcaactggcttcaagcaatggtaaaaaaggaaaccctgaacgtccccacaatcggtgtcattgccgttgtcttagccacacatctgtgcgatgaagtcagtttggcgggttttggatatgacctcaatcaacccagaacacctttgcactacttcgacagtcaatgcatggctgctatgaactttcagaccatgcataatgtgacaacggaaaccaagttcctcttaaagctggtcaaagagggagtggtgaaagatctcagtggaggcattgatcgtgaattttgaacacagaaaacctcagttgaaaatgcaactctaactctgagagctgtttttgacagccttcttgatgtatttctccatcctgcagatactttgaagtgcagctcatgtttttaacttttaatttaaaaacacaaaaaaaattttagctcttcccactttttttttcctatttatttgaggtcagtgtttgtttttgcacaccattttgtaaatgaaacttaagaattgaattggaaagacttctcaaagagaattgtatgtaacgatgttgtattgatttttaagaaagtaatttaatttgtaaaacttctgctcgtttacactgcacattgaatacaggtaactaattggaaggagaggggaggtcactcttttgatggtggccctgaacctcattctggttccctgctgcgctgcttggtgtgacccacggaggatccactcccaggatgacgtgctccgtagctctgctgctgatactgggtctgcgatgcagcggcgtgaggcctgggctggttggagaaggtcacaacccttctctgttggtctgccttctgctgaaagactcgagaaccaaccagggaagctgtcctggaggtccctggtcggagagggacatagaatctgtgacctctgacaactgtgaagccaccctgggctacagaaaccacagtcttcccagcaattattacaattcttgaattccttggggattttttactgccctttcaaagcacttaagtgttagatctaacgtgttccagtgtctgtctgaggtgacttaaaaaatcagaacaaaacttctattatccagagtcatgggagagtacaccctttccaggaataatgttttgggaaacactgaaatgaaatcttcccagtattataaattgtgtatttaaaaaaaagaaacttttctgaatgcctacctggcggtgtataccaggcagtgtgc

SEQ ID NO: 20513 - DNA, 5918 bp, Homo sapiens
  misc_feature 1..5918: note = ENST00000639743
  source 1..5918: mol_type = unassigned DNA
atagtcactccctatttccccctccccacaaatcctaggcaaccagtaatctactttctgtctgtatagatttgcctattatggacatttcatgttattcatttcatggtctcctgtgactggattctttcacttaggataatgttttgaaggtacacccatgttgtagcatgtatcggtacttcattattatttctggataatacctcattgtatggatatacctcattttgtttatccattcatcagttagtggacatttgggttgtgtccacttttggctattatgaataatgctgctgtgaacatgtgtatgtaagtatttgtgtacctgttttcagttcttttatgtatatactaggaatatagttgctgggtcatatggtaactatgttttgctttttgaggaactgccaagctgttttccaaaatggttgcattattttacattcttgtaagcaaggtaccagagtttcagtttctccgcatctttatcaacatttgttattatctttccttttttactactgtcatcctgatagatgttaagtgatatctcattgtggttttgatttgctgatagctaatgatgctgagcatctttcccatgtgctctcattgaccgtatgtgtgttttctttggaggaatgcccattcagatcctttgcccatttttaattgggctatttgactttttattcttaaattgtaagagttctttctgtgttctggataccagtaccctatatctggtatgtgatttccaagtattttctccactctctaagttgtcttttcactttctttagggtatcatttttagcacaaaagtctttaattctgatgaaacccaatttacctatttttcctttggtcatttatgcttttggtgtcatatctaagaaactattgtttagtcccaagttttcttctagtatgtttataacatactacctcttacatttaggtctttgattcgttttgcattaatttttgtatatggtatattagtccattttcactactgataaagacatacctaagactgggcaatttacagaagaggtttaattgtagttacaactccacatggcaggggaagcctcacaatcatggcagaaggcaaggaggagcaagtcacgtcttacatgaatggcagcaggcaaaagagagaaactgtgcagggaaactcccatttttaaaaccatcagatctcatgagacccattcactaccacaagaacggcacaggaaagacctgcccccatgattcagtcatctaccactgggtccttcccacaacacatgggaattatgggagctaccagatgagatttgggtggggacaaagagtcaaaccatatcagtgtgaggtcagggtccaaggtcatccttttgcatgttgttctccagttgtcccaggaccatttgttgaaaagaactttcctctatttgctgcattctttctttctttgctgcctagagcctttccctgcccttcgcccttctgttactcgtattttaagtcaagtctcagctcagcggttaccccttctaagaggctatccctgatcgtccctctgtgtgtgtgagagagccccctcatgccttaatcctgatgtttatcattgtaggatttcagctgttcatcttccccacttgttttccaggccaggtcttgggagacaggggctgtgtgcttaacatcttacattacttaatatgcacttacatatattcaacttcagggggaaggggagatagtacttgaatcacagtgtaatcttccattacctgtgaactctagattgtacagaaaatccggttataacttgtaattctttgagtacatcagtaatgcaccttaggtttaatgtgaggaacaggactgatagttctcttcaacctaaacatccactggtagacagggaaaagcccagcacccgctccctgccccttctccctgaaccatggaatgtaagtcctttcattaggctactgggccaatttttagacctaagctcatggctggaccaatagtagccttcatagatgccaatgcccttccttgatgggcttcagtgaggactcctgaccaatcactgacgaggggggttgggaggacttctgatgggggagttggcctccctggtcctacacctacctgcctggagaaggagccaaagccacttaagcaaaactgagcagcagcccacagtgtccatctaccatgtcaccccagtgctgagcgatttctaaaaggttacttttttcaattatttaaaaaaaacaccaaaaattcaagtaatacggaaataagtaaaggagaaagtcccctgtaatttttcatagagaaagaggaaggaatggggggcagctgtgtaagtcaaacatgtttgtaaaactccgtgagtttgaaactagtaaaatagaaagtgaaagcctgctataattatggtggaattgagggtgtcttattgtgttactagagaatttttttaagtaggtttttaacattttgaccttgttaaaatgctccacttttcaaaacggtcctgacaggatatcctgcttccttccacgcagaagaggtggtttgtgcagaagtgcaggcctcagaatgctttgcacatgagaggaatggcaagagttgcctatcactgaggatttggggaggagggatcacaggatatgggactgaaaatgagacagggccagatagcaaaaggccttgaatgctacactaagcacgaagcagctccttaatttgtgcatcactgaagcaagaatagagtggaggacatggcccgtgtggtcctcgtgttctgagtggctatgacatggagttctgtgtgagctctccatgaagaaaatcccgtctccaggcagtcagtggagatttgatccttaccacaagagcacgtggacaaatttgaattatcgtggatgtatatgggcagaagaaggtctcagagccataagggtggggccctgttagctctgttggttccactcagcagcccacagtgtgagtgggaccctgccagccctgctagacttgagcattgtctggtgacgctggtccccgccttcattactgcagcagaggaagtgtggctgtggcagttgtgggttttgtattttctatttaaatatgtcccttaatgtgccagttgttaaaaagactaccagtgggctctgaagggatgcctggacactttgaaagtgtggttcagatgtgaaattgcactcaaaagatgttttaagagagacgagggcacgttgatgtcagtttcggtttgggctgtgtagtagcagcattttgaacttggccctctctcctttctgagagctaaagaccttatctccctgcggatggcattgcgtgcagttaattatggccagatggactcagccgcttcttcatcgtcttctctcggactctgcagacctacaccgtgcctttaaaggaagcagggccctccctgctgaagcattcagtgagcccaggcaccagcatcttcaaaccgagtcttttctctccttagtgctgctccccgctttccaggccttcctgggatatcttagagctcctgaaggtgcggcactcgccttgaggcactttcttctgagctgtgagctatgggcaagcagtggagggggaagagagcagctgaagcagatgccggttcaacttacttaaagatgtgggacaagctctgaggaagcccccaagacaatgatgtctggttgtgcaccattgaagcaagaacagaaaccatcccagagtggaggacatggcccatgtggtcctcctgttctgagtggctatgagatggagttctgtgtgagctctctacagaaaaagccctgtctccaggcaatcagtggagatctgttaaacgagttgaaacaaaagaggacaaggaattgctgtggctttagacgttgccaggacatgtagaaactcactcaggatttactactgcatccactgtcacttaggcgcaggaggggtcacagtcagaagagagctcagaaatatgctcagcaagtcttgcagaaggaatgtcgtcccaagtttgccaagacatcaatggcgctgttatttgagcacaggtatagcgtggacttactcccttttgtgcagaaggcccccaaagacagtgaagctgagtccaagtacgatcctccttttgggttccggaagttctccagtaaagtccagaccctcttggaactcttgccagagcacgacctccctgaacacttgaaagccaagacctgtcggcgctgtgtggttattggaagcggaggaatactgcacggattagaactgggccacaccctgaaccagttcgatgttgtgataaggttaaacagtgcaccagttgagggatattcagaacatgttggaaataaaactactataaggatgacttatccagagggcgcaccactgtctgaccttgaatattattccaatgacttatttgttgctgttttatttaagagtgttgatttcaactggcttcaagcaatggtaaaaaaggaaaccctgccattctgggtacgactcttcttttggaagcaggtggcagaaaaaatcccactgcagccaaaacatttcaggattttgaatccagttatcatcaaagagactgcctttgacatccttcagtactcagagcctcagtcaaggttctggggccgagataagaacgtccccacaatcggtgtcattgccgttgtcttagccacacatctgtgcgatgaagtcagtttggcgggttttggatatgacctcaatcaacccagaacacctttgcactacttcgacagtcaatgcatggctgctatgaactttcagaccatgcataatgtgacaacggaaaccaagttcctcttaaagctggtcaaagagggagtggtgaaagatctcagtggaggcattgatcgtgaattttgaacacagaaaacctcagttgaaaatgcaactctaactctgagagctgtttttgacagccttcttgatgtatttctccatcctgcagatactttgaagtgcagctcatgtttttaacttttaatttaaaaacacaaaaaaaattttagctcttcccactttttttttcctatttatttgaggtcagtgtttgtttttgcacaccattttgtaaatgaaacttaagaattgaattggaaagacttctcaaagagaattgtatgtaacgatgttgtattgatttttaagaaagtaatttaatttgtaaaacttctgctcgtttacactgcacattgaatacaggtaactaattggaaggagaggggaggtcactcttttgatggtggccctgaacctcattctggttccctgctgcgctgcttggtgtgacccacggaggatccactcccaggatgacgtgctccgtagctctgctgctgatactgggtctgcgatgcagcggcgtgaggcctgggctggttggagaaggtcacaacccttctctgttggtctgccttctgctgaaagactcgagaaccaaccagggaagctgtcctggaggtccctggtcggagagggacatagaatctgtgacctctgacaactgtgaagccaccctgggctacagaaaccacagtcttcccagcaattattacaattcttgaattccttggggattttttactgccctttcaaagcacttaagtgttagatctaacgtgttccagtgtctgtctgaggtgacttaaaaaatcagaacaaaacttctattatccagagtcatgggagagtacaccctttccaggaataatgttttgggaaacactgaaatgaaatcttcccagtattataaattgtgtatttaaaaaaaagaaacttttctgaatgcctacctggcggtgtataccaggcag

SEQ ID NO: 20514 - DNA, 2489 bp, Homo sapiens
  misc_feature 1..2489: note = ENST00000638227
  source 1..2489: mol_type = unassigned DNA
ggcggcccccagctgaatgggcgcgagagcggcgctgggggcgggtgggggcgcggggtaccgggctggcggccggccggcgccccctcattagtatgcggacgaaggcggcgggctgcgcggagcggcgtcccctgcagccgcggaccgaggcagcggcggcacctgccggccgaggcactgtgaagacagtggtgtgcaaagcagagacccctgcttgcatggaatctgcattctagtgggggagacaagacaaacgtgtaattcaaaagtaaaaaacttatgaagaatcacatgtctcatgattagtgttataaagaaaaaagaaagcatgcatacaggaatatccacataagcaattttgcaatgccaagtgagtacacctatgtgaaactgagaagtgattgctcgaggccttccctgcaatggtacacccgagctcaaagcaagatgagaaggcccagcttgttattaaaagacatcctcaaatgtacattgcttgtgtttggagtgtggatcctttatatcctcaagttaaattatactactgaagaatgtgacatgaaaaaaatgcattatgtggaccctgaccatgtaaagagagctcagaaatatgctcagcaagtcttgcagaaggaatgtcgtcccaagtttgccaagacatcaatggcgctgttatttgagcacaggtatagcgtggacttactcccttttgtgcagaaggcccccaaagacagtgaagctgagtccaagtacgatcctccttttgggttccggaagttctccagtaaagtccagaccctcttggaactcttgccagagcacgacctccctgaacacttgaaagccaagacctgtcggcgctgtgtggttattggaagcggaggaatactgcacggattagaactgggccacaccctgaaccagttcgatgttgtgataaggttaaacagtgcaccagttgagggatattcagaacatgttggaaataaaactactataaggatgacttatccagagggcgcaccactgtctgaccttgaatattattccaatgacttatttgttgctgttttatttaagagtgttgatttcaactggcttcaagcaatggtaaaaaaggaaaccctgccattctgggtacgactcttcttttggaagcaggtggcagaaaaaatcccactgcagccaaaacatttcaggattttgaatccagttatcatcaaagagactgcctttgacatccttcagtactcagagcctcagtcaaggttctggggccgagataagaacgtccccacaatcggtgtcattgccgttgtcttagccacacatctgtgcgatgaagtcagtttggcgggttttggatatgacctcaatcaacccagaacacctttgcactacttcgacagtcaatgcatggctgctatgaactttcagaccatgcataatgtgacaacggaaaccaagttcctcttaaagctggtcaaagagggagtggtgaaagatctcagtggaggcattgatcgtgaattttgaacacagaaaacctcagttgaaaatgcaactctaactctgagagctgtttttgacagccttcttgatgtatttctccatcctgcagatactttgaagtgcagctcatgtttttaacttttaatttaaaaacacaaaaaaaattttagctcttcccactttttttttcctatttatttgaggtcagtgtttgtttttgcacaccattttgtaaatgaaacttaagaattgaattggaaagacttctcaaagagaattgtatgtaacgatgttgtattgatttttaagaaagtaatttaatttgtaaaacttctgctcgtttacactgcacattgaatacaggtaactaattggaaggagaggggaggtcactcttttgatggtggccctgaacctcattctggttccctgctgcgctgcttggtgtgacccacggaggatccactcccaggatgacgtgctccgtagctctgctgctgatactgggtctgcgatgcagcggcgtgaggcctgggctggttggagaaggtcacaacccttctctgttggtctgccttctgctgaaagactcgagaaccaaccagggaagctgtcctggaggtccctggtcggagagggacatagaatctgtgacctctgacaactgtgaagccaccctgggctacagaaaccacagtcttcccagcaattattacaattcttgaattccttggggattttttactgccctttcaaagcacttaagtgttagatctaacgtgttccagtgtctgtctgaggtgacttaaaaaatcagaacaaaacttctattatccagagtcatgggagagtacaccctttccaggaataatgttttgggaaacactgaaatgaaatcttcccagtattataaattgtgtatttaaaaaaaagaaacttttctgaatgcctacctggcggtgtataccaggcag

SEQ ID NO: 20515 - DNA, 3722 bp, Homo sapiens
  misc_feature 1..3722: note = ENST00000640453
  source 1..3722: mol_type = unassigned DNA
aatatcagttcctttttcagaaatggggccagattcttcggatgtagacagtgttctcttcacggatgctaacaacttatcaaagctataatatattaagtatctctgttataataggatagatgcattcctaaaaaaatgtgttaagcaaaaatcagaaaatgaaaataaaaataacaaggccttgaggaaaagcatagttgggatgaacatttaaacctataccccagtaataatcctcataatgatactgacaaagttgaaaagatatgttgaattcctaataaatatcccagtaaatataggattacacacacacacacacacacacacacacacacacttctgcctgtgagaaggtagtgaataggaggagtaatgcagggccaattccaaggctgctaaatatggagacaaggataaaaaagcacaaagataggaagaactacctgacaggggttctgagtcagcatttgtccagctgagccaagaggaagactggggtgaatggacacgcataccatattcctccaaggttgcgtttttgttttttggggggttttttgtttgtttttttgttttttgagacagagtctcgctctgttgcccaggctggagtatagtggcacgatctcggctcactgcaagctctgcctcccgggttcacaccattctcctgcctcagcctcccgagtagctgggactacaggtgcccaccaccacgtgcccggctaatttttgtatttttagtagagacgagtttcaccgtattagccaggatggtcatgtttttgttcttgtttttgttttagagacagggtctccctctgtcacccaggctggagtgcagtggcacaatcacagctcactacagtgtcaaccttccaggttgaggatcactcgatactcatgcctcagcctcccatgtagctggggccacaggggcacaccaccactcctgacccattttttaaaaaattttttgtataggtggggtctcaccatgttgcccaggctagcctcgaactcctgggctcaagcaaccctctcaccttggcctcccaaagtgctgagattataggtgtgacccgccatgcccgcctttcctctgagttttgttgcattcacgcagctcctggctgaggcaaaacattaaaatgcatatggaaatgcaggctgggaaaatgctttgaaaccaatgcaatttctgtgttaaggggacattccctgattctttcaggtaatttgcattctagactgtgacattctgtatctcaactgataaataagcctgtttgtcatcctgctagatgagaacctgatatatgaaaccttttttttaatcgtggttaaaaaaaacataaaatttaccatcataattatttttaaatgtaccatttggcagcattaagtatatttaaactcttgtgaaacaaatttctagaatgttttcatcttgcaaaaccgaaacgctgtacctattaaacaactccccttttctccctctcttcaaccctggtaaccatgtttttatgaatttgactactttagatacctcatataagtcaggtcatacagtatttgtctctttgtgactggcttcacttagcataatgtcctcaaagtttaactatgttgtagcatgtatcagaattttatgaaacatgaagtcttagacaccccgaagtacattttcaccccaaatgtatttgaacagtgttaggctgggggtgggaggcgggagtccttcttgctttgcctgtgcaatgaaatgaataccctgctgtgtttatctccttgtcatgtgattctcccaggttgtttcttcaagtttctgagccaaacttaactctaaaaagcaaatattctgtgttaaaagacagtaatcaacacgggagctacatcagacatcataggacaaattgtcatctagaagagtatatttttaatgcaggagagtttttaaaacccagattggtgtgatttcattccagagagctcagaaatatgctcagcaagtcttgcagaaggaatgtcgtcccaagtttgccaagacatcaatggcgctgttatttgagcacaggtatagcgtggacttactcccttttgtgcagaaggcccccaaagacagtgaagctgagtccaagtacgatcctccttttgggttccggaagttctccagtaaagtccagaccctcttggaactcttgccagagcacgacctccctgaacacttgaaagccaagacctgtcggcgctgtgtggttattggaagcggaggaatactgcacggattagaactgggccacaccctgaaccagttcgatgttgtgataaggttaaacagtgcaccagttgagggatattcagaacatgttggaaataaaactactataaggatgacttatccagagggcgcaccactgtctgaccttgaatattattccaatgacttatttgttgctgttttatttaagagtgttgatttcaactggcttcaagcaatggtaaaaaaggaaaccctgaacgtccccacaatcggtgtcattgccgttgtcttagccacacatctgtgcgatgaagtcagtttggcgggttttggatatgacctcaatcaacccagaacacctttgcactacttcgacagtcaatgcatggctgctatgaactttcagaccatgcataatgtgacaacggaaaccaagttcctcttaaagctggtcaaagagggagtggtgaaagatctcagtggaggcattgatcgtgaattttgaacacagaaaacctcagttgaaaatgcaactctaactctgagagctgtttttgacagccttcttgatgtatttctccatcctgcagatactttgaagtgcagctcatgtttttaacttttaatttaaaaacacaaaaaaaattttagctcttcccactttttttttcctatttatttgaggtcagtgtttgtttttgcacaccattttgtaaatgaaacttaagaattgaattggaaagacttctcaaagagaattgtatgtaacgatgttgtattgatttttaagaaagtaatttaatttgtaaaacttctgctcgtttacactgcacattgaatacaggtaactaattggaaggagaggggaggtcactcttttgatggtggccctgaacctcattctggttccctgctgcgctgcttggtgtgacccacggaggatccactcccaggatgacgtgctccgtagctctgctgctgatactgggtctgcgatgcagcggcgtgaggcctgggctggttggagaaggtcacaacccttctctgttggtctgccttctgctgaaagactcgagaaccaaccagggaagctgtcctggaggtccctggtcggagagggacatagaatctgtgacctctgacaactgtgaagccaccctgggctacagaaaccacagtcttcccagcaattattacaattcttgaattccttggggattttttactgccctttcaaagcacttaagtgttagatctaacgtgttccagtgtctgtctgaggtgacttaaaaaatcagaacaaaacttctattatccagagtcatgggagagtacaccctttccaggaataatgttttgggaaacactgaaatgaaatcttcccagtattataaattgtgtatttaaaaaaaagaaacttttctgaatgcctacctggcggtgtataccaggc

SEQ ID NO: 20516 - DNA, 4478 bp, Homo sapiens
  misc_feature 1..4478: note = ENST00000639074
  source 1..4478: mol_type = unassigned DNA
aaaaaaaaaaaaagaaaaaaaaagaagaaaattaagtttgaaacctgaaattaacctcttggtgagaatggaaatggaatgaaatttcactcctttccagatgcagcttctgaagaggagacctggcagcctggcgagcatccagctcgctcacgcacctctttctagtcccgtggccatcagtgagcttctccgggtccctcttgccacttctcagatgttcctttctgtcctaggagatttgtaaaaccagatacttaggatatgattctctagtggagggttaggcctttaggtctctaaaaattgccattcatgaccttcgggcctagggttttgagatgaatgtgcagtgtgtgtggccgctctgtgtgtcccgcttccaccagcttggcattaagcacccggagcatcacctgctgggcaggcctggccaggggtgagcccctccattcgggggctcagggtcaaggcagattccttgcttggctttcctgctgatttcctcatgaagatgccaattcgtatttaaacatttgttatcaatggtggtgtttgtgtgctgatttctataggtagaggctgttgttttaggagccaggtttgctgggccagctcagacctcttacaaagtgaagatactaatgatcgtcttgcaaggtgccatagtgtcgtgagggtgaactgaggcagtggctatgcatggtgtctgcagcagcgtttctgaggctccaagaatatcagttcctttttcagaaatggggccagattcttcggatgtagacagtgttctcttcacggatgctaacaacttatcaaagctataatatattaagtatctctgttataataggatagatgcattcctaaaaaaatgtgttaagcaaaaatcagaaaatgaaaataaaaataacaaggccttgaggaaaagcatagttgggatgaacatttaaacctataccccagtaataatcctcataatgatactgacaaagttgaaaagatatgttgaattcctaataaatatcccagtaaatataggattacacacacacacacacacacacacacacacacacttctgcctgtgagaaggtagtgaataggaggagtaatgcagggccaattccaaggctgctaaatatggagacaaggataaaaaagcacaaagataggaagaactacctgacaggggttctgagtcagcatttgtccagctgagccaagaggaagactggggtgaatggacacgcataccatattcctccaaggttgcgtttttgttttttggggggttttttgtttgtttttttgttttttgagacagagtctcgctctgttgcccaggctggagtatagtggcacgatctcggctcactgcaagctctgcctcccgggttcacaccattctcctgcctcagcctcccgagtagctgggactacaggtgcccaccaccacgtgcccggctaatttttgtatttttagtagagacgagtttcaccgtattagccaggatggtcatgtttttgttcttgtttttgttttagagacagggtctccctctgtcacccaggctggagtgcagtggcacaatcacagctcactacagtgtcaaccttccaggttgaggatcactcgatactcatgcctcagcctcccatgtagctggggccacaggggcacaccaccactcctgacccattttttaaaaaattttttgtataggtggggtctcaccatgttgcccaggctagcctcgaactcctgggctcaagcaaccctctcaccttggcctcccaaagtgctgagattataggtgtgacccgccatgcccgcctttcctctgagttttgttgcattcacgcagctcctggctgaggcaaaacattaaaatgcatatggaaatgcaggctgggaaaatgctttgaaaccaatgcaatttctgtgttaaggggacattccctgattctttcaggtaatttgcattctagactgtgacattctgtatctcaactgataaataagcctgtttgtcatcctgctagatgagaacctgatatatgaaaccttttttttaatcgtggttaaaaaaaacataaaatttaccatcataattatttttaaatgtaccatttggcagcattaagtatatttaaactcttgtgaaacaaatttctagaatgttttcatcttgcaaaaccgaaacgctgtacctattaaacaactccccttttctccctctcttcaaccctggtaaccatgtttttatgaatttgactactttagatacctcatataagtcaggtcatacagtatttgtctctttgtgactggcttcacttagcataatgtcctcaaagtttaactatgttgtagcatgtatcagaattttatgaaacatgaagtcttagacaccccgaagtacattttcaccccaaatgtatttgaacagtgttaggctgggggtgggaggcgggagtccttcttgctttgcctgtgcaatgaaatgaataccctgctgtgtttatctccttgtcatgtgattctcccaggttgtttcttcaagtttctgagccaaacttaactctaaaaagcaaatattctgtgttaaaagacagtaatcaacacgggagctacatcagacatcataggacaaattgtcatctagaagagtatatttttaatgcaggagagtttttaaaacccagattggtgtgatttcattccagagagctcagaaatatgctcagcaagtcttgcagaaggaatgtcgtcccaagtttgccaagacatcaatggcgctgttatttgagcacaggtatagcgtggacttactcccttttgtgcagaaggcccccaaagacagtgaagctgagtccaagtacgatcctccttttgggttccggaagttctccagtaaagtccagaccctcttggaactcttgccagagcacgacctccctgaacacttgaaagccaagacctgtcggcgctgtgtggttattggaagcggaggaatactgcacggattagaactgggccacaccctgaaccagttcgatgttgtgataagagtgttgatttcaactggcttcaagcaatggtaaaaaaggaaaccctgccattctgggtacgactcttcttttggaagcaggtggcagaaaaaatcccactgcagccaaaacatttcaggattttgaatccagttatcatcaaagagactgcctttgacatccttcagtactcagagcctcagtcaaggttctggggccgagataagaacgtccccacaatcggtgtcattgccgttgtcttagccacacatctgtgcgatgaagtcagtttggcgggttttggatatgacctcaatcaacccagaacacctttgcactacttcgacagtcaatgcatggctgctatgaactttcagaccatgcataatgtgacaacggaaaccaagttcctcttaaagctggtcaaagagggagtggtgaaagatctcagtggaggcattgatcgtgaattttgaacacagaaaacctcagttgaaaatgcaactctaactctgagagctgtttttgacagccttcttgatgtatttctccatcctgcagatactttgaagtgcagctcatgtttttaacttttaatttaaaaacacaaaaaaaattttagctcttcccactttttttttcctatttatttgaggtcagtgtttgtttttgcacaccattttgtaaatgaaacttaagaattgaattggaaagacttctcaaagagaattgtatgtaacgatgttgtattgatttttaagaaagtaatttaatttgtaaaacttctgctcgtttacactgcacattgaatacaggtaactaattggaaggagaggggaggtcactcttttgatggtggccctgaacctcattctggttccctgctgcgctgcttggtgtgacccacggaggatccactcccaggatgacgtgctccgtagctctgctgctgatactgggtctgcgatgcagcggcgtgaggcctgggctggttggagaaggtcacaacccttctctgttggtctgccttctgctgaaagactcgagaaccaaccagggaagctgtcctggaggtccctggtcggagagggacatagaatctgtgacctctgacaactgtgaagccaccctgggctacagaaaccacagtcttcccagcaattattacaattcttgaattccttggggattttttactgccctttcaaagcacttaagtgttagatctaacgtgttccagtgtctgtctgaggtgacttaaaaaatcagaacaaaacttctattatccagagtcatgggagagtacaccctttccaggaataatgttttgggaaacactgaaatgaaatcttcccagtattataaattgtgtatttaaaaaaaagaaacttttctgaatgcctacctggcggtgtataccaggc

SEQ ID NO: 20517 - DNA, 4001 bp, Homo sapiens
  misc_feature 1..4001: note = ENST00000640798
  source 1..4001: mol_type = unassigned DNA
aattatttaaaaaaaacaccaaaaattcaagtaatacggaaataagtaaaggagaaagtcccctgtaatttttcatagagaaagaggaaggaatggggggcagctgtgtaagtcaaacatgtttgtaaaactccgtgagtttgaaactagtaaaatagaaagtgaaagcctgctataattatggtggaattgagggtgtcttattgtgttactagagaatttttttaagtaggtttttaacattttgaccttgttaaaatgctccacttttcaaaacggtcctgacaggatatcctgcttccttccacgcagaagaggtggtttgtgcagaagtgcaggcctcagaatgctttgcacatgagaggaatggcaagagttgcctatcactgaggatttggggaggagggatcacaggatatgggactgaaaatgagacagggccagatagcaaaaggccttgaatgctacactaagcacgaagcagctccttaatttgtgcatcactgaagcaagaatagagtggaggacatggcccgtgtggtcctcgtgttctgagtggctatgacatggagttctgtgtgagctctccatgaagaaaatcccgtctccaggcagtcagtggagatttgatccttaccacaagagcacgtggacaaatttgaattatcgtggatgtatatgggcagaagaaggtctcagagccataagggtggggccctgttagctctgttggttccactcagcagcccacagtgtgagtgggaccctgccagccctgctagacttgagcattgtctggtgacgctggtccccgccttcattactgcagcagaggaagtgtggctgtggcagttgtgggttttgtattttctatttaaatatgtcccttaatgtgccagttgttaaaaagactaccagtgggctctgaagggatgcctggacactttgaaagtgtggttcagatgtgaaattgcactcaaaagatgttttaagagagacgagggcacgttgatgtcagtttcggtttgggctgtgtagtagcagcattttgaacttggccctctctcctttctgagagctaaagaccttatctccctgcggatggcattgcgtgcagttaattatggccagatggactcagccgcttcttcatcgtcttctctcggactctgcagacctacaccgtgcctttaaaggaagcagggccctccctgctgaagcattcagtgagcccaggcaccagcatcttcaaaccgagtcttttctctccttagtgctgctccccgctttccaggccttcctgggatatcttagagctcctgaaggtgcggcactcgccttgaggcactttcttctgagctgtgagctatgggcaagcagtggagggggaagagagcagctgaagcagatgccggttcaacttacttaaagatgtgggacaagctctgaggaagcccccaagacaatgatgtctggttgtgcaccattgaagcaagaacagaaaccatcccagagtggaggacatggcccatgtggtcctcctgttctgagtggctatgagatggagttctgtgtgagctctctacagaaaaagccctgtctccaggcaatcagtggagatctgttaaacgagttgaaacaaaagaggacaaggaattgctgtggctttagacgttgccaggacatgtagaaactcactcaggatttactactgcatccactgtcacttaggcgcaggaggggtcacagtcagaaggttgtttcttcaagtttctgagccaaacttaactctaaaaagcaaatattctgtgttaaaagacagtaatcaacacgggagctacatcagacatcataggacaaattgtcatctagaagagtatatttttaatgcaggagagtttttaaaacccagattggtgtgatttcattccagagagctcagaaatatgctcagcaagtcttgcagaaggaatgtcgtcccaagtttgccaagacatcaatggcgctgttatttgagcacaggtatagcgtggacttactcccttttgtgcagaaggcccccaaagacagtgaagctgagtccaagtacgatcctccttttgggttccggaagttctccagtaaagtccagaccctcttggaactcttgccagagcacgacctccctgaacacttgaaagccaagacctgtcggcgctgtgtggttattggaagcggaggaatactgcacggattagaactgggccacaccctgaaccagttcgatgttgtgataagaactcagtgcactgctcttggtcagtgtggctccaggaacagtgagggacacaggaagctcttcacagtccctgcccacaagggacttaacgtttgagaagttgaaacaaaaacacaaaatggttggatgctccaaactgtcatactgaccctaagttggaggagcatgctgctggctacagttaaacagtgcaccagttgagggatattcagaacatgttggaaataaaactactataaggatgacttatccagagggcgcaccactgtctgaccttgaatattattccaatgacttatttgttgctgttttatttaagagtgttgatttcaactggcttcaagcaatggtaaaaaaggaaaccctgccattctgggtacgactcttcttttggaagcaggtggcagaaaaaatcccactgcagccaaaacatttcaggattttgaatccagttatcatcaaagagactgcctttgacatccttcagtactcagagcctcagtcaaggttctggggccgagataagaacgtccccacaatcggtgtcattgccgttgtcttagccacacatctgtgcgatgaagtcagtttggcgggttttggatatgacctcaatcaacccagaacacctttgcactacttcgacagtcaatgcatggctgctatgaactttcagaccatgcataatgtgacaacggaaaccaagttcctcttaaagctggtcaaagagggagtggtgaaagatctcagtggaggcattgatcgtgaattttgaacacagaaaacctcagttgaaaatgcaactctaactctgagagctgtttttgacagccttcttgatgtatttctccatcctgcagatactttgaagtgcagctcatgtttttaacttttaatttaaaaacacaaaaaaaattttagctcttcccactttttttttcctatttatttgaggtcagtgtttgtttttgcacaccattttgtaaatgaaacttaagaattgaattggaaagacttctcaaagagaattgtatgtaacgatgttgtattgatttttaagaaagtaatttaatttgtaaaacttctgctcgtttacactgcacattgaatacaggtaactaattggaaggagaggggaggtcactcttttgatggtggccctgaacctcattctggttccctgctgcgctgcttggtgtgacccacggaggatccactcccaggatgacgtgctccgtagctctgctgctgatactgggtctgcgatgcagcggcgtgaggcctgggctggttggagaaggtcacaacccttctctgttggtctgccttctgctgaaagactcgagaaccaaccagggaagctgtcctggaggtccctggtcggagagggacatagaatctgtgacctctgacaactgtgaagccaccctgggctacagaaaccacagtcttcccagcaattattacaattcttgaattccttggggattttttactgccctttcaaagcacttaagtgttagatctaacgtgttccagtgtctgtctgaggtgacttaaaaaatcagaacaaaacttctattatccagagtcatgggagagtacaccctttccaggaataatgttttgggaaacactgaaatgaaatcttcccagtattataaattgtgtatttaaaaaaaagaaacttttctgaatgcctacctggcggtgtataccaggc

SEQ ID NO: 20518 - DNA, 2140 bp, Homo sapiens
  misc_feature 1..2140: note = ENST00000638321
  source 1..2140: mol_type = unassigned DNA
atgtgaaactgagaagtgattgctcgaggccttccctgcaatggtacacccgagctcaaagcaagatgagaaggcccagcttgttattaaaagacatcctcaaatgtacattgcttgtgtttggagtgtggatcctttatatcctcaagttaaattatactactgaagaatgtgacatgaaaaaaatgcattatgtggaccctgaccatgtaaaggttgtttcttcaagtttctgagccaaacttaactctaaaaagcaaatattctgtgttaaaagacagtaatcaacacgggagctacatcagacatcataggacaaattgtcatctagaagagtatatttttaatgcaggagagtttttaaaacccagattggtgtgatttcattccagagagctcagaaatatgctcagcaagtcttgcagaaggaatgtcgtcccaagtttgccaagacatcaatggcgctgttatttgagcacaggtatagcgtggacttactcccttttgtgcagaaggcccccaaagacagtgaagctgagtccaagtacgatcctccttttgggttccggaagttctccagtaaagtccagaccctcttggaactcttgccagagcacgacctccctgaacacttgaaagccaagacctgtcggcgctgtgtggttattggaagcggaggaatactgcacggattagaactgggccacaccctgaaccagttcgatgttgtgataagagtgttgatttcaactggcttcaagcaatggtaaaaaaggaaaccctgccattctgggtacgactcttcttttggaagcaggtggcagaaaaaatcccactgcagccaaaacatttcaggattttgaatccagttatcatcaaagagactgcctttgacatccttcagtactcagagcctcagtcaaggttctggggccgagataagaacgtccccacaatcggtgtcattgccgttgtcttagccacacatctgtgcgatgaagtcagtttggcgggttttggatatgacctcaatcaacccagaacacctttgcactacttcgacagtcaatgcatggctgctatgaactttcagaccatgcataatgtgacaacggaaaccaagttcctcttaaagctggtcaaagagggagtggtgaaagatctcagtggaggcattgatcgtgaattttgaacacagaaaacctcagttgaaaatgcaactctaactctgagagctgtttttgacagccttcttgatgtatttctccatcctgcagatactttgaagtgcagctcatgtttttaacttttaatttaaaaacacaaaaaaaattttagctcttcccactttttttttcctatttatttgaggtcagtgtttgtttttgcacaccattttgtaaatgaaacttaagaattgaattggaaagacttctcaaagagaattgtatgtaacgatgttgtattgatttttaagaaagtaatttaatttgtaaaacttctgctcgtttacactgcacattgaatacaggtaactaattggaaggagaggggaggtcactcttttgatggtggccctgaacctcattctggttccctgctgcgctgcttggtgtgacccacggaggatccactcccaggatgacgtgctccgtagctctgctgctgatactgggtctgcgatgcagcggcgtgaggcctgggctggttggagaaggtcacaacccttctctgttggtctgccttctgctgaaagactcgagaaccaaccagggaagctgtcctggaggtccctggtcggagagggacatagaatctgtgacctctgacaactgtgaagccaccctgggctacagaaaccacagtcttcccagcaattattacaattcttgaattccttggggattttttactgccctttcaaagcacttaagtgttagatctaacgtgttccagtgtctgtctgaggtgacttaaaaaatcagaacaaaacttctattatccagagtcatgggagagtacaccctttccaggaataatgttttgggaaacactgaaatgaaatcttcccagtattataaattgtgtatttaaaaaaaagaaacttttctgaatgcctacctggcggtgtataccaggc

SEQ ID NO: 20519 - DNA, 2297 bp, Homo sapiens
  misc_feature 1..2297: note = ENST00000639432
  source 1..2297: mol_type = unassigned DNA
atccatcggggaggcgtgatgtggggccgctggtagaaatttgccggtgaccttccctgcaccctctctgcagccagccttgcggagaagacaggttttggcgaccttttgatttcttctgaattgtaagccgtggcttgacgcgggtgtgcattcattgtacgccttgcgtgtcaatgccaagtgagtacacctatgtgaaactgagaagtgattgctcgaggccttccctgcaatggtacacccgagctcaaagcaagatgagaaggcccagcttgttattaaaagacatcctcaaatgtacattgcttgtgtttggagtgtggatcctttatatcctcaagttaaattatactactgaagaatgtgacatgaaaaaaatgcattatgtggaccctgaccatgtaaagagagctcagaaatatgctcagcaagtcttgcagaaggaatgtcgtcccaagtttgccaagacatcaatggcgctgttatttgagcacaggtatagcgtggacttactcccttttgtgcagaaggcccccaaagacagtgaagctgagtccaagtacgatcctccttttgggttccggaagttctccagtaaagtccagaccctcttggaactcttgccagagcacgacctccctgaacacttgaaagccaagacctgtcggcgctgtgtggttattggaagcggaggaatactgcacggattagaactgggccacaccctgaaccagttcgatgttgtgataaggttaaacagtgcaccagttgagggatattcagaacatgttggaaataaaactactataaggatgacttatccagagggcgcaccactgtctgaccttgaatattattccaatgacttatttgttgctgttttatttaagagtgttgatttcaactggcttcaagcaatggtaaaaaaggaaaccctgccattctgggtacgactcttcttttggaagcaggtggcagaaaaaatcccactgcagccaaaacatttcaggattttgaatccagttatcatcaaagagactgcctttgacatccttcagtactcagagcctcagtcaaggttctggggccgagataagaacgtccccacaatcggtgtcattgccgttgtcttagccacacatctgtgcgatgaagtcagtttggcgggttttggatatgacctcaatcaacccagaacacctttgcactacttcgacagtcaatgcatggctgctatgaactttcagaccatgcataatgtgacaacggaaaccaagttcctcttaaagctggtcaaagagggagtggtgaaagatctcagtggaggcattgatcgtgaattttgaacacagaaaacctcagttgaaaatgcaactctaactctgagagctgtttttgacagccttcttgatgtatttctccatcctgcagatactttgaagtgcagctcatgtttttaacttttaatttaaaaacacaaaaaaaattttagctcttcccactttttttttcctatttatttgaggtcagtgtttgtttttgcacaccattttgtaaatgaaacttaagaattgaattggaaagacttctcaaagagaattgtatgtaacgatgttgtattgatttttaagaaagtaatttaatttgtaaaacttctgctcgtttacactgcacattgaatacaggtaactaattggaaggagaggggaggtcactcttttgatggtggccctgaacctcattctggttccctgctgcgctgcttggtgtgacccacggaggatccactcccaggatgacgtgctccgtagctctgctgctgatactgggtctgcgatgcagcggcgtgaggcctgggctggttggagaaggtcacaacccttctctgttggtctgccttctgctgaaagactcgagaaccaaccagggaagctgtcctggaggtccctggtcggagagggacatagaatctgtgacctctgacaactgtgaagccaccctgggctacagaaaccacagtcttcccagcaattattacaattcttgaattccttggggattttttactgccctttcaaagcacttaagtgttagatctaacgtgttccagtgtctgtctgaggtgacttaaaaaatcagaacaaaacttctattatccagagtcatgggagagtacaccctttccaggaataatgttttgggaaacactgaaatgaaatcttcccagtattataaattgtgtatttaaaaaaaagaaacttttctgaatgcctacctggcggtgtataccaggc

SEQ ID NO: 20520 - DNA, 2844 bp, Homo sapiens
  misc_feature 1..2844: note = ENST00000639184
  source 1..2844: mol_type = unassigned DNA
gggccggctgggcgcggcgtttccgcctcgaaccccgcgggcagcgcccagggcacgacaccctcaggcgagcccggctggggcgcgggcggagggtcgtggtcccgggccgtgtggaccgggcggggggtcccacgcagcaatgccaagtgagtacacctatgtgaaactgagaagtgattgctcgaggccttccctgcaatggtacacccgagctcaaagcaagatgagaaggcccagcttgttattaaaagacatcctcaaatgtacattgcttgtgtttggagtgtggatcctttatatcctcaagttaaattatactactgaagaatgtgacatgaaaaaaatgcattatgtggaccctgaccatgtaaagacctacaccgtgcctttaaaggaagcagggccctccctgctgaagcattcagtgagcccaggcaccagcatcttcaaaccgagtcttttctctccttagtgctgctccccgctttccaggccttcctgggatatcttagagctcctgaaggtgcggcactcgccttgaggcactttcttctgagctgtgagctatgggcaagcagtggagggggaagagagcagctgaagcagatgccggttcaacttacttaaagatgtgggacaagctctgaggaagcccccaagacaatgatgtctggttgtgcaccattgaagcaagaacagaaaccatcccagagtggaggacatggcccatgtggtcctcctgttctgagtggctatgagatggagttctgtgtgagctctctacagaaaaagccctgtctccaggcaatcagtggagatctgttaaacgagttgaaacaaaagaggacaaggaattgctgtggctttagacgttgccaggacatgtagaaactcactcaggatttactactgcatccactgtcacttaggcgcaggaggggtcacagtcagaagagagctcagaaatatgctcagcaagtcttgcagaaggaatgtcgtcccaagtttgccaagacatcaatggcgctgttatttgagcacaggtatagcgtggacttactcccttttgtgcagaaggcccccaaagacagtgaagctgagtccaagtacgatcctccttttgggttccggaagttctccagtaaagtccagaccctcttggaactcttgccagagcacgacctccctgaacacttgaaagccaagacctgtcggcgctgtgtggttattggaagcggaggaatactgcacggattagaactgggccacaccctgaaccagttcgatgttgtgataaggttaaacagtgcaccagttgagggatattcagaacatgttggaaataaaactactataaggatgacttatccagagggcgcaccactgtctgaccttgaatattattccaatgacttatttgttgctgttttatttaagagtgttgatttcaactggcttcaagcaatggtaaaaaaggaaaccctgccattctgggtacgactcttcttttggaagcaggtggcagaaaaaatcccactgcagccaaaacatttcaggattttgaatccagttatcatcaaagagactgcctttgacatccttcagtactcagagcctcagtcaaggttctggggccgagataagaacgtccccacaatcggtgtcattgccgttgtcttagccacacatctgtgcgatgaagtcagtttggcgggttttggatatgacctcaatcaacccagaacacctttgcactacttcgacagtcaatgcatggctgctatgaactttcagaccatgcataatgtgacaacggaaaccaagttcctcttaaagctggtcaaagagggagtggtgaaagatctcagtggaggcattgatcgtgaattttgaacacagaaaacctcagttgaaaatgcaactctaactctgagagctgtttttgacagccttcttgatgtatttctccatcctgcagatactttgaagtgcagctcatgtttttaacttttaatttaaaaacacaaaaaaaattttagctcttcccactttttttttcctatttatttgaggtcagtgtttgtttttgcacaccattttgtaaatgaaacttaagaattgaattggaaagacttctcaaagagaattgtatgtaacgatgttgtattgatttttaagaaagtaatttaatttgtaaaacttctgctcgtttacactgcacattgaatacaggtaactaattggaaggagaggggaggtcactcttttgatggtggccctgaacctcattctggttccctgctgcgctgcttggtgtgacccacggaggatccactcccaggatgacgtgctccgtagctctgctgctgatactgggtctgcgatgcagcggcgtgaggcctgggctggttggagaaggtcacaacccttctctgttggtctgccttctgctgaaagactcgagaaccaaccagggaagctgtcctggaggtccctggtcggagagggacatagaatctgtgacctctgacaactgtgaagccaccctgggctacagaaaccacagtcttcccagcaattattacaattcttgaattccttggggattttttactgccctttcaaagcacttaagtgttagatctaacgtgttccagtgtctgtctgaggtgacttaaaaaatcagaacaaaacttctattatccagagtcatgggagagtacaccctttccaggaataatgttttgggaaacactgaaatgaaatcttcccagtattataaattgtgtatttaaaaaaaagaaacttttctgaatgcctacctggcggtgtataccaggc

SEQ ID NO: 20521 - DNA, 2465 bp, Homo sapiens
  misc_feature 1..2465: note = ENST00000640982
  source 1..2465: mol_type = unassigned DNA
gacttgtctcttcccgggccggctgggcgcggcgtttccgcctcgaaccccgcgggcagcgcccagggcacgacaccctcaggcgagcccggctggggcgcgggcggagggtcgtggtcccgggccgtgtggaccgggcggggggtcccacgcaggcactgtgaagacagtggtgtgcaaagcagagacccctgcttgcatggaatctgcattctagtgggggagacaagacaaacgtgtaattcaaaagtaaaaaacttatgaagaatcacatgtctcatgattagtgttataaagaaaaaagaaagcatgcatacaggaatatccacataagcaattttgcaatgccaagtgagtacacctatgtgaaactgagaagtgattgctcgaggccttccctgcaatggtacacccgagctcaaagcaagatgagaaggcccagcttgttattaaaagacatcctcaaatgtacattgcttgtgtttggagtgtggatcctttatatcctcaagttaaattatactactgaagaatgtgacatgaaaaaaatgcattatgtggaccctgaccatgtaaagagagctcagaaatatgctcagcaagtcttgcagaaggaatgtcgtcccaagtttgccaagacatcaatggcgctgttatttgagcacaggtatagcgtggacttactcccttttgtgcagaaggcccccaaagacagtgaagctgagtccaagtacgatcctccttttgggttccggaagttctccagtaaagtccagaccctcttggaactcttgccagagcacgacctccctgaacacttgaaagccaagacctgtcggcgctgtgtggttattggaagcggaggaatactgcacggattagaactgggccacaccctgaaccagttcgatgttgtgataaggttaaacagtgcaccagttgagggatattcagaacatgttggaaataaaactactataaggatgacttatccagagggcgcaccactgtctgaccttgaatattattccaatgacttatttgttgctgttttatttaagagtgttgatttcaactggcttcaagcaatggtaaaaaaggaaaccctgccattctgggtacgactcttcttttggaagcaggtggcagaaaaaatcccactgcagccaaaacatttcaggattttgaatccagttatcatcaaagagactgcctttgacatccttcagtactcagagcctcagtcaaggttctggggccgagataagaacgtccccacaatcggtgtcattgccgttgtcttagccacacatctgtgcgatgaagtcagtttggcgggttttggatatgacctcaatcaacccagaacacctttgcactacttcgacagtcaatgcatggctgctatgaactttcagaccatgcataatgtgacaacggaaaccaagttcctcttaaagctggtcaaagagggagtggtgaaagatctcagtggaggcattgatcgtgaattttgaacacagaaaacctcagttgaaaatgcaactctaactctgagagctgtttttgacagccttcttgatgtatttctccatcctgcagatactttgaagtgcagctcatgtttttaacttttaatttaaaaacacaaaaaaaattttagctcttcccactttttttttcctatttatttgaggtcagtgtttgtttttgcacaccattttgtaaatgaaacttaagaattgaattggaaagacttctcaaagagaattgtatgtaacgatgttgtattgatttttaagaaagtaatttaatttgtaaaacttctgctcgtttacactgcacattgaatacaggtaactaattggaaggagaggggaggtcactcttttgatggtggccctgaacctcattctggttccctgctgcgctgcttggtgtgacccacggaggatccactcccaggatgacgtgctccgtagctctgctgctgatactgggtctgcgatgcagcggcgtgaggcctgggctggttggagaaggtcacaacccttctctgttggtctgccttctgctgaaagactcgagaaccaaccagggaagctgtcctggaggtccctggtcggagagggacatagaatctgtgacctctgacaactgtgaagccaccctgggctacagaaaccacagtcttcccagcaattattacaattcttgaattccttggggattttttactgccctttcaaagcacttaagtgttagatctaacgtgttccagtgtctgtctgaggtgacttaaaaaatcagaacaaaacttctattatccagagtcatgggagagtacaccctttccaggaataatgttttgggaaacactgaaatgaaatcttcccagtattataaattgtgtatttaaaaaaaagaaacttttctgaatgcctacctggcggtgtataccaggc

SEQ ID NO: 20522 - DNA, 2292 bp, Homo sapiens
  misc_feature 1..2292: note = ENST00000640992
  source 1..2292: mol_type = unassigned DNA
ggggctgcggcggcgacttgtctcttcccgggccggctgggcgcggcgtttccgcctcgaaccccgcgggcagcgcccagggcacgacaccctcaggcgagcccggctggggcgcgggcggagggtcgtggtcccgggccgtgtggaccgggcggggggtcccacgcagcaatgccaagtgagtacacctatgtgaaactgagaagtgattgctcgaggccttccctgcaatggtacacccgagctcaaagcaagatgagaaggcccagcttgttattaaaagacatcctcaaatgtacattgcttgtgtttggagtgtggatcctttatatcctcaagttaaattatactactgaagaatgtgacatgaaaaaaatgcattatgtggaccctgaccatgtaaagagagctcagaaatatgctcagcaagtcttgcagaaggaatgtcgtcccaagtttgccaagacatcaatggcgctgttatttgagcacaggtatagcgtggacttactcccttttgtgcagaaggcccccaaagacagtgaagctgagtccaagtacgatcctccttttgggttccggaagttctccagtaaagtccagaccctcttggaactcttgccagagcacgacctccctgaacacttgaaagccaagacctgtcggcgctgtgtggttattggaagcggaggaatactgcacggattagaactgggccacaccctgaaccagttcgatgttgtgataaggttaaacagtgcaccagttgagggatattcagaacatgttggaaataaaactactataaggatgacttatccagagggcgcaccactgtctgaccttgaatattattccaatgacttatttgttgctgttttatttaagagtgttgatttcaactggcttcaagcaatggtaaaaaaggaaaccctgccattctgggtacgactcttcttttggaagcaggtggcagaaaaaatcccactgcagccaaaacatttcaggattttgaatccagttatcatcaaagagactgcctttgacatccttcagtactcagagcctcagtcaaggttctggggccgagataagaacgtccccacaatcggtgtcattgccgttgtcttagccacacatctgtgcgatgaagtcagtttggcgggttttggatatgacctcaatcaacccagaacacctttgcactacttcgacagtcaatgcatggctgctatgaactttcagaccatgcataatgtgacaacggaaaccaagttcctcttaaagctggtcaaagagggagtggtgaaagatctcagtggaggcattgatcgtgaattttgaacacagaaaacctcagttgaaaatgcaactctaactctgagagctgtttttgacagccttcttgatgtatttctccatcctgcagatactttgaagtgcagctcatgtttttaacttttaatttaaaaacacaaaaaaaattttagctcttcccactttttttttcctatttatttgaggtcagtgtttgtttttgcacaccattttgtaaatgaaacttaagaattgaattggaaagacttctcaaagagaattgtatgtaacgatgttgtattgatttttaagaaagtaatttaatttgtaaaacttctgctcgtttacactgcacattgaatacaggtaactaattggaaggagaggggaggtcactcttttgatggtggccctgaacctcattctggttccctgctgcgctgcttggtgtgacccacggaggatccactcccaggatgacgtgctccgtagctctgctgctgatactgggtctgcgatgcagcggcgtgaggcctgggctggttggagaaggtcacaacccttctctgttggtctgccttctgctgaaagactcgagaaccaaccagggaagctgtcctggaggtccctggtcggagagggacatagaatctgtgacctctgacaactgtgaagccaccctgggctacagaaaccacagtcttcccagcaattattacaattcttgaattccttggggattttttactgccctttcaaagcacttaagtgttagatctaacgtgttccagtgtctgtctgaggtgacttaaaaaatcagaacaaaacttctattatccagagtcatgggagagtacaccctttccaggaataatgttttgggaaacactgaaatgaaatcttcccagtattataaattgtgtatttaaaaaaaagaaacttttctgaatgcctacctggcggtgtataccaggc

SEQ ID NO: 20523 - DNA, 2369 bp, Homo sapiens
  misc_feature 1..2369: note = ENST00000640425
  source 1..2369: mol_type = unassigned DNA
gggctgcgcggagcggcgtcccctgcagccgcggaccgaggcagcggcggcacctgccggccgagcaatgccaagtgagtacacctatgtgaaactgagaagtgattgctcgaggccttccctgcaatggtacacccgagctcaaagcaagatgagaaggcccagcttgttattaaaagacatcctcaaatgtacattgcttgtgtttggagtgtggatcctttatatcctcaagttaaattatactactgaagaatgtgacatgaaaaaaatgcattatgtggaccctgaccatgtaaagagagctcagaaatatgctcagcaagtcttgcagaaggaatgtcgtcccaagtttgccaagacatcaatggcgctgttatttgagcacaggtatagcgtggacttactcccttttgtgcagaaggcccccaaagacagtgaagctgagtccaagtacgatcctccttttgggttccggaagttctccagtaaagtccagaccctcttggaactcttgccagagcacgacctccctgaacacttgaaagccaagacctgtcggcgctgtgtggttattggaagcggaggaatactgcacggattagaactgggccacaccctgaaccagttcgatgttgtgataagaactcagtgcactgctcttggtcagtgtggctccaggaacagtgagggacacaggaagctcttcacagtccctgcccacaagggacttaacgtttgagaagttgaaacaaaaacacaaaatggttggatgctccaaactgtcatactgaccctaagttggaggagcatgctgctggctacagttaaacagtgcaccagttgagggatattcagaacatgttggaaataaaactactataaggatgacttatccagagggcgcaccactgtctgaccttgaatattattccaatgacttatttgttgctgttttatttaagagtgttgatttcaactggcttcaagcaatggtaaaaaaggaaaccctgccattctgggtacgactcttcttttggaagcaggtggcagaaaaaatcccactgcagccaaaacatttcaggattttgaatccagttatcatcaaagagactgcctttgacatccttcagtactcagagcctcagtcaaggttctggggccgagataagaacgtccccacaatcggtgtcattgccgttgtcttagccacacatctgtgcgatgaagtcagtttggcgggttttggatatgacctcaatcaacccagaacacctttgcactacttcgacagtcaatgcatggctgctatgaactttcagaccatgcataatgtgacaacggaaaccaagttcctcttaaagctggtcaaagagggagtggtgaaagatctcagtggaggcattgatcgtgaattttgaacacagaaaacctcagttgaaaatgcaactctaactctgagagctgtttttgacagccttcttgatgtatttctccatcctgcagatactttgaagtgcagctcatgtttttaacttttaatttaaaaacacaaaaaaaattttagctcttcccactttttttttcctatttatttgaggtcagtgtttgtttttgcacaccattttgtaaatgaaacttaagaattgaattggaaagacttctcaaagagaattgtatgtaacgatgttgtattgatttttaagaaagtaatttaatttgtaaaacttctgctcgtttacactgcacattgaatacaggtaactaattggaaggagaggggaggtcactcttttgatggtggccctgaacctcattctggttccctgctgcgctgcttggtgtgacccacggaggatccactcccaggatgacgtgctccgtagctctgctgctgatactgggtctgcgatgcagcggcgtgaggcctgggctggttggagaaggtcacaacccttctctgttggtctgccttctgctgaaagactcgagaaccaaccagggaagctgtcctggaggtccctggtcggagagggacatagaatctgtgacctctgacaactgtgaagccaccctgggctacagaaaccacagtcttcccagcaattattacaattcttgaattccttggggattttttactgccctttcaaagcacttaagtgttagatctaacgtgttccagtgtctgtctgaggtgacttaaaaaatcagaacaaaacttctattatccagagtcatgggagagtacaccctttccaggaataatgttttgggaaacactgaaatgaaatcttcccagtattataaattgtgtatttaaaaaaaagaaacttttctgaatgcctacctggcggtgtataccaggc

SEQ ID NO: 20524 - DNA, 2064 bp, Homo sapiens
  misc_feature 1..2064: note = ENST00000638678
  source 1..2064: mol_type = unassigned DNA
gcggacgaaggcggcgggctgcgcggagcggcgtcccctgcagccgcggaccgaggcagcggcggcacctgccggccgagcaatgccaagtgagtacacctatgtgaaactgagaagtgattgctcgaggccttccctgcaatggtacacccgagctcaaagcaagatgagaaggcccagcttgttattaaaagacatcctcaaatgtacattgcttgtgtttggagtgtggatcctttatatcctcaagttaaattatactactgaagaatgtgacatgaaaaaaatgcattatgtggaccctgaccatgtaaagagagctcagaaatatgctcagcaagtcttgcagaaggaatgtcgtcccaagtttgccaagacatcaatggcgctgttatttgagcacaggtatagcgtggacttactcccttttgtgcagaaggcccccaaagacagtgaagctgagtccaagtacgatcctccttttgggttccggaagttctccagtaaagtccagaccctcttggaactcttgccagagcacgacctccctgaacacttgaaagccaagacctgtcggcgctgtgtggttattggaagcggaggaatactgcacggattagaactgggccacaccctgaaccagttcgatgttgtgataagagtgttgatttcaactggcttcaagcaatggtaaaaaaggaaaccctgccattctgggtacgactcttcttttggaagcaggtggcagaaaaaatcccactgcagccaaaacatttcaggattttgaatccagttatcatcaaagagactgcctttgacatccttcagtactcagagcctcagtcaaggttctggggccgagataagaacgtccccacaatcggtgtcattgccgttgtcttagccacacatctgtgcgatgaagtcagtttggcgggttttggatatgacctcaatcaacccagaacacctttgcactacttcgacagtcaatgcatggctgctatgaactttcagaccatgcataatgtgacaacggaaaccaagttcctcttaaagctggtcaaagagggagtggtgaaagatctcagtggaggcattgatcgtgaattttgaacacagaaaacctcagttgaaaatgcaactctaactctgagagctgtttttgacagccttcttgatgtatttctccatcctgcagatactttgaagtgcagctcatgtttttaacttttaatttaaaaacacaaaaaaaattttagctcttcccactttttttttcctatttatttgaggtcagtgtttgtttttgcacaccattttgtaaatgaaacttaagaattgaattggaaagacttctcaaagagaattgtatgtaacgatgttgtattgatttttaagaaagtaatttaatttgtaaaacttctgctcgtttacactgcacattgaatacaggtaactaattggaaggagaggggaggtcactcttttgatggtggccctgaacctcattctggttccctgctgcgctgcttggtgtgacccacggaggatccactcccaggatgacgtgctccgtagctctgctgctgatactgggtctgcgatgcagcggcgtgaggcctgggctggttggagaaggtcacaacccttctctgttggtctgccttctgctgaaagactcgagaaccaaccagggaagctgtcctggaggtccctggtcggagagggacatagaatctgtgacctctgacaactgtgaagccaccctgggctacagaaaccacagtcttcccagcaattattacaattcttgaattccttggggattttttactgccctttcaaagcacttaagtgttagatctaacgtgttccagtgtctgtctgaggtgacttaaaaaatcagaacaaaacttctattatccagagtcatgggagagtacaccctttccaggaataatgttttgggaaacactgaaatgaaatcttcccagtattataaattgtgtatttaaaaaaaagaaacttttctgaatgcctacctggcggtgtataccaggc

SEQ ID NO: 20525 - DNA, 2410 bp, Homo sapiens
  misc_feature 1..2410: note = ENST00000640295
  source 1..2410: mol_type = unassigned DNA
atgcggacgaaggcggcgggctgcgcggagcggcgtcccctgcagccgcggaccgaggcagcggcggcacctgccggccgaggcactgtgaagacagtggtgtgcaaagcagagacccctgcttgcatggaatctgcattctagtgggggagacaagacaaacgtgtaattcaaaagtaaaaaacttatgaagaatcacatgtctcatgattagtgttataaagaaaaaagaaagcatgcatacaggaatatccacataagcaattttgcaatgccaagtgagtacacctatgtgaaactgagaagtgattgctcgaggccttccctgcaatggtacacccgagctcaaagcaagatgagaaggcccagcttgttattaaaagacatcctcaaatgtacattgcttgtgtttggagtgtggatcctttatatcctcaagttaaattatactactgaagaatgtgacatgaaaaaaatgcattatgtggaccctgaccatgtaaaggttgtttcttcaagtttctgagccaaacttaactctaaaaagcaaatattctgtgttaaaagacagtaatcaacacgggagctacatcagacatcataggacaaattgtcatctagaagagtatatttttaatgcaggagagtttttaaaacccagattggtgtgatttcattccagagagctcagaaatatgctcagcaagtcttgcagaaggaatgtcgtcccaagtttgccaagacatcaatggcgctgttatttgagcacaggtatagcgtggacttactcccttttgtgcagaaggcccccaaagacagtgaagctgagtccaagtacgatcctccttttgggttccggaagttctccagtaaagtccagaccctcttggaactcttgccagagcacgacctccctgaacacttgaaagccaagacctgtcggcgctgtgtggttattggaagcggaggaatactgcacggattagaactgggccacaccctgaaccagttcgatgttgtgataaggttaaacagtgcaccagttgagggatattcagaacatgttggaaataaaactactataaggatgacttatccagagggcgcaccactgtctgaccttgaatattattccaatgacttatttgttgctgttttatttaagagtgttgatttcaactggcttcaagcaatggtaaaaaaggaaaccctgaacgtccccacaatcggtgtcattgccgttgtcttagccacacatctgtgcgatgaagtcagtttggcgggttttggatatgacctcaatcaacccagaacacctttgcactacttcgacagtcaatgcatggctgctatgaactttcagaccatgcataatgtgacaacggaaaccaagttcctcttaaagctggtcaaagagggagtggtgaaagatctcagtggaggcattgatcgtgaattttgaacacagaaaacctcagttgaaaatgcaactctaactctgagagctgtttttgacagccttcttgatgtatttctccatcctgcagatactttgaagtgcagctcatgtttttaacttttaatttaaaaacacaaaaaaaattttagctcttcccactttttttttcctatttatttgaggtcagtgtttgtttttgcacaccattttgtaaatgaaacttaagaattgaattggaaagacttctcaaagagaattgtatgtaacgatgttgtattgatttttaagaaagtaatttaatttgtaaaacttctgctcgtttacactgcacattgaatacaggtaactaattggaaggagaggggaggtcactcttttgatggtggccctgaacctcattctggttccctgctgcgctgcttggtgtgacccacggaggatccactcccaggatgacgtgctccgtagctctgctgctgatactgggtctgcgatgcagcggcgtgaggcctgggctggttggagaaggtcacaacccttctctgttggtctgccttctgctgaaagactcgagaaccaaccagggaagctgtcctggaggtccctggtcggagagggacatagaatctgtgacctctgacaactgtgaagccaccctgggctacagaaaccacagtcttcccagcaattattacaattcttgaattccttggggattttttactgccctttcaaagcacttaagtgttagatctaacgtgttccagtgtctgtctgaggtgacttaaaaaatcagaacaaaacttctattatccagagtcatgggagagtacaccctttccaggaataatgttttgggaaacactgaaatgaaatcttcccagtattataaattgtgtatttaaaaaaaagaaacttttctgaatgcctacctggcggtgtataccaggc

SEQ ID NO: 20526 - DNA, 2597 bp, Homo sapiens
  misc_feature 1..2597: note = ENST00000638885
  source 1..2597: mol_type = unassigned DNA
cgggctggcggccggccggcgccccctcattagtatgcggacgaaggcggcgggctgcgcggagcggcgtcccctgcagccgcggaccgaggcagcggcggcacctgccggccgagcaatgccaagtgagtacacctatgtgaaactgagaagtgattgctcgaggccttccctgcaatggtacacccgagctcaaagcaagatgagaaggcccagcttgttattaaaagacatcctcaaatgtacattgcttgtgtttggagtgtggatcctttatatcctcaagttaaattatactactgaagaatgtgacatgaaaaaaatgcattatgtggaccctgaccatgtaaaggttgtttcttcaagtttctgagccaaacttaactctaaaaagcaaatattctgtgttaaaagacagtaatcaacacgggagctacatcagacatcataggacaaattgtcatctagaagagtatatttttaatgcaggagagtttttaaaacccagattggtgtgatttcattccagagagctcagaaatatgctcagcaagtcttgcagaaggaatgtcgtcccaagtttgccaagacatcaatggcgctgttatttgagcacaggtatagcgtggacttactcccttttgtgcagaaggcccccaaagacagtgaagctgagtccaagtacgatcctccttttgggttccggaagttctccagtaaagtccagaccctcttggaactcttgccagagcacgacctccctgaacacttgaaagccaagacctgtcggcgctgtgtggttattggaagcggaggaatactgcacggattagaactgggccacaccctgaaccagttcgatgttgtgataagaactcagtgcactgctcttggtcagtgtggctccaggaacagtgagggacacaggaagctcttcacagtccctgcccacaagggacttaacgtttgagaagttgaaacaaaaacacaaaatggttggatgctccaaactgtcatactgaccctaagttggaggagcatgctgctggctacagttaaacagtgcaccagttgagggatattcagaacatgttggaaataaaactactataaggatgacttatccagagggcgcaccactgtctgaccttgaatattattccaatgacttatttgttgctgttttatttaagagtgttgatttcaactggcttcaagcaatggtaaaaaaggaaaccctgccattctgggtacgactcttcttttggaagcaggtggcagaaaaaatcccactgcagccaaaacatttcaggattttgaatccagttatcatcaaagagactgcctttgacatccttcagtactcagagcctcagtcaaggttctggggccgagataagaacgtccccacaatcggtgtcattgccgttgtcttagccacacatctgtgcgatgaagtcagtttggcgggttttggatatgacctcaatcaacccagaacacctttgcactacttcgacagtcaatgcatggctgctatgaactttcagaccatgcataatgtgacaacggaaaccaagttcctcttaaagctggtcaaagagggagtggtgaaagatctcagtggaggcattgatcgtgaattttgaacacagaaaacctcagttgaaaatgcaactctaactctgagagctgtttttgacagccttcttgatgtatttctccatcctgcagatactttgaagtgcagctcatgtttttaacttttaatttaaaaacacaaaaaaaattttagctcttcccactttttttttcctatttatttgaggtcagtgtttgtttttgcacaccattttgtaaatgaaacttaagaattgaattggaaagacttctcaaagagaattgtatgtaacgatgttgtattgatttttaagaaagtaatttaatttgtaaaacttctgctcgtttacactgcacattgaatacaggtaactaattggaaggagaggggaggtcactcttttgatggtggccctgaacctcattctggttccctgctgcgctgcttggtgtgacccacggaggatccactcccaggatgacgtgctccgtagctctgctgctgatactgggtctgcgatgcagcggcgtgaggcctgggctggttggagaaggtcacaacccttctctgttggtctgccttctgctgaaagactcgagaaccaaccagggaagctgtcctggaggtccctggtcggagagggacatagaatctgtgacctctgacaactgtgaagccaccctgggctacagaaaccacagtcttcccagcaattattacaattcttgaattccttggggattttttactgccctttcaaagcacttaagtgttagatctaacgtgttccagtgtctgtctgaggtgacttaaaaaatcagaacaaaacttctattatccagagtcatgggagagtacaccctttccaggaataatgttttgggaaacactgaaatgaaatcttcccagtattataaattgtgtatttaaaaaaaagaaacttttctgaatgcctacctggcggtgtataccaggc

SEQ ID NO: 20527 - DNA, 2095 bp, Homo sapiens
  misc_feature 1..2095: note = ENST00000640594
  source 1..2095: mol_type = unassigned DNA
gggggcgcggggtaccgggctggcggccggccggcgccccctcattagtatgcggacgaaggcggcgggctgcgcggagcggcgtcccctgcagccgcggaccgaggcagcggcggcacctgccggccgaggcactgtgaagacagtggtgtgcaaagcagagacccctgcttgcatggaatctgcattctagtgggggagacaagacaaacgtgtaattcaaaagtaaaaaacttatgaagaatcacatgtctcatgattagtgttataaagaaaaaagaaagcatgcatacaggaatatccacataagcaattttgcaatgccaagtgagtacacctatgtgaaactgagaagtgattgctcgaggccttccctgcaatggtacacccgagctcaaagcaagatgagaaggcccagcttgttattaaaagacatcctcaaatgtacattgcttgtgtttggagtgtggatcctttatatcctcaagttaaattatactactgaagaatgtgacatgaaaaaaatgcattatgtggaccctgaccatgtaaagagagctcagaaatatgctcagcaagtcttgcagaaggaatgtcgtcccaagtttgccaagacatcaatggcgctgttatttgagcacaggtatagcgtggacttactcccttttgtgcagaaggcccccaaagacagtgaagctgagtccaagtacgatcctccttttgggttccggaagttctccagtaaagtccagaccctcttggaactcttgccagagcacgacctccctgaacacttgaaagccaagacctgtcggcgctgtgtggttattggaagcggaggaatactgcacggattagaactgggccacaccctgaaccagttcgatgttgtgataagaacgtccccacaatcggtgtcattgccgttgtcttagccacacatctgtgcgatgaagtcagtttggcgggttttggatatgacctcaatcaacccagaacacctttgcactacttcgacagtcaatgcatggctgctatgaactttcagaccatgcataatgtgacaacggaaaccaagttcctcttaaagctggtcaaagagggagtggtgaaagatctcagtggaggcattgatcgtgaattttgaacacagaaaacctcagttgaaaatgcaactctaactctgagagctgtttttgacagccttcttgatgtatttctccatcctgcagatactttgaagtgcagctcatgtttttaacttttaatttaaaaacacaaaaaaaattttagctcttcccactttttttttcctatttatttgaggtcagtgtttgtttttgcacaccattttgtaaatgaaacttaagaattgaattggaaagacttctcaaagagaattgtatgtaacgatgttgtattgatttttaagaaagtaatttaatttgtaaaacttctgctcgtttacactgcacattgaatacaggtaactaattggaaggagaggggaggtcactcttttgatggtggccctgaacctcattctggttccctgctgcgctgcttggtgtgacccacggaggatccactcccaggatgacgtgctccgtagctctgctgctgatactgggtctgcgatgcagcggcgtgaggcctgggctggttggagaaggtcacaacccttctctgttggtctgccttctgctgaaagactcgagaaccaaccagggaagctgtcctggaggtccctggtcggagagggacatagaatctgtgacctctgacaactgtgaagccaccctgggctacagaaaccacagtcttcccagcaattattacaattcttgaattccttggggattttttactgccctttcaaagcacttaagtgttagatctaacgtgttccagtgtctgtctgaggtgacttaaaaaatcagaacaaaacttctattatccagagtcatgggagagtacaccctttccaggaataatgttttgggaaacactgaaatgaaatcttcccagtattataaattgtgtatttaaaaaaaagaaacttttctgaatgcctacctggcggtgtataccaggc

SEQ ID NO: 20528 - DNA, 2622 bp, Homo sapiens
  misc_feature 1..2622: note = ENST00000638484
  source 1..2622: mol_type = unassigned DNA
gggtgggggcgcggggtaccgggctggcggccggccggcgccccctcattagtatgcggacgaaggcggcgggctgcgcggagcggcgtcccctgcagccgcggaccgaggcagcggcggcacctgccggccgaggcactgtgaagacagtggtgtgcaaagcagagacccctgcttgcatggaatctgcattctagtgggggagacaagacaaacgtgtaattcaaaagtaaaaaacttatgaagaatcacatgtctcatgattagtgttataaagaaaaaagaaagcatgcatacaggaatatccacataagcaattttgcaatgccaagtgagtacacctatgtgaaactgagaagtgattgctcgaggccttccctgcaatggtacacccgagctcaaagcaagatgagaaggcccagcttgttattaaaagacatcctcaaatgtacattgcttgtgtttggagtgtggatcctttatatcctcaagttaaattatactactgaagaatgtgacatgaaaaaaatgcattatgtggaccctgaccatgtaaaggttgtttcttcaagtttctgagccaaacttaactctaaaaagcaaatattctgtgttaaaagacagtaatcaacacgggagctacatcagacatcataggacaaattgtcatctagaagagtatatttttaatgcaggagagtttttaaaacccagattggtgtgatttcattccagagagctcagaaatatgctcagcaagtcttgcagaaggaatgtcgtcccaagtttgccaagacatcaatggcgctgttatttgagcacaggtatagcgtggacttactcccttttgtgcagaaggcccccaaagacagtgaagctgagtccaagtacgatcctccttttgggttccggaagttctccagtaaagtccagaccctcttggaactcttgccagagcacgacctccctgaacacttgaaagccaagacctgtcggcgctgtgtggttattggaagcggaggaatactgcacggattagaactgggccacaccctgaaccagttcgatgttgtgataaggttaaacagtgcaccagttgagggatattcagaacatgttggaaataaaactactataaggatgacttatccagagggcgcaccactgtctgaccttgaatattattccaatgacttatttgttgctgttttatttaagagtgttgatttcaactggcttcaagcaatggtaaaaaaggaaaccctgccattctgggtacgactcttcttttggaagcaggtggcagaaaaaatcccactgcagccaaaacatttcaggattttgaatccagttatcatcaaagagactgcctttgacatccttcagtactcagagcctcagtcaaggttctggggccgagataagaacgtccccacaatcggtgtcattgccgttgtcttagccacacatctgtgcgatgaagtcagtttggcgggttttggatatgacctcaatcaacccagaacacctttgcactacttcgacagtcaatgcatggctgctatgaactttcagaccatgcataatgtgacaacggaaaccaagttcctcttaaagctggtcaaagagggagtggtgaaagatctcagtggaggcattgatcgtgaattttgaacacagaaaacctcagttgaaaatgcaactctaactctgagagctgtttttgacagccttcttgatgtatttctccatcctgcagatactttgaagtgcagctcatgtttttaacttttaatttaaaaacacaaaaaaaattttagctcttcccactttttttttcctatttatttgaggtcagtgtttgtttttgcacaccattttgtaaatgaaacttaagaattgaattggaaagacttctcaaagagaattgtatgtaacgatgttgtattgatttttaagaaagtaatttaatttgtaaaacttctgctcgtttacactgcacattgaatacaggtaactaattggaaggagaggggaggtcactcttttgatggtggccctgaacctcattctggttccctgctgcgctgcttggtgtgacccacggaggatccactcccaggatgacgtgctccgtagctctgctgctgatactgggtctgcgatgcagcggcgtgaggcctgggctggttggagaaggtcacaacccttctctgttggtctgccttctgctgaaagactcgagaaccaaccagggaagctgtcctggaggtccctggtcggagagggacatagaatctgtgacctctgacaactgtgaagccaccctgggctacagaaaccacagtcttcccagcaattattacaattcttgaattccttggggattttttactgccctttcaaagcacttaagtgttagatctaacgtgttccagtgtctgtctgaggtgacttaaaaaatcagaacaaaacttctattatccagagtcatgggagagtacaccctttccaggaataatgttttgggaaacactgaaatgaaatcttcccagtattataaattgtgtatttaaaaaaaagaaacttttctgaatgcctacctggcggtgtataccaggc

SEQ ID NO: 20529 - DNA, 2168 bp, Homo sapiens
  misc_feature 1..2168: note = ENST00000638542
  source 1..2168: mol_type = unassigned DNA
gggtgggggcgcggggtaccgggctggcggccggccggcgccccctcattagtatgcggacgaaggcggcgggctgcgcggagcggcgtcccctgcagccgcggaccgaggcagcggcggcacctgccggccgagcaatgccaagtgagtacacctatgtgaaactgagaagtgattgctcgaggccttccctgcaatggtacacccgagctcaaagcaagatgagaaggcccagcttgttattaaaagacatcctcaaagagctcagaaatatgctcagcaagtcttgcagaaggaatgtcgtcccaagtttgccaagacatcaatggcgctgttatttgagcacaggtatagcgtggacttactcccttttgtgcagaaggcccccaaagacagtgaagctgagtccaagtacgatcctccttttgggttccggaagttctccagtaaagtccagaccctcttggaactcttgccagagcacgacctccctgaacacttgaaagccaagacctgtcggcgctgtgtggttattggaagcggaggaatactgcacggattagaactgggccacaccctgaaccagttcgatgttgtgataagaactcagtgcactgctcttggtcagtgtggctccaggaacagtgagggacacaggaagctcttcacagtccctgcccacaagggacttaacgtttgagaagttgaaacaaaaacacaaaatggttggatgctccaaactgtcatactgaccctaagttggaggagcatgctgctggctacagttaaacagtgcaccagttgagggatattcagaacatgttggaaataaaactactataaggatgacttatccagagggcgcaccactgtctgaccttgaatattattccaatgacttatttgttgctgttttatttaagagtgttgatttcaactggcttcaagcaatggtaaaaaaggaaaccctgaacgtccccacaatcggtgtcattgccgttgtcttagccacacatctgtgcgatgaagtcagtttggcgggttttggatatgacctcaatcaacccagaacacctttgcactacttcgacagtcaatgcatggctgctatgaactttcagaccatgcataatgtgacaacggaaaccaagttcctcttaaagctggtcaaagagggagtggtgaaagatctcagtggaggcattgatcgtgaattttgaacacagaaaacctcagttgaaaatgcaactctaactctgagagctgtttttgacagccttcttgatgtatttctccatcctgcagatactttgaagtgcagctcatgtttttaacttttaatttaaaaacacaaaaaaaattttagctcttcccactttttttttcctatttatttgaggtcagtgtttgtttttgcacaccattttgtaaatgaaacttaagaattgaattggaaagacttctcaaagagaattgtatgtaacgatgttgtattgatttttaagaaagtaatttaatttgtaaaacttctgctcgtttacactgcacattgaatacaggtaactaattggaaggagaggggaggtcactcttttgatggtggccctgaacctcattctggttccctgctgcgctgcttggtgtgacccacggaggatccactcccaggatgacgtgctccgtagctctgctgctgatactgggtctgcgatgcagcggcgtgaggcctgggctggttggagaaggtcacaacccttctctgttggtctgccttctgctgaaagactcgagaaccaaccagggaagctgtcctggaggtccctggtcggagagggacatagaatctgtgacctctgacaactgtgaagccaccctgggctacagaaaccacagtcttcccagcaattattacaattcttgaattccttggggattttttactgccctttcaaagcacttaagtgttagatctaacgtgttccagtgtctgtctgaggtgacttaaaaaatcagaacaaaacttctattatccagagtcatgggagagtacaccctttccaggaataatgttttgggaaacactgaaatgaaatcttcccagtattataaattgtgtatttaaaaaaaagaaacttttctgaatgcctacctggcggtgtataccaggc

SEQ ID NO: 20530 - DNA, 2837 bp, Homo sapiens
  misc_feature 1..2837: note = ENST00000639820
  source 1..2837: mol_type = unassigned DNA
cgggtgggggcgcggggtaccgggctggcggccggccggcgccccctcattagtatgcggacgaaggcggcgggctgcgcggagcggcgtcccctgcagccgcggaccgaggcagcggcggcacctgccggccgaggcactgtgaagacagtggtgtgcaaagcagagacccctgcttgcatggaatctgcattctagtgggggagacaagacaaacgtgtaattcaaaagtaaaaaacttatgaagaatcacatgtctcatgattagtgttataaagaaaaaagaaagcatgcatacaggaatatccacataagcaattttgcttggcccttctcttgtgatgttgagggacgtggaatccacatggtcccttgcaaatcagaagaagtaatgcctgctgagctgaagtagagggatttgatgaaacttcttgggaagtcaaactcttatactgtggaggctaaagcaatgccatcttggatgctaatctgccatgttgacttctgactaaccccagtcccaggaaggcttctaagcaatgccaagtgagtacacctatgtgaaactgagaagtgattgctcgaggccttccctgcaatggtacacccgagctcaaagcaagatgagaaggcccagcttgttattaaaagacatcctcaaatgtacattgcttgtgtttggagtgtggatcctttatatcctcaagttaaattatactactgaagaatgtgacatgaaaaaaatgcattatgtggaccctgaccatgtaaaggttgtttcttcaagtttctgagccaaacttaactctaaaaagcaaatattctgtgttaaaagacagtaatcaacacgggagctacatcagacatcataggacaaattgtcatctagaagagtatatttttaatgcaggagagtttttaaaacccagattggtgtgatttcattccagagagctcagaaatatgctcagcaagtcttgcagaaggaatgtcgtcccaagtttgccaagacatcaatggcgctgttatttgagcacaggtatagcgtggacttactcccttttgtgcagaaggcccccaaagacagtgaagctgagtccaagtacgatcctccttttgggttccggaagttctccagtaaagtccagaccctcttggaactcttgccagagcacgacctccctgaacacttgaaagccaagacctgtcggcgctgtgtggttattggaagcggaggaatactgcacggattagaactgggccacaccctgaaccagttcgatgttgtgataaggttaaacagtgcaccagttgagggatattcagaacatgttggaaataaaactactataaggatgacttatccagagggcgcaccactgtctgaccttgaatattattccaatgacttatttgttgctgttttatttaagagtgttgatttcaactggcttcaagcaatggtaaaaaaggaaaccctgccattctgggtacgactcttcttttggaagcaggtggcagaaaaaatcccactgcagccaaaacatttcaggattttgaatccagttatcatcaaagagactgcctttgacatccttcagtactcagagcctcagtcaaggttctggggccgagataagaacgtccccacaatcggtgtcattgccgttgtcttagccacacatctgtgcgatgaagtcagtttggcgggttttggatatgacctcaatcaacccagaacacctttgcactacttcgacagtcaatgcatggctgctatgaactttcagaccatgcataatgtgacaacggaaaccaagttcctcttaaagctggtcaaagagggagtggtgaaagatctcagtggaggcattgatcgtgaattttgaacacagaaaacctcagttgaaaatgcaactctaactctgagagctgtttttgacagccttcttgatgtatttctccatcctgcagatactttgaagtgcagctcatgtttttaacttttaatttaaaaacacaaaaaaaattttagctcttcccactttttttttcctatttatttgaggtcagtgtttgtttttgcacaccattttgtaaatgaaacttaagaattgaattggaaagacttctcaaagagaattgtatgtaacgatgttgtattgatttttaagaaagtaatttaatttgtaaaacttctgctcgtttacactgcacattgaatacaggtaactaattggaaggagaggggaggtcactcttttgatggtggccctgaacctcattctggttccctgctgcgctgcttggtgtgacccacggaggatccactcccaggatgacgtgctccgtagctctgctgctgatactgggtctgcgatgcagcggcgtgaggcctgggctggttggagaaggtcacaacccttctctgttggtctgccttctgctgaaagactcgagaaccaaccagggaagctgtcctggaggtccctggtcggagagggacatagaatctgtgacctctgacaactgtgaagccaccctgggctacagaaaccacagtcttcccagcaattattacaattcttgaattccttggggattttttactgccctttcaaagcacttaagtgttagatctaacgtgttccagtgtctgtctgaggtgacttaaaaaatcagaacaaaacttctattatccagagtcatgggagagtacaccctttccaggaataatgttttgggaaacactgaaatgaaatcttcccagtattataaattgtgtatttaaaaaaaagaaacttttctgaatgcctacctggcggtgtataccaggc

SEQ ID NO: 20531 - DNA, 2848 bp, Homo sapiens
  misc_feature 1..2848: note = ENST00000640024
  source 1..2848: mol_type = unassigned DNA
gctgggggcgggtgggggcgcggggtaccgggctggcggccggccggcgccccctcattagtatgcggacgaaggcggcgggctgcgcggagcggcgtcccctgcagccgcggaccgaggcagcggcggcacctgccggccgagcaatgccaagtgagtacacctatgtgaaactgagaagtgattgctcgaggccttccctgcaatggtacacccgagctcaaagcaagatgagaaggcccagcttgttattaaaagacatcctcaaatgtacattgcttgtgtttggagtgtggatcctttatatcctcaagttaaattatactactgaagaatgtgacatgaaaaaaatgcattatgtggaccctgaccatgtaaagacctacaccgtgcctttaaaggaagcagggccctccctgctgaagcattcagtgagcccaggcaccagcatcttcaaaccgagtcttttctctccttagtgctgctccccgctttccaggccttcctgggatatcttagagctcctgaaggtgcggcactcgccttgaggcactttcttctgagctgtgagctatgggcaagcagtggagggggaagagagcagctgaagcagatgccggttcaacttacttaaagatgtgggacaagctctgaggaagcccccaagacaatgatgtctggttgtgcaccattgaagcaagaacagaaaccatcccagagtggaggacatggcccatgtggtcctcctgttctgagtggctatgagatggagttctgtgtgagctctctacagaaaaagccctgtctccaggcaatcagtggagatctgttaaacgagttgaaacaaaagaggacaaggaattgctgtggctttagacgttgccaggacatgtagaaactcactcaggatttactactgcatccactgtcacttaggcgcaggaggggtcacagtcagaagagagctcagaaatatgctcagcaagtcttgcagaaggaatgtcgtcccaagtttgccaagacatcaatggcgctgttatttgagcacaggtatagcgtggacttactcccttttgtgcagaaggcccccaaagacagtgaagctgagtccaagtacgatcctccttttgggttccggaagttctccagtaaagtccagaccctcttggaactcttgccagagcacgacctccctgaacacttgaaagccaagacctgtcggcgctgtgtggttattggaagcggaggaatactgcacggattagaactgggccacaccctgaaccagttcgatgttgtgataaggttaaacagtgcaccagttgagggatattcagaacatgttggaaataaaactactataaggatgacttatccagagggcgcaccactgtctgaccttgaatattattccaatgacttatttgttgctgttttatttaagagtgttgatttcaactggcttcaagcaatggtaaaaaaggaaaccctgccattctgggtacgactcttcttttggaagcaggtggcagaaaaaatcccactgcagccaaaacatttcaggattttgaatccagttatcatcaaagagactgcctttgacatccttcagtactcagagcctcagtcaaggttctggggccgagataagaacgtccccacaatcggtgtcattgccgttgtcttagccacacatctgtgcgatgaagtcagtttggcgggttttggatatgacctcaatcaacccagaacacctttgcactacttcgacagtcaatgcatggctgctatgaactttcagaccatgcataatgtgacaacggaaaccaagttcctcttaaagctggtcaaagagggagtggtgaaagatctcagtggaggcattgatcgtgaattttgaacacagaaaacctcagttgaaaatgcaactctaactctgagagctgtttttgacagccttcttgatgtatttctccatcctgcagatactttgaagtgcagctcatgtttttaacttttaatttaaaaacacaaaaaaaattttagctcttcccactttttttttcctatttatttgaggtcagtgtttgtttttgcacaccattttgtaaatgaaacttaagaattgaattggaaagacttctcaaagagaattgtatgtaacgatgttgtattgatttttaagaaagtaatttaatttgtaaaacttctgctcgtttacactgcacattgaatacaggtaactaattggaaggagaggggaggtcactcttttgatggtggccctgaacctcattctggttccctgctgcgctgcttggtgtgacccacggaggatccactcccaggatgacgtgctccgtagctctgctgctgatactgggtctgcgatgcagcggcgtgaggcctgggctggttggagaaggtcacaacccttctctgttggtctgccttctgctgaaagactcgagaaccaaccagggaagctgtcctggaggtccctggtcggagagggacatagaatctgtgacctctgacaactgtgaagccaccctgggctacagaaaccacagtcttcccagcaattattacaattcttgaattccttggggattttttactgccctttcaaagcacttaagtgttagatctaacgtgttccagtgtctgtctgaggtgacttaaaaaatcagaacaaaacttctattatccagagtcatgggagagtacaccctttccaggaataatgttttgggaaacactgaaatgaaatcttcccagtattataaattgtgtatttaaaaaaaagaaacttttctgaatgcctacctggcggtgtataccaggc

SEQ ID NO: 20532 - DNA, 2356 bp, Homo sapiens
  misc_feature 1..2356: note = ENST00000640222
  source 1..2356: mol_type = unassigned DNA
gagcaatgccaagtgagtacacctatgtgaaactgagaagtgattgctcgaggccttccctgcaatggtacacccgagctcaaagcaagatgagaaggcccagcttgttattaaaagacatcctcaaatgtacattgcttgtgtttggagtgtggatcctttatatcctcaagttaaattatactactgaagaatgtgacatgaaaaaaatgcattatgtggaccctgaccatgtaaagaccttatctccctgcggatggcattgcgtgcagttaattatggccagatggactcagccgcttcttcatcgtcttctctcggactctgcagacctacaccgtgcctttaaaggaagcagggccctccctgctgaagcattcagtgagcccaggcaccagcatcttcaaaccgagtcttttctctccttagtgctgctccccgctttccaggccttcctgggatatcttagagagagctcagaaatatgctcagcaagtcttgcagaaggaatgtcgtcccaagtttgccaagacatcaatggcgctgttatttgagcacaggtatagcgtggacttactcccttttgtgcagaaggcccccaaagacagtgaagctgagtccaagtacgatcctccttttgggttccggaagttctccagtaaagtccagaccctcttggaactcttgccagagcacgacctccctgaacacttgaaagccaagacctgtcggcgctgtgtggttattggaagcggaggaatactgcacggattagaactgggccacaccctgaaccagttcgatgttgtgataaggttaaacagtgcaccagttgagggatattcagaacatgttggaaataaaactactataaggatgacttatccagagggcgcaccactgtctgaccttgaatattattccaatgacttatttgttgctgttttatttaagagtgttgatttcaactggcttcaagcaatggtaaaaaaggaaaccctgccattctgggtacgactcttcttttggaagcaggtggcagaaaaaatcccactgcagccaaaacatttcaggattttgaatccagttatcatcaaagagactgcctttgacatccttcagtactcagagcctcagtcaaggttctggggccgagataagaacgtccccacaatcggtgtcattgccgttgtcttagccacacatctgtgcgatgaagtcagtttggcgggttttggatatgacctcaatcaacccagaacacctttgcactacttcgacagtcaatgcatggctgctatgaactttcagaccatgcataatgtgacaacggaaaccaagttcctcttaaagctggtcaaagagggagtggtgaaagatctcagtggaggcattgatcgtgaattttgaacacagaaaacctcagttgaaaatgcaactctaactctgagagctgtttttgacagccttcttgatgtatttctccatcctgcagatactttgaagtgcagctcatgtttttaacttttaatttaaaaacacaaaaaaaattttagctcttcccactttttttttcctatttatttgaggtcagtgtttgtttttgcacaccattttgtaaatgaaacttaagaattgaattggaaagacttctcaaagagaattgtatgtaacgatgttgtattgatttttaagaaagtaatttaatttgtaaaacttctgctcgtttacactgcacattgaatacaggtaactaattggaaggagaggggaggtcactcttttgatggtggccctgaacctcattctggttccctgctgcgctgcttggtgtgacccacggaggatccactcccaggatgacgtgctccgtagctctgctgctgatactgggtctgcgatgcagcggcgtgaggcctgggctggttggagaaggtcacaacccttctctgttggtctgccttctgctgaaagactcgagaaccaaccagggaagctgtcctggaggtccctggtcggagagggacatagaatctgtgacctctgacaactgtgaagccaccctgggctacagaaaccacagtcttcccagcaattattacaattcttgaattccttggggattttttactgccctttcaaagcacttaagtgttagatctaacgtgttccagtgtctgtctgaggtgacttaaaaaatcagaacaaaacttctattatccagagtcatgggagagtacaccctttccaggaataatgttttgggaaacactgaaatgaaatcttcccagtattataaattgtgtatttaaaaaaaagaaacttttctgaatgcctacctggcggtgtataccag

SEQ ID NO: 20533 - DNA, 2034 bp, Homo sapiens
  misc_feature 1..2034: note = ENST00000638178
  source 1..2034: mol_type = unassigned DNA
ctcaggcgagcccggctggggcgcgggcggagggtcgtggtcccgggccgtgtggaccgggcggggggtcccacgcagcaatgccaagtgagtacacctatgtgaaactgagaagtgattgctcgaggccttccctgcaatggtacacccgagctcaaagcaagatgagaaggcccagcttgttattaaaagacatcctcaaatgtacattgcttgtgtttggagtgtggatcctttatatcctcaagttaaattatactactgaagaatgtgacatgaaaaaaatgcattatgtggaccctgaccatgtaaagagagctcagaaatatgctcagcaagtcttgcagaaggaatgtcgtcccaagtttgccaagacatcaatggcgctgttatttgagcacaggtatagcgtggacttactcccttttgtgcagaaggcccccaaagacagtgaagctgagtccaagtacgatcctccttttgggttccggaagttctccagtaaagtccagaccctcttggaactcttgccagagcacgacctccctgaacacttgaaagccaagacctgtcggcgctgtgtggttattggaagcggaggaatactgcacggattagaactgggccacaccctgaaccagttcgatgttgtgataaggttaaacagtgcaccagttgagggatattcagaacatgttggaaataaaactactataaggatgacttatccagagggcgcaccactgtctgaccttgaatattattccaatgacttatttgttgctgttttatttaagagtgttgatttcaactggcttcaagcaatggtaaaaaaggaaaccctgaacgtccccacaatcggtgtcattgccgttgtcttagccacacatctgtgcgatgaagtcagtttggcgggttttggatatgacctcaatcaacccagaacacctttgcactacttcgacagtcaatgcatggctgctatgaactttcagaccatgcataatgtgacaacggaaaccaagttcctcttaaagctggtcaaagagggagtggtgaaagatctcagtggaggcattgatcgtgaattttgaacacagaaaacctcagttgaaaatgcaactctaactctgagagctgtttttgacagccttcttgatgtatttctccatcctgcagatactttgaagtgcagctcatgtttttaacttttaatttaaaaacacaaaaaaaattttagctcttcccactttttttttcctatttatttgaggtcagtgtttgtttttgcacaccattttgtaaatgaaacttaagaattgaattggaaagacttctcaaagagaattgtatgtaacgatgttgtattgatttttaagaaagtaatttaatttgtaaaacttctgctcgtttacactgcacattgaatacaggtaactaattggaaggagaggggaggtcactcttttgatggtggccctgaacctcattctggttccctgctgcgctgcttggtgtgacccacggaggatccactcccaggatgacgtgctccgtagctctgctgctgatactgggtctgcgatgcagcggcgtgaggcctgggctggttggagaaggtcacaacccttctctgttggtctgccttctgctgaaagactcgagaaccaaccagggaagctgtcctggaggtccctggtcggagagggacatagaatctgtgacctctgacaactgtgaagccaccctgggctacagaaaccacagtcttcccagcaattattacaattcttgaattccttggggattttttactgccctttcaaagcacttaagtgttagatctaacgtgttccagtgtctgtctgaggtgacttaaaaaatcagaacaaaacttctattatccagagtcatgggagagtacaccctttccaggaataatgttttgggaaacactgaaatgaaatcttcccagtattataaattgtgtatttaaaaaaaagaaacttttctgaatgcctacctggcggtgta

SEQ ID NO: 20534 - DNA, 2180 bp, Homo sapiens
  misc_feature 1..2180: note = ENST00000638855
  source 1..2180: mol_type = unassigned DNA
ggcggcccccagctgaatgggcgcgagagcggcgctgggggcgggtgggggcgcggggtaccgggctggcggccggccggcgccccctcattagtatgcggacgaaggcggcgggctgcgcggagcggcgtcccctgcagccgcggaccgaggcagcggcggcacctgccggccgagcaatgccaagtgagtacacctatgtgaaactgagaagtgattgctcgaggccttccctgcaatggtacacccgagctcaaagcaagatgagaaggcccagcttgttattaaaagacatcctcaaagagctcagaaatatgctcagcaagtcttgcagaaggaatgtcgtcccaagtttgccaagacatcaatggcgctgttatttgagcacaggtatagcgtggacttactcccttttgtgcagaaggcccccaaagacagtgaagctgagtccaagtacgatcctccttttgggttccggaagttctccagtaaagtccagaccctcttggaactcttgccagagcacgacctccctgaacacttgaaagccaagacctgtcggcgctgtgtggttattggaagcggaggaatactgcacggattagaactgggccacaccctgaaccagttcgatgttgtgataaggttaaacagtgcaccagttgagggatattcagaacatgttggaaataaaactactataaggatgacttatccagagggcgcaccactgtctgaccttgaatattattccaatgacttatttgttgctgttttatttaagagtgttgatttcaactggcttcaagcaatggtaaaaaaggaaaccctgccattctgggtacgactcttcttttggaagcaggtggcagaaaaaatcccactgcagccaaaacatttcaggattttgaatccagttatcatcaaagagactgcctttgacatccttcagtactcagagcctcagtcaaggttctggggccgagataagaacgtccccacaatcggtgtcattgccgttgtcttagccacacatctgtgcgatgaagtcagtttggcgggttttggatatgacctcaatcaacccagaacacctttgcactacttcgacagtcaatgcatggctgctatgaactttcagaccatgcataatgtgacaacggaaaccaagttcctcttaaagctggtcaaagagggagtggtgaaagatctcagtggaggcattgatcgtgaattttgaacacagaaaacctcagttgaaaatgcaactctaactctgagagctgtttttgacagccttcttgatgtatttctccatcctgcagatactttgaagtgcagctcatgtttttaacttttaatttaaaaacacaaaaaaaattttagctcttcccactttttttttcctatttatttgaggtcagtgtttgtttttgcacaccattttgtaaatgaaacttaagaattgaattggaaagacttctcaaagagaattgtatgtaacgatgttgtattgatttttaagaaagtaatttaatttgtaaaacttctgctcgtttacactgcacattgaatacaggtaactaattggaaggagaggggaggtcactcttttgatggtggccctgaacctcattctggttccctgctgcgctgcttggtgtgacccacggaggatccactcccaggatgacgtgctccgtagctctgctgctgatactgggtctgcgatgcagcggcgtgaggcctgggctggttggagaaggtcacaacccttctctgttggtctgccttctgctgaaagactcgagaaccaaccagggaagctgtcctggaggtccctggtcggagagggacatagaatctgtgacctctgacaactgtgaagccaccctgggctacagaaaccacagtcttcccagcaattattacaattcttgaattccttggggattttttactgccctttcaaagcacttaagtgttagatctaacgtgttccagtgtctgtctgaggtgacttaaaaaatcagaacaaaacttctattatccagagtcatgggagagtacaccctttccaggaataatgttttgggaaacactgaaatgaaatcttcccagtattataaattgtgtatttaaaaaaaagaaacttttctgaatgcctacctggcggtgta

SEQ ID NO: 20535 - DNA, 2995 bp, Homo sapiens
  misc_feature 1..2995: note = ENST00000638288
  source 1..2995: mol_type = unassigned DNA
ctcgaaccccgcgggcagcgcccagggcacgacaccctcaggcgagcccggctggggcgcgggcggagggtcgtggtcccgggccgtgtggaccgggcggggggtcccacgcaggcactgtgaagacagtggtgtgcaaagcagagacccctgcttgcatggaatctgcattctagtgggggagacaagacaaacgtgtaattcaaaagtaaaaaacttatgaagaatcacatgtctcatgattagtgttataaagaaaaaagaaagcatgcatacaggaatatccacataagcaattttgcaatgccaagtgagtacacctatgtgaaactgagaagtgattgctcgaggccttccctgcaatggtacacccgagctcaaagcaagatgagaaggcccagcttgttattaaaagacatcctcaaatgtacattgcttgtgtttggagtgtggatcctttatatcctcaagttaaattatactactgaagaatgtgacatgaaaaaaatgcattatgtggaccctgaccatgtaaagacctacaccgtgcctttaaaggaagcagggccctccctgctgaagcattcagtgagcccaggcaccagcatcttcaaaccgagtcttttctctccttagtgctgctccccgctttccaggccttcctgggatatcttagagctcctgaaggtgcggcactcgccttgaggcactttcttctgagctgtgagctatgggcaagcagtggagggggaagagagcagctgaagcagatgccggttcaacttacttaaagatgtgggacaagctctgaggaagcccccaagacaatgatgtctggttgtgcaccattgaagcaagaacagaaaccatcccagagtggaggacatggcccatgtggtcctcctgttctgagtggctatgagatggagttctgtgtgagctctctacagaaaaagccctgtctccaggcaatcagtggagatctgttaaacgagttgaaacaaaagaggacaaggaattgctgtggctttagacgttgccaggacatgtagaaactcactcaggatttactactgcatccactgtcacttaggcgcaggaggggtcacagtcagaagagagctcagaaatatgctcagcaagtcttgcagaaggaatgtcgtcccaagtttgccaagacatcaatggcgctgttatttgagcacaggtatagcgtggacttactcccttttgtgcagaaggcccccaaagacagtgaagctgagtccaagtacgatcctccttttgggttccggaagttctccagtaaagtccagaccctcttggaactcttgccagagcacgacctccctgaacacttgaaagccaagacctgtcggcgctgtgtggttattggaagcggaggaatactgcacggattagaactgggccacaccctgaaccagttcgatgttgtgataaggttaaacagtgcaccagttgagggatattcagaacatgttggaaataaaactactataaggatgacttatccagagggcgcaccactgtctgaccttgaatattattccaatgacttatttgttgctgttttatttaagagtgttgatttcaactggcttcaagcaatggtaaaaaaggaaaccctgccattctgggtacgactcttcttttggaagcaggtggcagaaaaaatcccactgcagccaaaacatttcaggattttgaatccagttatcatcaaagagactgcctttgacatccttcagtactcagagcctcagtcaaggttctggggccgagataagaacgtccccacaatcggtgtcattgccgttgtcttagccacacatctgtgcgatgaagtcagtttggcgggttttggatatgacctcaatcaacccagaacacctttgcactacttcgacagtcaatgcatggctgctatgaactttcagaccatgcataatgtgacaacggaaaccaagttcctcttaaagctggtcaaagagggagtggtgaaagatctcagtggaggcattgatcgtgaattttgaacacagaaaacctcagttgaaaatgcaactctaactctgagagctgtttttgacagccttcttgatgtatttctccatcctgcagatactttgaagtgcagctcatgtttttaacttttaatttaaaaacacaaaaaaaattttagctcttcccactttttttttcctatttatttgaggtcagtgtttgtttttgcacaccattttgtaaatgaaacttaagaattgaattggaaagacttctcaaagagaattgtatgtaacgatgttgtattgatttttaagaaagtaatttaatttgtaaaacttctgctcgtttacactgcacattgaatacaggtaactaattggaaggagaggggaggtcactcttttgatggtggccctgaacctcattctggttccctgctgcgctgcttggtgtgacccacggaggatccactcccaggatgacgtgctccgtagctctgctgctgatactgggtctgcgatgcagcggcgtgaggcctgggctggttggagaaggtcacaacccttctctgttggtctgccttctgctgaaagactcgagaaccaaccagggaagctgtcctggaggtccctggtcggagagggacatagaatctgtgacctctgacaactgtgaagccaccctgggctacagaaaccacagtcttcccagcaattattacaattcttgaattccttggggattttttactgccctttcaaagcacttaagtgttagatctaacgtgttccagtgtctgtctgaggtgacttaaaaaatcagaacaaaacttctattatccagagtcatgggagagtacaccctttccaggaataatgttttgggaaacactgaaatgaaatcttcccagtattataaattgtgtatttaaaaaaaagaaacttttctgaatgcctacctggcggtg

SEQ ID NO: 20536 - DNA, 2160 bp, Homo sapiens
  misc_feature 1..2160: note = ENST00000639305
  source 1..2160: mol_type = unassigned DNA
gcggacgaaggcggcgggctgcgcggagcggcgtcccctgcagccgcggaccgaggcagcggcggcacctgccggccgagcaatgccaagtgagtacacctatgtgaaactgagaagtgattgctcgaggccttccctgcaatggtacacccgagctcaaagcaagatgagaaggcccagcttgttattaaaagacatcctcaaatgtacattgcttgtgtttggagtgtggatcctttatatcctcaagttaaattatactactgaagaatgtgacatgaaaaaaatgcattatgtggaccctgaccatgtaaagagagctcagaaatatgctcagcaagtcttgcagaaggaatgtcgtcccaagtttgccaagacatcaatggcgctgttatttgagcacaggtatagcgtggacttactcccttttgtgcagaaggcccccaaagacagtgaagctgagtccaagtacgatcctccttttgggttccggaagttctccagtaaagtccagaccctcttggaactcttgccagagcacgacctccctgaacacttgaaagccaagacctgtcggcgctgtgtggttattggaagcggaggaatactgcacggattagaactgggccacaccctgaaccagttcgatgttgtgataaggttaaacagtgcaccagttgagggatattcagaacatgttggaaataaaactactataaggatgacttatccagagggcgcaccactgtctgaccttgaatattattccaatgacttatttgttgctgttttatttaagagtgttgatttcaactggcttcaagcaatggtaaaaaaggaaaccctggtggcagaaaaaatcccactgcagccaaaacatttcaggattttgaatccagttatcatcaaagagactgcctttgacatccttcagtactcagagcctcagtcaaggttctggggccgagataagaacgtccccacaatcggtgtcattgccgttgtcttagccacacatctgtgcgatgaagtcagtttggcgggttttggatatgacctcaatcaacccagaacacctttgcactacttcgacagtcaatgcatggctgctatgaactttcagaccatgcataatgtgacaacggaaaccaagttcctcttaaagctggtcaaagagggagtggtgaaagatctcagtggaggcattgatcgtgaattttgaacacagaaaacctcagttgaaaatgcaactctaactctgagagctgtttttgacagccttcttgatgtatttctccatcctgcagatactttgaagtgcagctcatgtttttaacttttaatttaaaaacacaaaaaaaattttagctcttcccactttttttttcctatttatttgaggtcagtgtttgtttttgcacaccattttgtaaatgaaacttaagaattgaattggaaagacttctcaaagagaattgtatgtaacgatgttgtattgatttttaagaaagtaatttaatttgtaaaacttctgctcgtttacactgcacattgaatacaggtaactaattggaaggagaggggaggtcactcttttgatggtggccctgaacctcattctggttccctgctgcgctgcttggtgtgacccacggaggatccactcccaggatgacgtgctccgtagctctgctgctgatactgggtctgcgatgcagcggcgtgaggcctgggctggttggagaaggtcacaacccttctctgttggtctgccttctgctgaaagactcgagaaccaaccagggaagctgtcctggaggtccctggtcggagagggacatagaatctgtgacctctgacaactgtgaagccaccctgggctacagaaaccacagtcttcccagcaattattacaattcttgaattccttggggattttttactgccctttcaaagcacttaagtgttagatctaacgtgttccagtgtctgtctgaggtgacttaaaaaatcagaacaaaacttctattatccagagtcatgggagagtacaccctttccaggaataatgttttgggaaacactgaaatgaaatcttcccagtattataaattgtgtatttaaaaaaaagaaacttttctgaatgcctacctggcggtg

SEQ ID NO: 20537 - DNA, 2331 bp, Homo sapiens
  misc_feature 1..2331: note = ENST00000638986
  source 1..2331: mol_type = unassigned DNA
ttagtatgcggacgaaggcggcgggctgcgcggagcggcgtcccctgcagccgcggaccgaggcagcggcggcacctgccggccgagatgagtgagaatcgtaacattttattggaggaaggagccatagaaatgttgtcacccaaccctgctttctacagattaccaaacatcctcaaagagattgagtgatttggctgttatcaaatagccaaacacaatgccaagtgagtacacctatgtgaaactgagaagtgattgctcgaggccttccctgcaatggtacacccgagctcaaagcaagatgagaaggcccagcttgttattaaaagacatcctcaaatgtacattgcttgtgtttggagtgtggatcctttatatcctcaagttaaattatactactgaagaatgtgacatgaaaaaaatgcattatgtggaccctgaccatgtaaagagagctcagaaatatgctcagcaagtcttgcagaaggaatgtcgtcccaagtttgccaagacatcaatggcgctgttatttgagcacaggtatagcgtggacttactcccttttgtgcagaaggcccccaaagacagtgaagctgagtccaagtacgatcctccttttgggttccggaagttctccagtaaagtccagaccctcttggaactcttgccagagcacgacctccctgaacacttgaaagccaagacctgtcggcgctgtgtggttattggaagcggaggaatactgcacggattagaactgggccacaccctgaaccagttcgatgttgtgataaggttaaacagtgcaccagttgagggatattcagaacatgttggaaataaaactactataaggatgacttatccagagggcgcaccactgtctgaccttgaatattattccaatgacttatttgttgctgttttatttaagagtgttgatttcaactggcttcaagcaatggtaaaaaaggaaaccctgccattctgggtacgactcttcttttggaagcaggtggcagaaaaaatcccactgcagccaaaacatttcaggattttgaatccagttatcatcaaagagactgcctttgacatccttcagtactcagagcctcagtcaaggttctggggccgagataagaacgtccccacaatcggtgtcattgccgttgtcttagccacacatctgtgcgatgaagtcagtttggcgggttttggatatgacctcaatcaacccagaacacctttgcactacttcgacagtcaatgcatggctgctatgaactttcagaccatgcataatgtgacaacggaaaccaagttcctcttaaagctggtcaaagagggagtggtgaaagatctcagtggaggcattgatcgtgaattttgaacacagaaaacctcagttgaaaatgcaactctaactctgagagctgtttttgacagccttcttgatgtatttctccatcctgcagatactttgaagtgcagctcatgtttttaacttttaatttaaaaacacaaaaaaaattttagctcttcccactttttttttcctatttatttgaggtcagtgtttgtttttgcacaccattttgtaaatgaaacttaagaattgaattggaaagacttctcaaagagaattgtatgtaacgatgttgtattgatttttaagaaagtaatttaatttgtaaaacttctgctcgtttacactgcacattgaatacaggtaactaattggaaggagaggggaggtcactcttttgatggtggccctgaacctcattctggttccctgctgcgctgcttggtgtgacccacggaggatccactcccaggatgacgtgctccgtagctctgctgctgatactgggtctgcgatgcagcggcgtgaggcctgggctggttggagaaggtcacaacccttctctgttggtctgccttctgctgaaagactcgagaaccaaccagggaagctgtcctggaggtccctggtcggagagggacatagaatctgtgacctctgacaactgtgaagccaccctgggctacagaaaccacagtcttcccagcaattattacaattcttgaattccttggggattttttactgccctttcaaagcacttaagtgttagatctaacgtgttccagtgtctgtctgaggtgacttaaaaaatcagaacaaaacttctattatccagagtcatgggagagtacaccctttccaggaataatgttttgggaaacactgaaatgaaatcttcccagtattataaattgtgtatttaaaaaaaagaaacttttctgaatgcctacctggcggtg

SEQ ID NO: 20538 - DNA, 2457 bp, Homo sapiens
  misc_feature 1..2457: note = ENST00000639608
  source 1..2457: mol_type = unassigned DNA
agctgaatgggcgcgagagcggcgctgggggcgggtgggggcgcggggtaccgggctggcggccggccggcgccccctcattagtatgcggacgaaggcggcgggctgcgcggagcggcgtcccctgcagccgcggaccgaggcagcggcggcacctgccggccgagcaatgccaagtgagtacacctatgtgaaactgagaagtgattgctcgaggccttccctgcaatggtacacccgagctcaaagcaagatgagaaggcccagcttgttattaaaagacatcctcaaatgtacattgcttgtgtttggagtgtggatcctttatatcctcaagttaaattatactactgaagaatgtgacatgaaaaaaatgcattatgtggaccctgaccatgtaaaggttgtttcttcaagtttctgagccaaacttaactctaaaaagcaaatattctgtgttaaaagacagtaatcaacacgggagctacatcagacatcataggacaaattgtcatctagaagagtatatttttaatgcaggagagtttttaaaacccagattggtgtgatttcattccagagagctcagaaatatgctcagcaagtcttgcagaaggaatgtcgtcccaagtttgccaagacatcaatggcgctgttatttgagcacaggtatagcgtggacttactcccttttgtgcagaaggcccccaaagacagtgaagctgagtccaagtacgatcctccttttgggttccggaagttctccagtaaagtccagaccctcttggaactcttgccagagcacgacctccctgaacacttgaaagccaagacctgtcggcgctgtgtggttattggaagcggaggaatactgcacggattagaactgggccacaccctgaaccagttcgatgttgtgataaggttaaacagtgcaccagttgagggatattcagaacatgttggaaataaaactactataaggatgacttatccagagggcgcaccactgtctgaccttgaatattattccaatgacttatttgttgctgttttatttaagagtgttgatttcaactggcttcaagcaatggtaaaaaaggaaaccctgccattctgggtacgactcttcttttggaagcaggtggcagaaaaaatcccactgcagccaaaacatttcaggattttgaatccagttatcatcaaagagactgcctttgacatccttcagtactcagagcctcagtcaaggttctggggccgagataagaacgtccccacaatcggtgtcattgccgttgtcttagccacacatctgtgcgatgaagtcagtttggcgggttttggatatgacctcaatcaacccagaacacctttgcactacttcgacagtcaatgcatggctgctatgaactttcagaccatgcataatgtgacaacggaaaccaagttcctcttaaagctggtcaaagagggagtggtgaaagatctcagtggaggcattgatcgtgaattttgaacacagaaaacctcagttgaaaatgcaactctaactctgagagctgtttttgacagccttcttgatgtatttctccatcctgcagatactttgaagtgcagctcatgtttttaacttttaatttaaaaacacaaaaaaaattttagctcttcccactttttttttcctatttatttgaggtcagtgtttgtttttgcacaccattttgtaaatgaaacttaagaattgaattggaaagacttctcaaagagaattgtatgtaacgatgttgtattgatttttaagaaagtaatttaatttgtaaaacttctgctcgtttacactgcacattgaatacaggtaactaattggaaggagaggggaggtcactcttttgatggtggccctgaacctcattctggttccctgctgcgctgcttggtgtgacccacggaggatccactcccaggatgacgtgctccgtagctctgctgctgatactgggtctgcgatgcagcggcgtgaggcctgggctggttggagaaggtcacaacccttctctgttggtctgccttctgctgaaagactcgagaaccaaccagggaagctgtcctggaggtccctggtcggagagggacatagaatctgtgacctctgacaactgtgaagccaccctgggctacagaaaccacagtcttcccagcaattattacaattcttgaattccttggggattttttactgccctttcaaagcacttaagtgttagatctaacgtgttccagtgtctgtctgaggtgacttaaaaaatcagaacaaaacttctattatccagagtcatgggagagtacaccctttccaggaataatgttttgggaaacactgaaatgaaatcttcccagtattataaattgtgtatttaaaaaaaagaaacttttctgaatgcctacctggcggtg

SEQ ID NO: 20539 - DNA, 2967 bp, Homo sapiens
  misc_feature 1..2967: note = ENST00000639541
  source 1..2967: mol_type = unassigned DNA
ggcccccagctgaatgggcgcgagagcggcgctgggggcgggtgggggcgcggggtaccgggctggcggccggccggcgccccctcattagtatgcggacgaaggcggcgggctgcgcggagcggcgtcccctgcagccgcggaccgaggcagcggcggcacctgccggccgagcaatgccaagtgagtacacctatgtgaaactgagaagtgattgctcgaggccttccctgcaatggtacacccgagctcaaagcaagatgagaaggcccagcttgttattaaaagacatcctcaaatgtacattgcttgtgtttggagtgtggatcctttatatcctcaagttaaattatactactgaagaatgtgacatgaaaaaaatgcattatgtggaccctgaccatgtaaagagctaaagaccttatctccctgcggatggcattgcgtgcagttaattatggccagatggactcagccgcttcttcatcgtcttctctcggactctgcagacctacaccgtgcctttaaaggaagcagggccctccctgctgaagcattcagtgagcccaggcaccagcatcttcaaaccgagtcttttctctccttagtgctgctccccgctttccaggccttcctgggatatcttagagctcctgaaggtgcggcactcgccttgaggcactttcttctgagctgtgagctatgggcaagcagtggagggggaagagagcagctgaagcagatgccggttcaacttacttaaagatgtgggacaagctctgaggaagcccccaagacaatgatgtctggttgtgcaccattgaagcaagaacagaaaccatcccagagtggaggacatggcccatgtggtcctcctgttctgagtggctatgagatggagttctgtgtgagctctctacagaaaaagccctgtctccaggcaatcagtggagatctgttaaacgagttgaaacaaaagaggacaaggaattgctgtggctttagacgttgccaggacatgtagaaactcactcaggatttactactgcatccactgtcacttaggcgcaggaggggtcacagtcagaagagagctcagaaatatgctcagcaagtcttgcagaaggaatgtcgtcccaagtttgccaagacatcaatggcgctgttatttgagcacaggtatagcgtggacttactcccttttgtgcagaaggcccccaaagacagtgaagctgagtccaagtacgatcctccttttgggttccggaagttctccagtaaagtccagaccctcttggaactcttgccagagcacgacctccctgaacacttgaaagccaagacctgtcggcgctgtgtggttattggaagcggaggaatactgcacggattagaactgggccacaccctgaaccagttcgatgttgtgataaggttaaacagtgcaccagttgagggatattcagaacatgttggaaataaaactactataaggatgacttatccagagggcgcaccactgtctgaccttgaatattattccaatgacttatttgttgctgttttatttaagagtgttgatttcaactggcttcaagcaatggtaaaaaaggaaaccctgccattctgggtacgactcttcttttggaagcaggtggcagaaaaaatcccactgcagccaaaacatttcaggattttgaatccagttatcatcaaagagactgcctttgacatccttcagtactcagagcctcagtcaaggttctggggccgagataagaacgtccccacaatcggtgtcattgccgttgtcttagccacacatctgtgcgatgaagtcagtttggcgggttttggatatgacctcaatcaacccagaacacctttgcactacttcgacagtcaatgcatggctgctatgaactttcagaccatgcataatgtgacaacggaaaccaagttcctcttaaagctggtcaaagagggagtggtgaaagatctcagtggaggcattgatcgtgaattttgaacacagaaaacctcagttgaaaatgcaactctaactctgagagctgtttttgacagccttcttgatgtatttctccatcctgcagatactttgaagtgcagctcatgtttttaacttttaatttaaaaacacaaaaaaaattttagctcttcccactttttttttcctatttatttgaggtcagtgtttgtttttgcacaccattttgtaaatgaaacttaagaattgaattggaaagacttctcaaagagaattgtatgtaacgatgttgtattgatttttaagaaagtaatttaatttgtaaaacttctgctcgtttacactgcacattgaatacaggtaactaattggaaggagaggggaggtcactcttttgatggtggccctgaacctcattctggttccctgctgcgctgcttggtgtgacccacggaggatccactcccaggatgacgtgctccgtagctctgctgctgatactgggtctgcgatgcagcggcgtgaggcctgggctggttggagaaggtcacaacccttctctgttggtctgccttctgctgaaagactcgagaaccaaccagggaagctgtcctggaggtccctggtcggagagggacatagaatctgtgacctctgacaactgtgaagccaccctgggctacagaaaccacagtcttcccagcaattattacaattcttgaattccttggggattttttactgccctttcaaagcacttaagtgttagatctaacgtgttccagtgtctgtctgaggtgacttaaaaaatcagaacaaaacttctattatccagagtcatgggagagtacaccctttccaggaataatgttttgggaaacactgaaatgaaatcttcccagtattataaattgtgtatttaaaaaaaagaaacttttctgaatgcctacctggcggtg

SEQ ID NO: 20540 - DNA, 2434 bp, Homo sapiens
  misc_feature 1..2434: note = ENST00000639945
  source 1..2434: mol_type = unassigned DNA
agtatgcggacgaaggcggcgggctgcgcggagcggcgtcccctgcagccgcggaccgaggcagcggcggcacctgccggccgagcaatgccaagtgagtacacctatgtgaaactgagaagtgattgctcgaggccttccctgcaatggtacacccgagctcaaagcaagatgagaaggcccagcttgttattaaaagacatcctcaaatgtacattgcttgtgtttggagtgtggatcctttatatcctcaagttaaattatactactgaagaatgtgacatgaaaaaaatgcattatgtggaccctgaccatgtaaagagctaaagaccttatctccctgcggatggcattgcgtgcagttaattatggccagatggactcagccgcttcttcatcgtcttctctcggactctgcagacctacaccgtgcctttaaaggaagcagggccctccctgctgaagcattcagtgagcccaggcaccagcatcttcaaaccgagtcttttctctccttagtgctgctccccgctttccaggccttcctgggatatcttagagagagctcagaaatatgctcagcaagtcttgcagaaggaatgtcgtcccaagtttgccaagacatcaatggcgctgttatttgagcacaggtatagcgtggacttactcccttttgtgcagaaggcccccaaagacagtgaagctgagtccaagtacgatcctccttttgggttccggaagttctccagtaaagtccagaccctcttggaactcttgccagagcacgacctccctgaacacttgaaagccaagacctgtcggcgctgtgtggttattggaagcggaggaatactgcacggattagaactgggccacaccctgaaccagttcgatgttgtgataaggttaaacagtgcaccagttgagggatattcagaacatgttggaaataaaactactataaggatgacttatccagagggcgcaccactgtctgaccttgaatattattccaatgacttatttgttgctgttttatttaagagtgttgatttcaactggcttcaagcaatggtaaaaaaggaaaccctgccattctgggtacgactcttcttttggaagcaggtggcagaaaaaatcccactgcagccaaaacatttcaggattttgaatccagttatcatcaaagagactgcctttgacatccttcagtactcagagcctcagtcaaggttctggggccgagataagaacgtccccacaatcggtgtcattgccgttgtcttagccacacatctgtgcgatgaagtcagtttggcgggttttggatatgacctcaatcaacccagaacacctttgcactacttcgacagtcaatgcatggctgctatgaactttcagaccatgcataatgtgacaacggaaaccaagttcctcttaaagctggtcaaagagggagtggtgaaagatctcagtggaggcattgatcgtgaattttgaacacagaaaacctcagttgaaaatgcaactctaactctgagagctgtttttgacagccttcttgatgtatttctccatcctgcagatactttgaagtgcagctcatgtttttaacttttaatttaaaaacacaaaaaaaattttagctcttcccactttttttttcctatttatttgaggtcagtgtttgtttttgcacaccattttgtaaatgaaacttaagaattgaattggaaagacttctcaaagagaattgtatgtaacgatgttgtattgatttttaagaaagtaatttaatttgtaaaacttctgctcgtttacactgcacattgaatacaggtaactaattggaaggagaggggaggtcactcttttgatggtggccctgaacctcattctggttccctgctgcgctgcttggtgtgacccacggaggatccactcccaggatgacgtgctccgtagctctgctgctgatactgggtctgcgatgcagcggcgtgaggcctgggctggttggagaaggtcacaacccttctctgttggtctgccttctgctgaaagactcgagaaccaaccagggaagctgtcctggaggtccctggtcggagagggacatagaatctgtgacctctgacaactgtgaagccaccctgggctacagaaaccacagtcttcccagcaattattacaattcttgaattccttggggattttttactgccctttcaaagcacttaagtgttagatctaacgtgttccagtgtctgtctgaggtgacttaaaaaatcagaacaaaacttctattatccagagtcatgggagagtacaccctttccaggaataatgttttgggaaacactgaaatgaaatcttcccagtattataaattgtgtatttaaaaaaaagaaacttttctgaatgcctacctggc

SEQ ID NO: 20541 - DNA, 2940 bp, Homo sapiens
  misc_feature 1..2940: note = ENST00000638956
  source 1..2940: mol_type = unassigned DNA
gcccacgcgcccctcctccgcatctgagcgggggagcggcggcccccagctgaatgggcgcgagagcggcgctgggggcgggtgggggcgcggggtaccgggctggcggccggccggcgccccctcattagtatgcggacgaaggcggcgggctgcgcggagcggcgtcccctgcagccgcggaccgaggcagcggcggcacctgccggccgagcaatgccaagtgagtacacctatgtgaaactgagaagtgattgctcgaggccttccctgcaatggtacacccgagctcaaagcaagatgagaaggcccagcttgttattaaaagacatcctcaaatgtacattgcttgtgtttggagtgtggatcctttatatcctcaagttaaattatactactgaagaatgtgacatgaaaaaaatgcattatgtggaccctgaccatgtaaagctcctgaaggtgcggcactcgccttgaggcactttcttctgagctgtgagctatgggcaagcagtggagggggaagagagcagctgaagcagatgccggttcaacttacttaaagatgtgggacaagctctgaggaagcccccaagacaatgatgtctggttgtgcaccattgaagcaagaacagaaaccatcccagagtggaggacatggcccatgtggtcctcctgttctgagtggctatgagatggagttctgtgtgagctctctacagaaaaagccctgtctccaggcaatcagtggagatctgttaaacgagttgaaacaaaagaggacaaggaattgctgtggctttagacgttgccaggacatgtagaaactcactcaggatttactactgcatccactgtcacttaggcgcaggaggggtcacagtcagaaggttgtttcttcaagtttctgagccaaacttaactctaaaaagcaaatattctgtgttaaaagacagtaatcaacacgggagctacatcagacatcataggacaaattgtcatctagaagagtatatttttaatgcaggagagtttttaaaacccagattggtgtgatttcattccagagagctcagaaatatgctcagcaagtcttgcagaaggaatgtcgtcccaagtttgccaagacatcaatggcgctgttatttgagcacaggtatagcgtggacttactcccttttgtgcagaaggcccccaaagacagtgaagctgagtccaagtacgatcctccttttgggttccggaagttctccagtaaagtccagaccctcttggaactcttgccagagcacgacctccctgaacacttgaaagccaagacctgtcggcgctgtgtggttattggaagcggaggaatactgcacggattagaactgggccacaccctgaaccagttcgatgttgtgataaggttaaacagtgcaccagttgagggatattcagaacatgttggaaataaaactactataaggatgacttatccagagggcgcaccactgtctgaccttgaatattattccaatgacttatttgttgctgttttatttaagagtgttgatttcaactggcttcaagcaatggtaaaaaaggaaaccctgccattctgggtacgactcttcttttggaagcaggtggcagaaaaaatcccactgcagccaaaacatttcaggattttgaatccagttatcatcaaagagactgcctttgacatccttcagtactcagagcctcagtcaaggttctggggccgagataagaacgtccccacaatcggtgtcattgccgttgtcttagccacacatctgtgcgatgaagtcagtttggcgggttttggatatgacctcaatcaacccagaacacctttgcactacttcgacagtcaatgcatggctgctatgaactttcagaccatgcataatgtgacaacggaaaccaagttcctcttaaagctggtcaaagagggagtggtgaaagatctcagtggaggcattgatcgtgaattttgaacacagaaaacctcagttgaaaatgcaactctaactctgagagctgtttttgacagccttcttgatgtatttctccatcctgcagatactttgaagtgcagctcatgtttttaacttttaatttaaaaacacaaaaaaaattttagctcttcccactttttttttcctatttatttgaggtcagtgtttgtttttgcacaccattttgtaaatgaaacttaagaattgaattggaaagacttctcaaagagaattgtatgtaacgatgttgtattgatttttaagaaagtaatttaatttgtaaaacttctgctcgtttacactgcacattgaatacaggtaactaattggaaggagaggggaggtcactcttttgatggtggccctgaacctcattctggttccctgctgcgctgcttggtgtgacccacggaggatccactcccaggatgacgtgctccgtagctctgctgctgatactgggtctgcgatgcagcggcgtgaggcctgggctggttggagaaggtcacaacccttctctgttggtctgccttctgctgaaagactcgagaaccaaccagggaagctgtcctggaggtccctggtcggagagggacatagaatctgtgacctctgacaactgtgaagccaccctgggctacagaaaccacagtcttcccagcaattattacaattcttgaattccttggggattttttactgccctttcaaagcacttaagtgttagatctaacgtgttccagtgtctgtctgaggtgacttaaaaaatcagaacaaaacttctattatccagagtcatgggagagtacaccctttccaggaataatgttttgggaaacactgaaatgaaatcttcccagtattataaattgtgtatttaaaaaaaagaaacttttctgaatgcctacctggc

SEQ ID NO: 20542 - DNA, 2318 bp, Homo sapiens
  misc_feature 1..2318: note = ENST00000639981
  source 1..2318: mol_type = unassigned DNA
agtacacctatgtgaaactgagaagtgattgctcgaggccttccctgcaatggtacacccgagctcaaagcaagatgagaaggcccagcttgttattaaaagacatcctcaaatgtacattgcttgtgtttggagtgtggatcctttatatcctcaagttaaattatactactgaagaatgtgacatgaaaaaaatgcattatgtggaccctgaccatgtaaagacctacaccgtgcctttaaaggaagcagggccctccctgctgaagcattcagtgagcccaggcaccagcatcttcaaaccgagtcttttctctccttagtgctgctccccgctttccaggccttcctgggatatcttagagctcctgaaggtgcggcactcgccttgaggcactttcttctgagctgtgagctatgggcaagcagtggagggggaagagagcagctgaagcagatgccggttcaacttacttaaagatgtgggacaagctctgaggaagcccccaagacaatgatgtctggttgtgcaccattgaagcaagaacagaaaccatcccagagtggaggacatggcccatgtggtcctcctgttctgagtggctatgagatggagttctgtgtgagctctctacagaaaaagccctgtctccaggcaatcagtggagatctgttaaacgagttgaaacaaaagaggacaaggaattgctgtggctttagacgttgccaggacatgtagaaactcactcaggatttactactgcatccactgtcacttaggcgcaggaggggtcacagtcagaagagagctcagaaatatgctcagcaagtcttgcagaaggaatgtcgtcccaagtttgccaagacatcaatggcgctgttatttgagcacaggtatagcgtggacttactcccttttgtgcagaaggcccccaaagacagtgaagctgagtccaagtacgatcctccttttgggttccggaagttctccagtaaagtccagaccctcttggaactcttgccagagcacgacctccctgaacacttgaaagccaagacctgtcggcgctgtgtggttattggaagcggaggaatactgcacggattagaactgggccacaccctgaaccagttcgatgttgtgataagaacgtccccacaatcggtgtcattgccgttgtcttagccacacatctgtgcgatgaagtcagtttggcgggttttggatatgacctcaatcaacccagaacacctttgcactacttcgacagtcaatgcatggctgctatgaactttcagaccatgcataatgtgacaacggaaaccaagttcctcttaaagctggtcaaagagggagtggtgaaagatctcagtggaggcattgatcgtgaattttgaacacagaaaacctcagttgaaaatgcaactctaactctgagagctgtttttgacagccttcttgatgtatttctccatcctgcagatactttgaagtgcagctcatgtttttaacttttaatttaaaaacacaaaaaaaattttagctcttcccactttttttttcctatttatttgaggtcagtgtttgtttttgcacaccattttgtaaatgaaacttaagaattgaattggaaagacttctcaaagagaattgtatgtaacgatgttgtattgatttttaagaaagtaatttaatttgtaaaacttctgctcgtttacactgcacattgaatacaggtaactaattggaaggagaggggaggtcactcttttgatggtggccctgaacctcattctggttccctgctgcgctgcttggtgtgacccacggaggatccactcccaggatgacgtgctccgtagctctgctgctgatactgggtctgcgatgcagcggcgtgaggcctgggctggttggagaaggtcacaacccttctctgttggtctgccttctgctgaaagactcgagaaccaaccagggaagctgtcctggaggtccctggtcggagagggacatagaatctgtgacctctgacaactgtgaagccaccctgggctacagaaaccacagtcttcccagcaattattacaattcttgaattccttggggattttttactgccctttcaaagcacttaagtgttagatctaacgtgttccagtgtctgtctgaggtgacttaaaaaatcagaacaaaacttctattatccagagtcatgggagagtacaccctttccaggaataatgttttgggaaacactgaaatgaaatcttcccagtattataaattgtgtatttaaaaaaaagaaacttttctg

SEQ ID NO: 20543 - DNA, 2405 bp, Homo sapiens
  misc_feature 1..2405: note = ENST00000640903
  source 1..2405: mol_type = unassigned DNA
gtgcaaagcagagacccctgcttgcatggaatctgcattctagtgggggagacaagacaaacgtgtaattcaaaagtaaaaaacttatgaagaatcacatgtctcatgattagtgttataaagaaaaaagaaagcatgcatacaggaatatccacataagcaattttgcaatgccaagtgagtacacctatgtgaaactgagaagtgattgctcgaggccttccctgcaatggtacacccgagctcaaagcaagatgagaaggcccagcttgttattaaaagacatcctcaaatgtacattgcttgtgtttggagtgtggatcctttatatcctcaagttaaattatactactgaagaatgtgacatgaaaaaaatgcattatgtggaccctgaccatgtaaagagagctcagaaatatgctcagcaagtcttgcagaaggaatgtcgtcccaagtttgccaagacatcaatggcgctgttatttgagcacaggtatagcgtggacttactcccttttgtgcagaaggcccccaaagacagtgaagctgagtccaagtacgatcctccttttgggttccggaagttctccagtaaagtccagaccctcttggaactcttgccagagcacgacctccctgaacacttgaaagccaagacctgtcggcgctgtgtggttattggaagcggaggaatactgcacggattagaactgggccacaccctgaaccagttcgatgttgtgataagaactcagtgcactgctcttggtcagtgtggctccaggaacagtgagggacacaggaagctcttcacagtccctgcccacaagggacttaacgtttgagaagttgaaacaaaaacacaaaatggttggatgctccaaactgtcatactgaccctaagttggaggagcatgctgctggctacagttaaacagtgcaccagttgagggatattcagaacatgttggaaataaaactactataaggatgacttatccagagggcgcaccactgtctgaccttgaatattattccaatgacttatttgttgctgttttatttaagagtgttgatttcaactggcttcaagcaatggtaaaaaaggaaaccctgccattctgggtacgactcttcttttggaagcaggtggcagaaaaaatcccactgcagccaaaacatttcaggattttgaatccagttatcatcaaagagactgcctttgacatccttcagtactcagagcctcagtcaaggttctggggccgagataagaacgtccccacaatcggtgtcattgccgttgtcttagccacacatctgtgcgatgaagtcagtttggcgggttttggatatgacctcaatcaacccagaacacctttgcactacttcgacagtcaatgcatggctgctatgaactttcagaccatgcataatgtgacaacggaaaccaagttcctcttaaagctggtcaaagagggagtggtgaaagatctcagtggaggcattgatcgtgaattttgaacacagaaaacctcagttgaaaatgcaactctaactctgagagctgtttttgacagccttcttgatgtatttctccatcctgcagatactttgaagtgcagctcatgtttttaacttttaatttaaaaacacaaaaaaaattttagctcttcccactttttttttcctatttatttgaggtcagtgtttgtttttgcacaccattttgtaaatgaaacttaagaattgaattggaaagacttctcaaagagaattgtatgtaacgatgttgtattgatttttaagaaagtaatttaatttgtaaaacttctgctcgtttacactgcacattgaatacaggtaactaattggaaggagaggggaggtcactcttttgatggtggccctgaacctcattctggttccctgctgcgctgcttggtgtgacccacggaggatccactcccaggatgacgtgctccgtagctctgctgctgatactgggtctgcgatgcagcggcgtgaggcctgggctggttggagaaggtcacaacccttctctgttggtctgccttctgctgaaagactcgagaaccaaccagggaagctgtcctggaggtccctggtcggagagggacatagaatctgtgacctctgacaactgtgaagccaccctgggctacagaaaccacagtcttcccagcaattattacaattcttgaattccttggggattttttactgccctttcaaagcacttaagtgttagatctaacgtgttccagtgtctgtctgaggtgacttaaaaaatcagaacaaaacttctattatccagagtcatgggagagtacaccctttccaggaataatgttttgggaaacactgaaatgaaatcttcccag

SEQ ID NO: 20544 - DNA, 2169 bp, Homo sapiens
  misc_feature 1..2169: note = ENST00000640572
  source 1..2169: mol_type = unassigned DNA
gggctgcgcggagcggcgtcccctgcagccgcggaccgaggcagcggcggcacctgccggccgagcaatgccaagtgagtacacctatgtgaaactgagaagtgattgctcgaggccttccctgcaatggtacacccgagctcaaagcaagatgagaaggcccagcttgttattaaaagacatcctcaaatgtacattgcttgtgtttggagtgtggatcctttatatcctcaagttaaattatactactgaagaatgtgacatgaaaaaaatgcattatgtggaccctgaccatgtaaagagagctcagaaatatgctcagcaagtcttgcagaaggaatgtcgtcccaagtttgccaagacatcaatggcgctgttatttgagcacagagcacgacctccctgaacacttgaaagccaagacctgtcggcgctgtgtggttattggaagcggaggaatactgcacggattagaactgggccacaccctgaaccagttcgatgttgtgataagaactcagtgcactgctcttggtcagtgtggctccaggaacagtgagggacacaggaagctcttcacagtccctgcccacaagggacttaacgtttgagaagttgaaacaaaaacacaaaatggttggatgctccaaactgtcatactgaccctaagttggaggagcatgctgctggctacagttaaacagtgcaccagttgagggatattcagaacatgttggaaataaaactactataaggatgacttatccagagggcgcaccactgtctgaccttgaatattattccaatgacttatttgttgctgttttatttaagagtgttgatttcaactggcttcaagcaatggtaaaaaaggaaaccctgccattctgggtacgactcttcttttggaagcaggtggcagaaaaaatcccactgcagccaaaacatttcaggattttgaatccagttatcatcaaagagactgcctttgacatccttcagtactcagagcctcagtcaaggttctggggccgagataagaacgtccccacaatcggtgtcattgccgttgtcttagccacacatctgtgcgatgaagtcagtttggcgggttttggatatgacctcaatcaacccagaacacctttgcactacttcgacagtcaatgcatggctgctatgaactttcagaccatgcataatgtgacaacggaaaccaagttcctcttaaagctggtcaaagagggagtggtgaaagatctcagtggaggcattgatcgtgaattttgaacacagaaaacctcagttgaaaatgcaactctaactctgagagctgtttttgacagccttcttgatgtatttctccatcctgcagatactttgaagtgcagctcatgtttttaacttttaatttaaaaacacaaaaaaaattttagctcttcccactttttttttcctatttatttgaggtcagtgtttgtttttgcacaccattttgtaaatgaaacttaagaattgaattggaaagacttctcaaagagaattgtatgtaacgatgttgtattgatttttaagaaagtaatttaatttgtaaaacttctgctcgtttacactgcacattgaatacaggtaactaattggaaggagaggggaggtcactcttttgatggtggccctgaacctcattctggttccctgctgcgctgcttggtgtgacccacggaggatccactcccaggatgacgtgctccgtagctctgctgctgatactgggtctgcgatgcagcggcgtgaggcctgggctggttggagaaggtcacaacccttctctgttggtctgccttctgctgaaagactcgagaaccaaccagggaagctgtcctggaggtccctggtcggagagggacatagaatctgtgacctctgacaactgtgaagccaccctgggctacagaaaccacagtcttcccagcaattattacaattcttgaattccttggggattttttactgccctttcaaagcacttaagtgttagatctaacgtgttccagtgtctgtctgaggtgacttaaaaaatcagaacaaaacttctattatccagagtcatgggagagtacaccctttccaggaataatgttttgggaaacactgaaatgaaatcttccc

SEQ ID NO: 20545 - DNA, 2129 bp, Homo sapiens
  misc_feature 1..2129: note = ENST00000640314
  source 1..2129: mol_type = unassigned DNA
gcggagcggcgtcccctgcagccgcggaccgaggcagcggcggcacctgccggccgaggcactgtgaagacagtggtgtgcaaagcagagacccctgcttgcatggaatctgcattctagtgggggagacaagacaaacgtgtaattcaaaagtaaaaaacttatgaagaatcacatgtctcatgattagtgttataaagaaaaaagaaagcatgcatacaggaatatccacataagcaattttgcaatgccaagtgagtacacctatgtgaaactgagaagtgattgctcgaggccttccctgcaatggtacacccgagctcaaagcaagatgagaaggcccagcttgttattaaaagacatcctcaaatgtacattgcttgtgtttggagtgtggatcctttatatcctcaagttaaattatactactgaagaatgtgacatgaaaaaaatgcattatgtggaccctgaccatgtaaagaaggcccccaaagacagtgaagctgagtccaagtacgatcctccttttgggttccggaagttctccagtaaagtccagaccctcttggaactcttgccagagcacgacctccctgaacacttgaaagccaagacctgtcggcgctgtgtggttattggaagcggaggaatactgcacggattagaactgggccacaccctgaaccagttcgatgttgtgataaggttaaacagtgcaccagttgagggatattcagaacatgttggaaataaaactactataaggatgacttatccagagggcgcaccactgtctgaccttgaatattattccaatgacttatttgttgctgttttatttaagagtgttgatttcaactggcttcaagcaatggtaaaaaaggaaaccctggtggcagaaaaaatcccactgcagccaaaacatttcaggattttgaatccagttatcatcaaagagactgcctttgacatccttcagtactcagagcctcagtcaaggttctggggccgagataagaacgtccccacaatcggtgtcattgccgttgtcttagccacacatctgtgcgatgaagtcagtttggcgggttttggatatgacctcaatcaacccagaacacctttgcactacttcgacagtcaatgcatggctgctatgaactttcagaccatgcataatgtgacaacggaaaccaagttcctcttaaagctggtcaaagagggagtggtgaaagatctcagtggaggcattgatcgtgaattttgaacacagaaaacctcagttgaaaatgcaactctaactctgagagctgtttttgacagccttcttgatgtatttctccatcctgcagatactttgaagtgcagctcatgtttttaacttttaatttaaaaacacaaaaaaaattttagctcttcccactttttttttcctatttatttgaggtcagtgtttgtttttgcacaccattttgtaaatgaaacttaagaattgaattggaaagacttctcaaagagaattgtatgtaacgatgttgtattgatttttaagaaagtaatttaatttgtaaaacttctgctcgtttacactgcacattgaatacaggtaactaattggaaggagaggggaggtcactcttttgatggtggccctgaacctcattctggttccctgctgcgctgcttggtgtgacccacggaggatccactcccaggatgacgtgctccgtagctctgctgctgatactgggtctgcgatgcagcggcgtgaggcctgggctggttggagaaggtcacaacccttctctgttggtctgccttctgctgaaagactcgagaaccaaccagggaagctgtcctggaggtccctggtcggagagggacatagaatctgtgacctctgacaactgtgaagccaccctgggctacagaaaccacagtcttcccagcaattattacaattcttgaattccttggggattttttactgccctttcaaagcacttaagtgttagatctaacgtgttccagtgtctgtctgaggtgacttaaaaaatcagaacaaaacttctattatccagagtcatgggagagtacaccctttccaggaataatgttttgggaaacac

SEQ ID NO: 20546 - DNA, 1643 bp, Homo sapiens
  misc_feature 1..1643: note = ENST00000639216
  source 1..1643: mol_type = unassigned DNA
gtaattcaaaagtaaaaaacttatgaagaatcacatgtctcatgattagtgttataaagaaaaaagaaagcatgcatacaggaatatccacataagcaattttgcaatgccaagtgagtacacctatgtgaaactgagaagtgattgctcgaggccttccctgcaatggtacacccgagctcaaagcaagatgagaaggcccagcttgttattaaaagacatcctcaaatgtacattgcttgtgtttggagtgtggatcctttatatcctcaagttaaattatactactgaagaatgtgacatgaaaaaaatgcattatgtggaccctgaccatgtaaagagagctcagaaatatgctcagcaagtcttgcagaaggaatgtcgtcccaagtttgccaagacatcaatggcgctgttatttgagcacaggtatagcgtggacttactcccttttgtgcagaaggcccccaaagacagtgaagctgagtccaagtacgatcctccttttgggttccggaagttctccagtaaagtccagaccctcttggaactcttgccagagcacgacctccctgaacacttgaaagccaagacctgtcggcgctgtgtggttattggaagcggaggaatactgcacggattagaactgggccacaccctgaaccagttcgatgttgtgataagagtgttgatttcaactggcttcaagcaatggtaaaaaaggaaaccctgccattctgggtacgactcttcttttggaagcaggtggcagaaaaaatcccactgcagccaaaacatttcaggattttgaatccagttatcatcaaagagactgcctttgacatccttcagtactcagagcctcagtcaaggttctggggccgagataagaacgtccccacaatcggtgtcattgccgttgtcttagccacacatctgtgcgatgaagtcagtttggcgggttttggatatgacctcaatcaacccagaacacctttgcactacttcgacagtcaatgcatggctgctatgaactttcagaccatgcataatgtgacaacggaaaccaagttcctcttaaagctggtcaaagagggagtggtgaaagatctcagtggaggcattgatcgtgaattttgaacacagaaaacctcagttgaaaatgcaactctaactctgagagctgtttttgacagccttcttgatgtatttctccatcctgcagatactttgaagtgcagctcatgtttttaacttttaatttaaaaacacaaaaaaaattttagctcttcccactttttttttcctatttatttgaggtcagtgtttgtttttgcacaccattttgtaaatgaaacttaagaattgaattggaaagacttctcaaagagaattgtatgtaacgatgttgtattgatttttaagaaagtaatttaatttgtaaaacttctgctcgtttacactgcacattgaatacaggtaactaattggaaggagaggggaggtcactcttttgatggtggccctgaacctcattctggttccctgctgcgctgcttggtgtgacccacggaggatccactcccaggatgacgtgctccgtagctctgctgctgatactgggtctgcgatgcagcggcgtg

SEQ ID NO: 20547 - DNA, 1300 bp, Homo sapiens
  misc_feature 1..1300: note = ENST00000640835
  source 1..1300: mol_type = unassigned DNA
gtgattgctcgaggccttccctgcaatggtacacccgagctcaaagcaagatgagaaggcccagcttgttattaaaagacatcctcaaatgtacattgcttgtgtttggagtgtggatcctttatatcctcaagttaaattatactactgaagaatgtgacatgaaaaaaatgcattatgtggaccctgaccatgtaaaggttgtttcttcaagtttctgagccaaacttaactctaaaaagcaaatattctgtgttaaaagacagtaatcaacacgggagctacatcagacatcataggacaaattgtcatctagaagagtatatttttaatgcaggagagtttttaaaacccagattggtgtgatttcattccagagagctcagaaatatgctcagcaagtcttgcagaaggaatgtcgtcccaagtttgccaagacatcaatggcgctgttatttgagcacaggtatagcgtggacttactcccttttgtgcagaaggcccccaaagacagtgaagctgagtccaagtacgatcctccttttgggttccggaagttctccagtaaagtccagaccctcttggaactcttgccagagcacgacctccctgaacacttgaaagccaagacctgtcggcgctgtgtggttattggaagcggaggaatactgcacggattagaactgggccacaccctgaaccagttcgatgttgtgataagaacgtccccacaatcggtgtcattgccgttgtcttagccacacatctgtgcgatgaagtcagtttggcgggttttggatatgacctcaatcaacccagaacacctttgcactacttcgacagtcaatgcatggctgctatgaactttcagaccatgcataatgtgacaacggaaaccaagttcctcttaaagctggtcaaagagggagtggtgaaagatctcagtggaggcattgatcgtgaattttgaacacagaaaacctcagttgaaaatgcaactctaactctgagagctgtttttgacagccttcttgatgtatttctccatcctgcagatactttgaagtgcagctcatgtttttaacttttaatttaaaaacacaaaaaaaattttagctcttcccactttttttttcctatttatttgaggtcagtgtttgtttttgcacaccattttgtaaatgaaacttaagaattgaattggaaagacttctcaaagagaattgtatgtaacgatgttgtattgatttttaagaaagtaatttaatttgtaaaacttctgctcgtttacactgcacat

SEQ ID NO: 20548 - DNA, 2173 bp, Homo sapiens
  misc_feature 1..2173: note = ENST00000638523
  source 1..2173: mol_type = unassigned DNA
atgtgaaactgagaagtgattgctcgaggccttccctgcaatggtacacccgagctcaaagcaagatgagaaggcccagcttgttattaaaagacatcctcaaatgtacattgcttgtgtttggagtgtggatcctttatatcctcaagttaaattatactactgaagaatgtgacatgaaaaaaatgcattatgtggaccctgaccatgtaaagacctacaccgtgcctttaaaggaagcagggccctccctgctgaagcattcagtgagcccaggcaccagcatcttcaaaccgagtcttttctctccttagtgctgctccccgctttccaggccttcctgggatatcttagagctcctgaaggtgcggcactcgccttgaggcactttcttctgagctgtgagctatgggcaagcagtggagggggaagagagcagctgaagcagatgccggttcaacttacttaaagatgtgggacaagctctgaggaagcccccaagacaatgatgtctggttgtgcaccattgaagcaagaacagaaaccatcccagagtggaggacatggcccatgtggtcctcctgttctgagtggctatgagatggagttctgtgtgagctctctacagaaaaagccctgtctccaggcaatcagtggagatctgttaaacgagttgaaacaaaagaggacaaggaattgctgtggctttagacgttgccaggacatgtagaaactcactcaggatttactactgcatccactgtcacttaggcgcaggaggggtcacagtcagaaggttgtttcttcaagtttctgagccaaacttaactctaaaaagcaaatattctgtgttaaaagacagtaatcaacacgggagctacatcagacatcataggacaaattgtcatctagaagagtatatttttaatgcaggagagtttttaaaacccagattggtgtgatttcattccagagagctcagaaatatgctcagcaagtcttgcagaaggaatgtcgtcccaagtttgccaagacatcaatggcgctgttatttgagcacaggtatagcgtggacttactcccttttgtgcagaaggcccccaaagacagtgaagctgagtccaagtacgatcctccttttgggttccggaagttctccagtaaagtccagaccctcttggaactcttgccagagcacgacctccctgaacacttgaaagccaagacctgtcggcgctgtgtggttattggaagcggaggaatactgcacggattagaactgggccacaccctgaaccagttcgatgttgtgataaggttaaacagtgcaccagttgagggatattcagaacatgttggaaataaaactactataaggatgacttatccagagggcgcaccactgtctgaccttgaatattattccaatgacttatttgttgctgttttatttaagagtgttgatttcaactggcttcaagcaatggtaaaaaaggaaaccctgccattctgggtacgactcttcttttggaagcaggtggcagaaaaaatcccactgcagccaaaacatttcaggattttgaatccagttatcatcaaagagactgcctttgacatccttcagtactcagagcctcagtcaaggttctggggccgagataagaacgtccccacaatcggtgtcattgccgttgtcttagccacacatctgtgcgatgaagtcagtttggcgggttttggatatgacctcaatcaacccagaacacctttgcactacttcgacagtcaatgcatggctgctatgaactttcagaccatgcataatgtgacaacggaaaccaagttcctcttaaagctggtcaaagagggagtggtgaaagatctcagtggaggcattgatcgtgaattttgaacacagaaaacctcagttgaaaatgcaactctaactctgagagctgtttttgacagccttcttgatgtatttctccatcctgcagatactttgaagtgcagctcatgtttttaacttttaatttaaaaacacaaaaaaaattttagctcttcccactttttttttcctatttatttgaggtcagtgtttgtttttgcacaccattttgtaaatgaaacttaagaattgaattggaaagacttctcaaagagaattgtatgt

SEQ ID NO: 20549 - DNA, 1203 bp, Homo sapiens
  misc_feature 1..1203: note = ENST00000638581
  source 1..1203: mol_type = unassigned DNA
acgtgtaattcaaaagtaaaaaacttatgaagaatcacatgtctcatgattagtgttataaagaaaaaagaaagcatgcatacaggaatatccacataagcaattttgcaatgccaagtgagtacacctatgtgaaactgagaagtgattgctcgaggccttccctgcaatggtacacccgagctcaaagcaagatgagaaggcccagcttgttattaaaagacatcctcaaatgtacattgcttgtgtttggagtgtggatcctttatatcctcaagttaaattatactactgaagaatgtgacatgaaaaaaatgcattatgtggaccctgaccatgtaaagagagctcagaaatatgctcagcaagtcttgcagaaggaatgtcgtcccaagtttgccaagacatcaatggcgctgttatttgagcacaggtatagcgtggacttactcccttttgtgcagaaggcccccaaagacagtgaagctgagtccaagtacgatcctccttttgggttccggaagttctccagtaaagtccagaccctcttggaactcttgccagagcacgacctccctgaacacttgaaagccaagacctgtcggcgctgtgtggttattggaagcggaggaatactgcacggattagaactgggccacaccctgaaccagttcgatgttgtgataaggttaaacagtgcaccagttgagggatattcagaacatgttggaaataaaactactataaggatgacttatccagagggcgcaccactgtctgaccttgaatattattccaatgacttatttgttgctgttttatttaagagtgttgatttcaactggcttcaagcaatggtaaaaaaggaaaccctgaacgtccccacaatcggtgtcattgccgttgtcttagccacacatctgtgcgatgaagtcagtttggcgggttttggatatgacctcaatcaacccagaacacctttgcactacttcgacagtcaatgcatggctgctatgaactttcagaccatgcataatgtgacaacggaaaccaagttcctcttaaagctggtcaaagagggagtggtgaaagatctcagtggaggcattgatcgtgaattttgaacacagaaaacctcagttgaaaatgcaactctaactctgagagctgtttttgacagccttcttgatgtatttctccatc

SEQ ID NO: 20550 - DNA, 582 bp, Homo sapiens
  misc_feature 1..582: note = ENST00000639202
  source 1..582: mol_type = unassigned DNA
agtgattgctcgaggccttccctgcaatggtacacccgagctcaaagcaagatgagaaggcccagcttgttattaaaagacatcctcaaatgtacattgcttgtgtttggagtgtggatcctttatatcctcaagttaaattatactactgaagaatgtgacatgaaaaaaatgcattatgtggaccctgaccatgtaaaggttaaacagtgcaccagttgagggatattcagaacatgttggaaataaaactactataaggatgacttatccagagggcgcaccactgtctgaccttgaatattattccaatgacttatttgttgctgttttatttaagagtgttgatttcaactggcttcaagcaatggtaaaaaaggaaaccctgccattctgggtacgactcttcttttggaagcaggtggcagaaaaaatcccactgcagccaaaacatttcaggattttgaatccagttatcatcaaagagactgcctttgacatccttcagtactcagagcctcagtcaaggttctggggccgagataagaacgtccccacaatcggtgtcattgccgttgtctt

SEQ ID NO: 20551 - DNA, 563 bp, Homo sapiens
  misc_feature 1..563: note = ENST00000640336
  source 1..563: mol_type = unassigned DNA
aattgcttgacattcagggattagatacaagtgttcgctcaagtactaaaggctgcattcctcgaaatcctagaaagacagagctgggaggggagatgaggctgcaaaccatgcactcattcttagtcataagaagacgtggaggacatgacatggatactgcctggtgtacagagatggttgatggcctgctttgtcagtgtgtctttgtcctttttatttaaataggttaaacagtgcaccagttgagggatattcagaacatgttggaaataaaactactataaggatgacttatccagagggcgcaccactgtctgaccttgaatattattccaatgacttatttgttgctgttttatttaagagtgttgatttcaactggcttcaagcaatggtaaaaaaggaaaccctgccattctgggtacgactcttcttttggaagcaggtggcagaaaaaatcccactgcagccaaaacatttcaggattttgaatccagttatcatcaaagagactgcctttgacatccttcagtactcagagcctcagtcaaggttctggg

SEQ ID NO: 20552 - DNA, 1032 bp, Homo sapiens
  misc_feature 1..1032: note = ENST00000640849
  source 1..1032: mol_type = unassigned DNA
gtgaaactgagaagtgattgctcgaggccttccctgcaatggtacacccgagctcaaagcaagatgagaaggcccagcttgttattaaaagacatcctcaaatgtacattgcttgtgtttggagtgtggatcctttatatcctcaagttaaattatactactgaagaatgtgacatgaaaaaaatgcattatgtggaccctgaccatgtaaagacctacaccgtgcctttaaaggaagcagggccctccctgctgaagcattcagtgagcccaggcaccagcatcttcaaaccgagtcttttctctccttagtgctgctccccgctttccaggccttcctgggatatcttagagagagctcagaaatatgctcagcaagtcttgcagaaggaatgtcgtcccaagtttgccaagacatcaatggcgctgttatttgagcacaggtatagcgtggacttactcccttttgtgcagaaggcccccaaagacagtgaagctgagtccaagtacgatcctccttttgggttccggaagttctccagtaaagtccagaccctcttggaactcttgccagagcacgacctccctgaacacttgaaagccaagacctgtcggcgctgtgtggttattggaagcggaggaatactgcacggattagaactgggccacaccctgaaccagttcgatgttgtgataaggttaaacagtgcaccagttgagggatattcagaacatgttggaaataaaactactataaggatgacttatccagagggcgcaccactgtctgaccttgaatattattccaatgacttatttgttgctgttttatttaagagtgttgatttcaactggcttcaagcaatggtaaaaaaggaaaccctgccattctgggtacgactcttcttttggaagcaggtggcagaaaaaatcccactgcagccaaaacatttcaggattttgaatccagttatcatcaaagagactgcctttgacatccttcagtactcagagcctcagtcaaggttctgg

SEQ ID NO: 20553 - DNA, 779 bp, Homo sapiens
  misc_feature 1..779: note = ENST00000306262
  source 1..779: mol_type = unassigned DNA
ctgaatgggcgcgagagcggcgctgggggcgggtgggggcgcggggtaccgggctggcggccggccggcgccccctcattagtatgcggacgaaggcggcgggctgcgcggagcggcgtcccctgcagccgcggaccgaggcagcggcggcacctgccggccgagatgtacattgcttgtgtttggagtgtggatcctttatatcctcaagttaaattatactactgaagaatgtgacatgaaaaaaatgcattatgtggaccctgaccatgtaaagagagctcagaaatatgctcagcaagtcttgcagaaggaatgtcgtcccaagtttgccaagacatcaatggcgctgttatttgagcacaggtatagcgtggacttactcccttttgtgcagaaggcccccaaagacagtgaagctgagtccaagtacgatcctccttttgggttccggaagttctccagtaaagtccagaccctcttggaactcttgccagagcacgacctccctgaacacttgaaagccaagacctgtcggcgctgtgtggttattggaagcggaggaatactgcacggattagaactgggccacaccctgaaccagttcgatgttgtgataaggttaaacagtgcaccagttgagggatattcagaacatgttggaaataaaactactataaggatgacttatccagagggcgcaccactgtctgaccttgaatattattccaatgacttatttgttgctgttttatttaagagtgttgatttcaactggc

SEQ ID NO: 20554 - DNA, 1546 bp, Homo sapiens
  misc_feature 1..1546: note = ENST00000639421
  source 1..1546: mol_type = unassigned DNA
atgcggacgaaggcggcgggctgcgcggagcggcgtcccctgcagccgcggaccgaggcagcggcggcacctgccggccgaggcactgtgaagacagtggtgtgcaaagcagagacccctgcttgcatggaatctgcattctagtgggggagacaagacaaacgtgtaattcaaaagtaaaaaacttatgaagaatcacatgtctcatgattagtgttataaagaaaaaagaaagcatgcatacaggaatatccacataagcaattttgcaatgccaagtgagtacacctatgtgaaactgagaagtgattgctcgaggccttccctgcaatggtacacccgagctcaaagcaagatgagaaggcccagcttgttattaaaagacatcctcaaatgtacattgcttgtgtttggagtgtggatcctttatatcctcaagttaaattatactactgaagaatgtgacatgaaaaaaatgcattatgtggaccctgaccatgtaaagacctacaccgtgcctttaaaggaagcagggccctccctgctgaagcattcagtgagcccaggcaccagcatcttcaaaccgagtcttttctctccttagtgctgctccccgctttccaggccttcctgggatatcttagagctcctgaaggtgcggcactcgccttgaggcactttcttctgagctgtgagctatgggcaagcagtggagggggaagagagcagctgaagcagatgccggttcaacttacttaaagatgtgggacaagctctgaggaagcccccaagacaatgatgtctggttgtgcaccattgaagcaagaacagaaaccatcccagagtggaggacatggcccatgtggtcctcctgttctgagtggctatgagatggagttctgtgtgagctctctacagaaaaagccctgtctccaggcaatcagtggagatctgttaaacgagttgaaacaaaagaggacaaggaattgctgtggctttagacgttgccaggacatgtagaaactcactcaggatttactactgcatccactgtcacttaggcgcaggaggggtcacagtcagaagagagctcagaaatatgctcagcaagtcttgcagaaggaatgtcgtcccaagtttgccaagacatcaatggcgctgttatttgagcacaggtatagcgtggacttactcccttttgtgcagaaggcccccaaagacagtgaagctgagtccaagtacgatcctccttttgggttccggaagttctccagtaaagtccagaccctcttggaactcttgccagagcacgacctccctgaacacttgaaagccaagacctgtcggcgctgtgtggttattggaagcggaggaatactgcacggattagaactgggccacaccctgaaccagttcgatgttgtgataaggttaaacagtgcaccagttgagggatattcagaacatgttggaaataaaactactataaggatgacttatccagagggcgcaccactgtctgaccttgaatattattccaatgact

SEQ ID NO: 20555 - DNA, 888 bp, Homo sapiens
  misc_feature 1..888: note = ENST00000639519
  source 1..888: mol_type = unassigned DNA
atcctcaaatgtacattgcttgtgtttggagtgtggatcctttatatcctcaagttaaattatactactgaagaatgtgacatgaaaaaaatgcattatgtggaccctgaccatgtaaagagctaaagaccttatctccctgcggatggcattgcgtgcagttaattatggccagatggactcagccgcttcttcatcgtcttctctcggactctgcagacctacaccgtgcctttaaaggaagcagggccctccctgctgaagcattcagtgagcccaggcaccagcatcttcaaaccgagtcttttctctccttagtgctgctccccgctttccaggccttcctgggatatcttagagctcctgaaggtgcggcactcgccttgaggcactttcttctgagctgtgagctatgggcaagcagtggagggggaagagagcagctgaagcagatgccggttcaacttacttaaagatgtgggacaagctctgaggaagcccccaagacaatgatgtctggttgtgcaccattgaagcaagaacagaaaccatcccagagtggaggacatggcccatgtggtcctcctgttctgagtggctatgagatggagttctgtgtgagctctctacagaaaaagccctgtctccaggcaatcagtggagatctgttaaacgagttgaaacaaaagaggacaaggaattgctgtggctttagacgttgccaggacatgtagaaactcactcaggatttactactgcatccactgtcacttaggcgcaggaggggtcacagtcagaagaaggcccccaaagacagtgaagctgagtccaagtacgatcctccttttgggttccggaagttctccagtaaagtccagaccctcttgg

SEQ ID NO: 20556 - DNA, 530 bp, Homo sapiens
  misc_feature 1..530: note = ENST00000455892
  source 1..530: mol_type = unassigned DNA
gtgatgtggggccgctggtagaaatttgccggtgaccttccctgcaccctctctgcagccagccttgcggagaagacaggttttggcgaccttttgatttcttctgaattcaatgccaagtgagtacacctatgtgaaactgagaagtgattgctcgaggccttccctgcaatggtacacccgagctcaaagcaagatgagaaggcccagcttgttattaaaagacatcctcaaatgtacattgcttgtgtttggagtgtggatcctttatatcctcaagttaaattatactactgaagaatgtgacatgaaaaaaatgcattatgtggaccctgaccatgtaaagagagctcagaaatatgctcagcaagtcttgcagaaggaatgtcgtcccaagtttgccaagacatcaatggcgctgttatttgagcacaggtatagcgtggacttactcccttttgtgcagaaggcccccaaagacagtgaagctgagtccaagtacgatcctccttttgggttccggaagttct

SEQ ID NO: 20557 - DNA, 1201 bp, Homo sapiens
  misc_feature 1..1201: note = ENST00000639690
  source 1..1201: mol_type = unassigned DNA
gtgaagacagtggtgtgcaaagcagagacccctgcttgcatggaatctgcattctagtgggggagacaagacaaacgtgtaattcaaaagtaaaaaacttatgaagaatcacatgtctcatgattagtgttataaagaaaaaagaaagcatgcatacaggaatatccacataagcaattttgcaatgccaagtgagtacacctatgtgaaactgagaagtgattgctcgaggccttccctgcaatggtacacccgagctcaaagcaagatgagaaggcccagcttgttattaaaagacatcctcaaatgtacattgcttgtgtttggagtgtggatcctttatatcctcaagttaaattatactactgaagaatgtgacatgaaaaaaatgcattatgtggaccctgaccatgtaaagagctaaagaccttatctccctgcggatggcattgcgtgcagttaattatggccagatggactcagccgcttcttcatcgtcttctctcggactctgcagacctacaccgtgcctttaaaggaagcagggccctccctgctgaagcattcagtgagcccaggcaccagcatcttcaaaccgagtcttttctctccttagtgctgctccccgctttccaggccttcctgggatatcttagagctcctgaaggtgcggcactcgccttgaggcactttcttctgagctgtgagctatgggcaagcagtggagggggaagagagcagctgaagcagatgccggttcaacttacttaaagatgtgggacaagctctgaggaagcccccaagacaatgatgtctggttgtgcaccattgaagcaagaacagaaaccatcccagagtggaggacatggcccatgtggtcctcctgttctgagtggctatgagatggagttctgtgtgagctctctacagaaaaagccctgtctccaggcaatcagtggagatctgttaaacgagttgaaacaaaagaggacaaggaattgctgtggctttagacgttgccaggacatgtagaaactcactcaggatttactactgcatccactgtcacttaggcgcaggaggggtcacagtcagaagagagctcagaaatatgctcagcaagtcttgcagaaggaatgtcgtcccaagtttgccaagacatcaatggcgctgttatttgagcacaggtatagcgtggact

SEQ ID NO: 20558 - DNA, 1085 bp, Homo sapiens
  misc_feature 1..1085: note = ENST00000473122
  source 1..1085: mol_type = unassigned DNA
agtatgcggacgaaggcggcgggctgcgcggagcggcgtcccctgcagccgcggaccgaggcagcggcggcacctgccggccgagcaatgccaagtgagtacacctatgtgaaactgagaagtgattgctcgaggccttccctgcaatggtacacccgagctcaaagcaagatgagaaggcccagcttgttattaaaagacatcctcaaatgtacattgcttgtgtttggagtgtggatcctttatatcctcaagttaaattatactactgaagaatgtgacatgaaaaaaatgcattatgtggaccctgaccatgtaaagaccttatctccctgcggatggcattgcgtgcagttaattatggccagatggactcagccgcttcttcatcgtcttctctcggactctgcagacctacaccgtgcctttaaaggaagcagggccctccctgctgaagcattcagtgagcccaggcaccagcatcttcaaaccgagtcttttctctccttagtgctgctccccgctttccaggccttcctgggatatcttagagctcctgaaggtgcggcactcgccttgaggcactttcttctgagctgtgagctatgggcaagcagtggagggggaagagagcagctgaagcagatgccggttcaacttacttaaagatgtgggacaagctctgaggaagcccccaagacaatgatgtctggttgtgcaccattgaagcaagaacagaaaccatcccagagtggaggacatggcccatgtggtcctcctgttctgagtggctatgagatggagttctgtgtgagctctctacagaaaaagccctgtctccaggcaatcagtggagatctgttaaacgagttgaaacaaaagaggacaaggaattgctgtggctttagacgttgccaggacatgtagaaactcactcaggatttactactgcatccactgtcacttaggcgcaggaggggtcacagtcagaagagagctcagaaatatgctcagcaagtcttgcagaaggaatgtcgtcccaagtttgccaagacatcaatggcgctgttatttgagcacaggta

SEQ ID NO: 20559 - DNA, 2047 bp, Homo sapiens
  misc_feature 1..2047: note = ENST00000487896
  source 1..2047: mol_type = unassigned DNA
ctaaaaggttacttttttcaattatttaaaaaaaacaccaaaaattcaagtaatacggaaataagtaaaggagaaagtcccctgtaatttttcatagagaaagaggaaggaatggggggcagctgtgtaagtcaaacatgtttgtaaaactccgtgagtttgaaactagtaaaatagaaagtgaaagcctgctataattatggtggaattgagggtgtcttattgtgttactagagaatttttttaagtaggtttttaacattttgaccttgttaaaatgctccacttttcaaaacggtcctgacaggatatcctgcttccttccacgcagaagaggtggtttgtgcagaagtgcaggcctcagaatgctttgcacatgagaggaatggcaagagttgcctatcactgaggatttggggaggagggatcacaggatatgggactgaaaatgagacagggccagatagcaaaaggccttgaatgctacactaagcacgaagcagctccttaatttgtgcatcactgaagcaagaatagagtggaggacatggcccgtgtggtcctcgtgttctgagtggctatgacatggagttctgtgtgagctctccatgaagaaaatcccgtctccaggcagtcagtggagatttgatccttaccacaagagcacgtggacaaatttgaattatcgtggatgtatatgggcagaagaaggtctcagagccataagggtggggccctgttagctctgttggttccactcagcagcccacagtgtgagtgggaccctgccagccctgctagacttgagcattgtctggtgacgctggtccccgccttcattactgcagcagaggaagtgtggctgtggcagttgtgggttttgtattttctatttaaatatgtcccttaatgtgccagttgttaaaaagactaccagtgggctctgaagggatgcctggacactttgaaagtgtggttcagatgtgaaattgcactcaaaagatgttttaagagagacgagggcacgttgatgtcagtttcggtttgggctgtgtagtagcagcattttgaacttggccctctctcctttctgagagctaaagaccttatctccctgcggatggcattgcgtgcagttaattatggccagatggactcagccgcttcttcatcgtcttctctcggactctgcagacctacaccgtgcctttaaaggaagcagggccctccctgctgaagcattcagtgagcccaggcaccagcatcttcaaaccgagtcttttctctccttagtgctgctccccgctttccaggccttcctgggatatcttagagctcctgaaggtgcggcactcgccttgaggcactttcttctgagctgtgagctatgggcaagcagtggagggggaagagagcagctgaagcagatgccggttcaacttacttaaagatgtgggacaagctctgaggaagcccccaagacaatgatgtctggttgtgcaccattgaagcaagaacagaaaccatcccagagtggaggacatggcccatgtggtcctcctgttctgagtggctatgagatggagttctgtgtgagctctctacagaaaaagccctgtctccaggcaatcagtggagatctgttaaacgagttgaaacaaaagaggacaaggaattgctgtggctttagacgttgccaggacatgtagaaactcactcaggatttactactgcatccactgtcacttaggcgcaggaggggtcacagtcagaaggtgactactgagaaatgtgccctacccacagtctagaaaattaagtttgggctgggcgtggtggctcacatctataatcccagaactttggaaggtggaggcaggtggatcactaggtcaggagtttgagaccagcctgaccaacatggtgaaaccccgtctgtactgaaaatacaaaaagtagccgggtgtgtcagtgcacgcctgtaatcccagctactcaggaacctgaggcaggagaatggcttgaaactgggaggcagaggttgcag

SEQ ID NO: 20560 - DNA, 871 bp, Homo sapiens
  misc_feature 1..871: note = ENST00000461892
  source 1..871: mol_type = unassigned DNA
ttagtatgcggacgaaggcggcgggctgcgcggagcggcgtcccctgcagccgcggaccgaggcagcggcggcacctgccggccgagcaatgccaagtgagtacacctatgtgaaactgagaagtgattgctcgaggccttccctgcaatggtacacccgagctcaaagcaagatgagaaggcccagcttgttattaaaagacatcctcaaatgtacattgcttgtgtttggagtgtggatcctttatatcctcaagttaaattatactactgaagaatgtgacatgaaaaaaatgcattatgtggaccctgaccatgtaaagctaaagaccttatctccctgcggatggcattgcgtgcagttaattatggccagatggactcagccgcttcttcatcgtcttctctcggactctgcagacctacaccgtgcctttaaaggaagcagggccctccctgctgaagcattcagtgagcccaggcaccagcatcttcaaaccgagtcttttctctccttagtgctgctccccgctttccaggccttcctgggatatcttagagctcctgaaggtgcggcactcgccttgaggcactttcttctgagctgtgagctatgggcaagcagtggagggggaagagagcagctgaagcagatgccggttcaacttacttaaagatgtgggacaagctctgaggaagcccccaagacaatgatgtctggttgtgcaccattgaagcaagaacagaaaccatcccagagtggaggacatggcccatgtggtcctcctgttctgagtggctatgagatggagttctgtgtgagctctctacagaaaaagccctgtctccaggcaatcagtggagatctgtt

SEQ ID NO: 20561 - DNA, 803 bp, Homo sapiens
  misc_feature 1..803: note = ENST00000461199
  source 1..803: mol_type = unassigned DNA
aggcatcgttcatttgaaggggaaaatggttttatgtgctgcgcttcatctggcaccagtggttgcctgctcctcgtggcagggccgtgctgggtgtcacagagaggaaggagactcatctcctgccctctggtgtttagctgccctcccccgggcttatggctgctaatccttttccacggaaggatacagctgctgaaactgtggaagaggaatccatttctgctgcatgaaggggcacagacttgaatacagtcaggacaggttgtggtttcacttgtgtaatcctgagagcttgacagcttcgaggagtgtctaacattgctagtaacagagcctagaagcacctgaattccagctgtcacttggagaaggagagattcatacgaactgcgagagcatataaccagcatgtcttgagtcttttacccatgtgcctgttatatggatgctgctgtttttgtaagatgaaatgacccttggatattctgggttatgatcagcatttcttcgtctaggcgagaaaagaaacagcaatgccaagtgagtacacctatgtgaaactgagaagtgattgctcgaggccttccctgcaatggtacacccgagctcaaagcaagatgagaaggcccagcttgttattaaaagacatcctcaaatgtacattgcttgtgtttggagtgtggatcctttatatcctcaagttaaattatactactgaagaatgtgacatgaaaaaaatgcattatgtggaccctgaccatgtaaagacctacaccgtgcctttaaaggaagcagggccc

SEQ ID NO: 20562 - DNA, 544 bp, Homo sapiens
  misc_feature 1..544: note = ENST00000433665
  source 1..544: mol_type = unassigned DNA
attagtatgcggacgaaggcggcgggctgcgcggagcggcgtcccctgcagccgcggaccgaggcagcggcggcacctgccggccgaggcactgtgaagacagtggtgtgcaaagcagagacccctgcttgcatggaatctgcattctagtgggggagacaagacaaacgtgtaattcaaaagtaaaaaacttatgaagaatcacatgtctcatgattagtgttataaagaaaaaagaaagcatgcatacaggaatatccacataagcaattttgcaatgccaagtgagtacacctatgtgaaactgagaagtgattgctcgaggccttccctgcaatggtacacccgagctcaaagcaagatgagaaggcccagcttgttattaaaagacatcctcaaatgtacattgcttgtgtttggagtgtggatcctttatatcctcaagttaaattatactactgaagaatgtgacatgaaaaaaatgcattatgtggaccctgaccatgtaaagaccttatctccctgcggatggcattgcgtgcag

SEQ ID NO: 20563 - DNA, 588 bp, Homo sapiens
  misc_feature 1..588: note = ENST00000484728
  source 1..588: mol_type = unassigned DNA
ccctcattagtatgcggacgaaggcggcgggctgcgcggagcggcgtcccctgcagccgcggaccgaggcagcggcggcacctgccggccgagcaatgccaagtgagtacacctatgtgaaactgagaagtgattgctcgaggccttccctgcaatggtacacccgagctcaaagcaagatgagaaggcccagcttgttattaaaagacatcctcaaatgtacattgcttgtgtttggagtgtggatcctttatatcctcaagttaaattatactactgaagaatgtgacatgaaaaaaatgcattatgtggaccctgaccatgtaaaggttagatatcccattggtgtggtttaaatgaaaacattgccaagcatatgctcaaactataatatcattagtctactgtgtgacaaatatatgttaataaaagtttgaactcagaggggaaagcacttaatctcagcactccaaaaccaaagacaaccttcttctaaaaacccaccactaactactccacagtatccttctcccatttactgcagctggggtgtgggatgaggtgggctcaacccaacaggctctaggg

SEQ ID NO: 20564 - DNA, 478 bp, Homo sapiens
  misc_feature 1..478: note = ENST00000490946
  source 1..478: mol_type = unassigned DNA
atgttgcttgaggtgaagatagcaaacaagacattaggtatacaggtctgggcttaggtgagaggtccacattagagagatggatttggtcttcagggagccattgtcacccctagtctgaagcttgtacttgtcacaaagttactggaagtgccacagcatctgctgcctaaaaacccaagaatccgaatgcacacgactgctgcaggagtcacatgtagacaccttcccttgcctgctactactgctatccaaagcttcaccaagtcaggggaaaagaaagattgcctcccagtctttcaccagcacatcctaggatcacaactttacgagaagccagctgcaatgccaagtgagtacacctatgtgaaactgagaagtgattgctcgaggccttccctgcaatggtacacccgagctcaaagcaagatgagaaggcccagcttgttattaaaagacatcctcaaatgtacattgc

SEQ ID NO: 20565 - DNA, 455 bp, Homo sapiens
  misc_feature 1..455: note = ENST00000638258
  source 1..455: mol_type = unassigned DNA
agagttgtgggaggacagggagggaattattatttctggaaagagagggaaagttgggcagcaggttttgagaggaagagatgtagggggctttgcacctttgccagacaggactcctgatcaaaggacagcggtgaaacacaggtgtgttgaagaagaggcaagactctcatagggctgatgcatgacatccgggagtcctggggaaggggaggaaagagggcagcagacagagcctgtgttctgttggctacagctgtgctccagcccccgagggcctgcggaagagacaacgtctcagggggaccagacagaagtccaacataaaaagacaatgcttcacaatgccaagtgagtacacctatgtgaaactgagaagtgattgctcgaggccttccctgcaatggtacacccgagctcaaagcaagatgagaaggcccagcttgttattaaaa

SEQ ID NO: 20566 - DNA, 3019 bp, Homo sapiens
  misc_feature 1..3019: note = ENST00000526757
  source 1..3019: mol_type = unassigned DNA
tttcaggaagatgagagactgcttaggcgccaccactagtaccatgagtccctgcactggttaaagccatcgccacaacctggacaggcagcaagggctctgggtttgcagagagccgaaatgaccatgactgccaacaagaattccagcatcacccacggagctggtggcactaaagcccctcgggggactctgagcagaaaatcctttgagtttgaggatgcatccagtctccagtccctgtacccctcttctcccactgagaatggtactgagaaccaacccaagtttggatccaaaagcactttagaagaaaatgcctatgaagatattgtgggagatctgcccaaggagaatccatatgaggatgtggacttaaagagccgaagagcaggacgaaaatcccagcaactgtctgagaactccttggactctttgcacaggatgtggagtcctcaggacaggaagtacaacagcccgcccacacagctttccctgaaacccaacagccagtccctgcgcagtgggaactggtcagaaaggaagagccaccggctgccacgattacccaagaggcacagccatgacgacatgctgctgctggctcagctgagtctgccgtcctcaccctccagcctcaatgaagacagcctcagcaccaccagcgagctgctgtccagccgccgggcccgccgcattcccaagcttgtccaaagaattaactccatctacaatgccaagagaggaaagaagagattaaaaaagttgtctatgtccagcattgaaacagcatcactgagagatgaaaacagtgagagcgagagcgactctgatgacaggttcaaagcccacacacagcgcctggtccacatccagtcgatgctgaagcgcgcccccagctatcgcacgctggagctggagctgctggagtggcaggagcgggagctttttgagtactttgtggtggtgtccctcaagaagaagccatcgcgaaacacctacctccccgaagtctcctaccagtttcccaagctggaccgacccaccaagcagatgcgagaggcagaggaaaggctcaaagccattccccagttttgcttccctgatgccaaggactggcttcctgtgtcagagtatagcagtgagaccttttctttcatgctgactggggaagatggcagcagacgctttggctactgcaggcgcttactgccaagtgggaaagggccccggttgccagaggtgtactgtgtcatcagccgccttggctgcttcggcttgttttccaaggtcctagatgaggtggagcgccggcgtgggatctccgctgcattggtctatcctttcatgagaagtctcatggagtcgcccttcccagccccagggaagaccatcaaagtgaagacattcctgccaggtgctggcaatgaggtgttagagctgcggcggcccatggactcaaggctggagcacgtggactttgagtgcctttttacctgcctcagtgtgcgccagctcatccgaatctttgcctcactgctgctggagcgccgggtcatttttgtggcagataagctcagtaccctctccagctgctcccacgcggtggtggccttgctctaccccttctcctggcagcacaccttcattcctgtcctcccggcctccatgattgacatcgtctgctgtcccacccccttcctggttggcctgctctccagctccctccccaaactgaaggagctgcctgtggaggaggcgctgatggtgaatctgggatctgaccgattcatccgacagatggacgacgaagacacgttgttacctaggaagttacaggcagctctggagcaggctctggagaggaagaatgagctgatctcccaggactctgacagcgactccgacgatgaatgtaataccctcaatgggctggtgtcggaggtgtttatccggttctttgtggagaccgttgggcactactccctctttctgacacagagtgagaagggagagagggcctttcagcgagaggccttccgcaaatctgtggcctccaaaagcatccgccgctttcttgaggtttttatggagtctcagatgtttgctggcttcatccaagacagggagctaagaaagtgtcgggcaaagggcctttttgagcagcgagtggagcagtacttagaagaactcccagacactgagcagagtggaatgaataagtttctccgaggtttgggcaacaaaatgaagtttctccacaagaagaattaagcctccttctcagtagcagagtccagtgccttgcagagcctgaagcctggggagaaggcccagcctgggaccctctgggctgctgtggctcctctgcccccacagatcctatcctccaagccagcccacctctgccttcatcatatcccaggatactgtttgtaaataatctgctgtaagctttcttaactgttttttgtaacaagcaaagagaatatggcaaatatttgtatattcccaaggggccgggtgctttcctgtcctgccagagcatggatgaagtttcgctgggtgctcgtgactggccagttttgtgcagctgactgtctcagccaaaccactgatcttccctggaggccttcggcctgcctgcctgcctgaggtccccgctgccagtcccgggccctggagagcagatgctgtcttgttatgtacaggaggaccttttaaaaaaatcaagtttctattttttgctggtagtccgcatacccataccctctgtttttgaaaggcaaaggccaatcagtccccatttgtagcatggcaccagggtcttaggcctagtcctctcattcctcccaccctccgagatggtcagtgtgtcatgggaagcccacccccagctctgccagtgctctctgggcctggctcccagtcagtggtggccacgatgcggtacagggcatccctccttcccatctacgggtgttctcaataaacaatgtacagttgtttgggcccagag

SEQ ID NO: 20567 - DNA, 4545 bp, Homo sapiens
  misc_feature 1..4545: note = ENST00000534127
  source 1..4545: mol_type = unassigned DNA
gggggtcgggggtcgggggctgggggctgaggactgagtcgagccagcagcccagggcatctgtccacgctgtcagaggagcctctgggcgtggggctggcccttagagggctactgcgctgcttaacttgcctttcacagaaaaccactggaggagatactcacaaaaatgaaggggaagaacaggaaacaggaagacatgagatgaaggaaacaggagattcaacatggatttcacaccctttggagagtttctttcttggataattcaggaagatgagagactgcttaggcgccaccactagtaccatgagtccctgcactggttaaagccatcgccacaacctggacaggcagcaagggctctgggtttgcagagagccgaaatgaccatgactgccaacaagaattccagcatcacccacggagctggtggcactaaagcccctcgggggactctgagcaggtctcagtcagtctctccacctccagttctctccccaccaaggagtcccatctacccgctcagtgatagtgaaacctcagcctgcaggtaccccagccactccagctcccgggtgctcctcaaggaccggcaccccccagctccttcaccccagaatcctcaagatccctccccagatacttccccacccacctgtcccttcaagaccgccagcttcggttatttggacagaagcccttcggcgtgcaagagagacgcccaaaaggaaagtgtccaaggcgcagcccaggatgtagcaggggtcgctgcctgcctcccccttgcccagagcacgccattcccggggccagcagctggcccccggggcgtcttgctgacccgtaccggtacccgcgcccacagcctgggcatccgggagaagatatcagcatgggaaggtcgccgagaggcgtcgcccaggatgagcatgtgtggagagaagcgggagggctctgggagcgagtgggcggccagtgagggctgccccagcctgggctgtcccagcgtggtgccgtccccctgcagctctgaaaagacctttgatttcaagggcctccggaggatgagcaggaccttctccgagtgttcctacccagagactgaggaggagggagaggcgctccctgtccgggactctttctaccggctggagaaacggctgggccggagtgagcccagcgccttcctcagggggcatggcagcaggaaggagagctcagcagtgctgagccggatccagaaaattgaacaggtcctgaaggagcagccgggccgggggctcccccagctccccagcagctgctacagcgtggaccgggggaaaaggaagactggaaccttgggctccttggaggagccggcagggggcgcgagtgtgagcgctggcagccgggcagtcggagtggctggtgttgcgggggaggcgggcccacccccagagagggaaggcagtggttccactaagcccgggacccctggaaatagccctagctcccagcggctgccatcgaagagttccctcgatcccgctgtgaaccctgtccccaaacccaagcgcacctttgaatacgaggctgacaagaaccccaagagtaagcccagtaatggtctacctccttcacccacacctgctgctccacctcccttgccctccaccccagccccgccagtcacccggagacccaagaaggacatgcgtggtcaccgcaagtcccagagcagaaaatcctttgagtttgaggatgcatccagtctccagtccctgtacccctcttctcccactgagaatggtactgagaaccaacccaagtttggatccaaaagcactttagaagaaaatgcctatgaagatattgtgggagatctgcccaaggagaatccatatgaggatgtggacttaaagagccgaagagcaggacgaaaatcccagcaactgtctgagaactccttggactctttgcacaggatgtggagtcctcaggacaggaagtacaacagcccgcccacacagctttccctgaaacccaacagccagtccctgcgcagtgggaactggtcagaaaggaagagccaccggctgccacgattacccaagaggcacagccatgacgacatgctgctgctggctcagctgagtctgccgtcctcaccctccagcctcaatgaagacagcctcagcaccaccagcgagctgctgtccagccgccgggcccgccgcattcccaagcttgtccaaagaattaactccatctacaatgccaagagaggaaagaagagattaaaaaagttgtctatgtccagcattgaaacagcatcactgagagatgaaaacagtgagagcgagagcgactctgatgacaggttcaaagcccacacacagcgcctggtccacatccagtcgatgctgaagcgcgcccccagctatcgcacgctggagctggagctgctggagtggcaggagcgggagctttttgagtactttgtggtggtgtccctcaagaagaagccatcgcgaaacacctacctccccgaagtctcctaccagtttcccaagctggaccgacccaccaagcagatgcgagaggcagaggaaaggctcaaagccattccccagttttgcttccctgatgccaaggactggcttcctgtgtcagagtatagcagtgagaccttttctttcatgctgactggggaagatggcagcagacgctttggctactgcaggcgcttactgccaagtgggaaagggccccggttgccagaggtgtactgtgtcatcagccgccttggctgcttcggcttgttttccaaggtcctagatgaggtggagcgccggcgtgggatctccgctgcattggtctatcctttcatgagaagtctcatggagtcgcccttcccagccccagggaagaccatcaaagtgaagacattcctgccaggtgctggcaatgaggtgttagagctgcggcggcccatggactcaaggctggagcacgtggactttgagtgcctttttacctgcctcagtgtgcgccagctcatccgaatctttgcctcactgctgctggagcgccgggtcatttttgtggcagataagctcagtaccctctccagctgctcccacgcggtggtggccttgctctaccccttctcctggcagcacaccttcattcctgtcctcccggcctccatgattgacatcgtctgctgtcccacccccttcctggttggcctgctctccagctccctccccaaactgaaggagctgcctgtggaggaggcgctgatggtgaatctgggatctgaccgattcatccgacagatggacgacgaagacacgttgttacctaggaagttacaggcagctctggagcaggctctggagaggaagaatgagctgatctcccaggactctgacagcgactccgacgatgaatgtaataccctcaatgggctggtgtcggaggtgtttatccggttctttgtggagaccgttgggcactactccctctttctgacacagagtgagaagggagagagggcctttcagcgagaggccttccgcaaatctgtggcctccaaaagcatccgccgctttcttgaggtttttatggagtctcagatgtttgctggcttcatccaagacagggagctaagaaagtgtcgggcaaagggcctttttgagcagcgagtggagcagtacttagaagaactcccagacactgagcagagtggaatgaataagtttctccgaggtttgggcaacaaaatgaagtttctccacaagaagaattaagcctccttctcagtagcagagtccagtgccttgcagagcctgaagcctggggagaaggcccagcctgggaccctctgggctgctgtggctcctctgcccccacagatcctatcctccaagccagcccacctctgccttcatcatatcccaggatactgtttgtaaataatctgctgtaagctttcttaactgttttttgtaacaagcaaagagaatatggcaaatatttgtatattcccaaggggccgggtgctttcctgtcctgccagagcatggatgaagtttcgctgggtgctcgtgactggccagttttgtgcagctgactgtctcagccaaaccactgatcttccctggaggccttcggcctgcctgcctgcctgaggtccccgctgccagtcccgggccctggagagcagatgctgtcttgttatgtacaggaggaccttttaaaaaaatcaagtttctattttttgctggtagtccgcatacccataccctctgtttttgaaaggcaaaggccaatcagtccccatttgtagcatggcaccagggtcttaggcctagtcctctcattcctcccaccctccgagatggtcagtgtgtcatgggaagcccacccccagctctgccagtgctctctgggcctggctcccagtcagtggtggccacgatgcggtacagggcatccctccttcccatctacgggtgttctcaataaacaatgtacagttgtttgggcccagag

SEQ ID NO: 20568 - DNA, 4507 bp, Homo sapiens
  misc_feature 1..4507: note = ENST00000313726
  source 1..4507: mol_type = unassigned DNA
gagagagagagagagagagagagagagagagagacagtgagaaagaaagaaaaagagagcgcccttgtgcacgcgctaggccaagagcgcgccgctgtgcgcgcgcccgcctagcgaggacagggtctccatgacaaccggcctggccggctagcagtgctctgctcacttggctgcgaggagcgccacgaaaggtcagaggaaggagctgtgggaagctcgcagcaggtatcggagcttaagccagtggatttgggggccctgggctccctagccggctgcggtgtgagaatggagtgggcaggaaagcagcgggactttcagggctctgggtttgcagagagccgaaatgaccatgactgccaacaagaattccagcatcacccacggagctggtggcactaaagcccctcgggggactctgagcaggtctcagtcagtctctccacctccagttctctccccaccaaggagtcccatctacccgctcagtgatagtgaaacctcagcctgcaggtaccccagccactccagctcccgggtgctcctcaaggaccggcaccccccagctccttcaccccagaatcctcaagatccctccccagatacttccccacccacctgtcccttcaagaccgccagcttcggttatttggacagaagcccttcggcgtgcaagagagacgcccaaaaggaaagtgtccaaggcgcagcccaggatgtagcaggggtcgctgcctgcctcccccttgcccagagcacgccattcccggggccagcagctggcccccggggcgtcttgctgacccgtaccggtacccgcgcccacagcctgggcatccgggagaagatatcagcatgggaaggtcgccgagaggcgtcgcccaggatgagcatgtgtggagagaagcgggagggctctgggagcgagtgggcggccagtgagggctgccccagcctgggctgtcccagcgtggtgccgtccccctgcagctctgaaaagacctttgatttcaagggcctccggaggatgagcaggaccttctccgagtgttcctacccagagactgaggaggagggagaggcgctccctgtccgggactctttctaccggctggagaaacggctgggccggagtgagcccagcgccttcctcagggggcatggcagcaggaaggagagctcagcagtgctgagccggatccagaaaattgaacaggtcctgaaggagcagccgggccgggggctcccccagctccccagcagctgctacagcgtggaccgggggaaaaggaagactggaaccttgggctccttggaggagccggcagggggcgcgagtgtgagcgctggcagccgggcagtcggagtggctggtgttgcgggggaggcgggcccacccccagagagggaaggcagtggttccactaagcccgggacccctggaaatagccctagctcccagcggctgccatcgaagagttccctcgatcccgctgtgaaccctgtccccaaacccaagcgcacctttgaatacgaggctgacaagaaccccaagagtaagcccagtaatggtctacctccttcacccacacctgctgctccacctcccttgccctccaccccagccccgccagtcacccggagacccaagaaggacatgcgtggtcaccgcaagtcccagagcagaaaatcctttgagtttgaggatgcatccagtctccagtccctgtacccctcttctcccactgagaatggtactgagaaccaacccaagtttggatccaaaagcactttagaagaaaatgcctatgaagatattgtgggagatctgcccaaggagaatccatatgaggatgtggacttaaagagccgaagagcaggacgaaaatcccagcaactgtctgagaactccttggactctttgcacaggatgtggagtcctcaggacaggaagtacaacagcccgcccacacagctttccctgaaacccaacagccagtccctgcgcagtgggaactggtcagaaaggaagagccaccggctgccacgattacccaagaggcacagccatgacgacatgctgctgctggctcagctgagtctgccgtcctcaccctccagcctcaatgaagacagcctcagcaccaccagcgagctgctgtccagccgccgggcccgccgcattcccaagcttgtccaaagaattaactccatctacaatgccaagagaggaaagaagagattaaaaaagttgtctatgtccagcattgaaacagcatcactgagagatgaaaacagtgagagcgagagcgactctgatgacaggttcaaagcccacacacagcgcctggtccacatccagtcgatgctgaagcgcgcccccagctatcgcacgctggagctggagctgctggagtggcaggagcgggagctttttgagtactttgtggtggtgtccctcaagaagaagccatcgcgaaacacctacctccccgaagtctcctaccagtttcccaagctggaccgacccaccaagcagatgcgagaggcagaggaaaggctcaaagccattccccagttttgcttccctgatgccaaggactggcttcctgtgtcagagtatagcagtgagaccttttctttcatgctgactggggaagatggcagcagacgctttggctactgcaggcgcttactgccaagtgggaaagggccccggttgccagaggtgtactgtgtcatcagccgccttggctgcttcggcttgttttccaaggtcctagatgaggtggagcgccggcgtgggatctccgctgcattggtctatcctttcatgagaagtctcatggagtcgcccttcccagccccagggaagaccatcaaagtgaagacattcctgccaggtgctggcaatgaggtgttagagctgcggcggcccatggactcaaggctggagcacgtggactttgagtgcctttttacctgcctcagtgtgcgccagctcatccgaatctttgcctcactgctgctggagcgccgggtcatttttgtggcagataagctcagtaccctctccagctgctcccacgcggtggtggccttgctctaccccttctcctggcagcacaccttcattcctgtcctcccggcctccatgattgacatcgtctgctgtcccacccccttcctggttggcctgctctccagctccctccccaaactgaaggagctgcctgtggaggaggcgctgatggtgaatctgggatctgaccgattcatccgacagatggacgacgaagacacgttgttacctaggaagttacaggcagctctggagcaggctctggagaggaagaatgagctgatctcccaggactctgacagcgactccgacgatgaatgtaataccctcaatgggctggtgtcggaggtgtttatccggttctttgtggagaccgttgggcactactccctctttctgacacagagtgagaagggagagagggcctttcagcgagaggccttccgcaaatctgtggcctccaaaagcatccgccgctttcttgaggtttttatggagtctcagatgtttgctggcttcatccaagacagggagctaagaaagtgtcgggcaaagggcctttttgagcagcgagtggagcagtacttagaagaactcccagacactgagcagagtggaatgaataagtttctccgaggtttgggcaacaaaatgaagtttctccacaagaagaattaagcctccttctcagtagcagagtccagtgccttgcagagcctgaagcctggggagaaggcccagcctgggaccctctgggctgctgtggctcctctgcccccacagatcctatcctccaagccagcccacctctgccttcatcatatcccaggatactgtttgtaaataatctgctgtaagctttcttaactgttttttgtaacaagcaaagagaatatggcaaatatttgtatattcccaaggggccgggtgctttcctgtcctgccagagcatggatgaagtttcgctgggtgctcgtgactggccagttttgtgcagctgactgtctcagccaaaccactgatcttccctggaggccttcggcctgcctgcctgcctgaggtccccgctgccagtcccgggccctggagagcagatgctgtcttgttatgtacaggaggaccttttaaaaaaatcaagtttctattttttgctggtagtccgcatacccataccctctgtttttgaaaggcaaaggccaatcagtccccatttgtagcatggcaccagggtcttaggcctagtcctctcattcctcccaccctccgagatggtcagtgtgtcatgggaagcccacccccagctctgccagtgctctctgggcctggctcccagtcagtggtggccacgatgcggtacagggcatccctccttcccatctacgggtgttctcaataaacaatgtacagttgtttgggcccaga

SEQ ID NO: 20569 - DNA, 3396 bp, Homo sapiens
  misc_feature 1..3396: note = ENST00000530991
  source 1..3396: mol_type = unassigned DNA
ttctgcctgcttcctgaggagtggggtctgagttcctctggggcgtaaggcacattcagacatctgtagaacaagtgtgggactcagtggcacccaggctcaatcctgctgctgagcagaggtgctggagtgagtcctgctctgcagcaggaaaatagggaaaggggtgcagagagggctgtgttctgagttccccagggacctgttcaccccacggattctgccaccaggattgagctaggactgacccggcccatggtgttactctattttagaaaatgtgtgtgttggaggggtgggggcaggagatacagcttgtggaaaggagtgccactcaacatcttcaagggcagggattctgttttggacttttctgagattttctggtaatgccaatacaatgcccgctgccagagattttagaactagtcctgagaagcaagaactcccctcacccccaccctttggcccagactccttccaagcctttcacacctcccctgtgtcacagcaggagagtttgttccaaaaggggagtgttgatggttctctttttgctgagatcagcggtagagggaatagacactacagtaggagagtcatcgaacagatcattactgaacacttcctccttgctaatcactgttccgttccgaggttgcctcagtgaacaacacaaaaccctgccctaaaagacttgttgaacggcatcgtaggagatctgcccaaggagaatccatatgaggatgtggacttaaagagccgaagagcaggacgaaaatcccagcaactgtctgagaactccttggactctttgcacaggatgtggagtcctcaggacaggaagtacaacagcccgcccacacagctttccctgaaacccaacagccagtccctgcgcagtgggaactggtcagaaaggaagagccaccggctgccacgattacccaagaggcacagccatgacgacatgctgctgctggctcagctgagtctgccgtcctcaccctccagcctcaatgaagacagcctcagcaccaccagcgagctgctgtccagccgccgggcccgccgcattcccaagcttgtccaaagaattaactccatctacaatgccaagagaggaaagaagagattaaaaaagttgtctatgtccagcattgaaacagcatcactgagagatgaaaacagtgagagcgagagcgactctgatgacaggttcaaagcccacacacagcgcctggtccacatccagtcgatgctgaagcgcgcccccagctatcgcacgctggagctggagctgctggagtggcaggagcgggagctttttgagtactttgtggtggtgtccctcaagaagaagccatcgcgaaacacctacctccccgaagtctcctaccagtttcccaagctggaccgacccaccaagcagatgcgagaggcagaggaaaggctcaaagccattccccagttttgcttccctgatgccaaggactggcttcctgtgtcagagtatagcagtgagaccttttctttcatgctgactggggaagatggcagcagacgctttggctactgcaggcgcttactgccaagtgggaaagggccccggttgccagaggtgtactgtgtcatcagccgccttggctgcttcggcttgttttccaaggtcctagatgaggtggagcgccggcgtgggatctccgctgcattggtctatcctttcatgagaagtctcatggagtcgcccttcccagccccagggaagaccatcaaagtgaagacattcctgccaggtgctggcaatgaggtgttagagctgcggcggcccatggactcaaggctggagcacgtggactttgagtgcctttttacctgcctcagtgtgcgccagctcatccgaatctttgcctcactgctgctggagcgccgggtcatttttgtggcagataagctcagtaccctctccagctgctcccacgcggtggtggccttgctctaccccttctcctggcagcacaccttcattcctgtcctcccggcctccatgattgacatcgtctgctgtcccacccccttcctggttggcctgctctccagctccctccccaaactgaaggagctgcctgtggaggaggcgctgatggtgaatctgggatctgaccgattcatccgacagatggacgacgaagacacgttgttacctaggaagttacaggcagctctggagcaggctctggagaggaagaatgagctgatctcccaggactctgacagcgactccgacgatgaatgtaataccctcaatgggctggtgtcggaggtgtttatccggttctttgtggagaccgttgggcactactccctctttctgacacagagtgagaagggagagagggcctttcagcgagaggccttccgcaaatctgtggcctccaaaagcatccgccgctttcttgaggtttttatggagtctcagatgtttgctggcttcatccaagacagggagctaagaaagtgtcgggcaaagggcctttttgagcagcgagtggagcagtacttagaagaactcccagacactgagcagagtggaatgaataagtttctccgaggtttgggcaacaaaatgaagtttctccacaagaagaattaagcctccttctcagtagcagagtccagtgccttgcagagcctgaagcctggggagaaggcccagcctgggaccctctgggctgctgtggctcctctgcccccacagatcctatcctccaagccagcccacctctgccttcatcatatcccaggatactgtttgtaaataatctgctgtaagctttcttaactgttttttgtaacaagcaaagagaatatggcaaatatttgtatattcccaaggggccgggtgctttcctgtcctgccagagcatggatgaagtttcgctgggtgctcgtgactggccagttttgtgcagctgactgtctcagccaaaccactgatcttccctggaggccttcggcctgcctgcctgcctgaggtccccgctgccagtcccgggccctggagagcagatgctgtcttgttatgtacaggaggaccttttaaaaaaatcaagtttctattttttgctggtagtccgcatacccataccctctgtttttgaaaggcaaaggccaatcagtccccatttgtagcatggcaccagggtcttaggcctagtcctctcattcctcccaccctccgagatggtcagtgtgtcatgggaagcccacccccagctctgccagtgctctctgggcctggctcccagtcagtggtggccacgatgcggtacagggcatccctccttcccatctacgggtgttctcaataaacaatgtacagttgtttgggcccag

SEQ ID NO: 20570 - DNA, 2404 bp, Homo sapiens
  misc_feature 1..2404: note = ENST00000526099
  source 1..2404: mol_type = unassigned DNA
gtgaacaacacaaaaccctgccctaaaagacttgttgaacggcatcgtaggtgagaagggggcctggcgaagccctgctccctacggttctgtgagttcctccatgcccaccctccaaagagatctgcccaaggagaatccatatgaggatgtggacttaaagagccgaagagcaggacgaaaatcccagcaactgtctgagaactccttggactctttgcacaggatgtggagtcctcaggacaggaagtacaacagcccgcccacacagctttccctgaaacccaacagccagtccctgcgcagtgggaactggtcagaaaggaagagccaccggctgccacgattacccaagaggcacagccatgacgacatgctgctgctggctcagctgagtctgccgtcctcaccctccagcctcaatgaagacagcctcagcaccaccagcgagctgctgtccagccgccgggcccgccgcattcccaagcttgtccaaagaattaactccatctacaatgccaagagaggaaagaagagattaaaaaagttgtctatgtccagcattgaaacagcatcactgagagatgaaaacagtgagagcgagagcgactctgatgacaggttcaaagcccacacacagcgcctggtccacatccagtcgatgctgaagcgcgcccccagctatcgcacgctggagctggagctgctggagtggcaggagcgggagctttttgagtactttgtggtggtgtccctcaagaagaagccatcgcgaaacacctacctccccgaagtctcctaccagtttcccaagctggaccgacccaccaagcagatgcgagaggcagaggaaaggctcaaagccattccccagttttgcttccctgatgccaaggactggcttcctgtgtcagagtatagcagtgagaccttttctttcatgctgactggggaagatggcagcagacgctttggctactgcaggcgcttactgccaagtgggaaagggccccggttgccagaggtgtactgtgtcatcagccgccttggctgcttcggcttgttttccaaggtcctagatgaggtggagcgccggcgtgggatctccgctgcattggtctatcctttcatgagaagtctcatggagtcgcccttcccagccccagggaagaccatcaaagtgaagacattcctgccaggtgctggcaatgaggtgttagagctgcggcggcccatggactcaaggctggagcacgtggactttgagtgcctttttacctgcctcagtgtgcgccagctcatccgaatctttgcctcactgctgctggagcgccgggtcatttttgtggcagataagctcagtaccctctccagctgctcccacgcggtggtggccttgctctaccccttctcctggcagcacaccttcattcctgtcctcccggcctccatgattgacatcgtctgctgtcccacccccttcctggttggcctgctctccagctccctccccaaactgaaggagctgcctgtggaggaggcgctgatggtgaatctgggatctgaccgattcatccgacagatggacgacgaagacacgttgttacctaggaagttacaggcagctctggagcaggctctggagaggaagaatgagctgatctcccaggactctgacagcgactccgacgatgaatgtaataccctcaatgggctggtgtcggaggtgtttatccggttctttgtggagaccgttgggcactactccctctttctgacacagagtgagaagggagagagggcctttcagcgagaggccttccgcaaatctgtggcctccaaaagcatccgccgctttcttgaggtttttatggagtctcagatgtttgctggcttcatccaagacagggagctaagaaagtgtcgggcaaagggcctttttgagcagcgagtggagcagtacttagaagaactcccagacactgagcagagtggaatgaataagtttctccgaggtttgggcaacaaaatgaagtttctccacaagaagaattaagcctccttctcagtagcagagtccagtgccttgcagagcctgaagcctggggagaaggcccagcctgggaccctctgggctgctgtggctcctctgcccccacagatcctatcctccaagccagcccacctctgccttcatcatatcccaggatactgtttgtaaataatctgctgtaagctttcttaactgttttttgtaacaagcaaagagaatatggcaaatatttgtatattcccaaggggccgggtgctttcctgtcctgccagagcatggatgaagtttcgctgggtgctcgtgactggccagttttgtgcagctgactgtctcagccaaaccactgatctt

SEQ ID NO: 20571 - DNA, 367 bp, Homo sapiens
  misc_feature 1..367: note = ENST00000527540
  source 1..367: mol_type = unassigned DNA
gaatctataaacatggaacccatggacgcagaactcatggatatggaggacaggctgtatttaccatattgcattacaaagaggaatcccaggttcccacatacatcaggcaacaaaatgaagtttctccacaagaagaattaagcctccttctcagtagcagagtccagtgccttgcagagcctgaagcctggggagaaggcccagcctgggaccctctgggctgctgtggctcctctgcccccacagatcctatcctccaagccagcccacctctgccttcatcatatcccaggatactgtttgtaaataatctgctgtaagctttcttaactgttttttgtaacaagcaaagagaatatggcaa

SEQ ID NO: 20572 - DNA, 769 bp, Homo sapiens
  misc_feature 1..769: note = ENST00000532162
  source 1..769: mol_type = unassigned DNA
cgggactcatgccctgagccactctgctaatgactccttttctcaggcgctgatggtgaatctgggatctgaccgattcatccgacagatggacgacgaagacacgttgttacctaggaagttacaggcagctctggagcaggctctggagaggaagaatgagctgatctcccaggactctgacagcgactccgacgatgaatgtaataccctcaatgggctggtgtcggaggtgtttatccggttctttgtggagaccgttgggcactactccctctttctgacacagagtgagaagggagagagggcctttcagcgagaggccttccgcaaatctgtggcctccaaaagcatccgccgctttcttgaggtttttatggagtctcagatgtttgctggcttcatccaagacagggagctaagaaagtgtcgggcaaagggcctttttgagcagcgagtggagcagtacttagaagaactcccagacactgagcagagtggaatgaataagtttctccgaggtttgggcaacaaaatgaagtttctccacaagaagaattaagcctccttctcagtagcagagtccagtgccttgcagagcctgaagcctggggagaaggcccagcctgggaccctctgggctgctgtggctcctctgcccccacagatcctatcctccaagccagcccacctctgccttcatcatatcccaggatactgtttgtaaataatctgctgtaagctttcttaactgttttttgtaacaagc

SEQ ID NO: 20573 - DNA, 1352 bp, Homo sapiens
  misc_feature 1..1352: note = ENST00000534278
  source 1..1352: mol_type = unassigned DNA
gagcctggtacctggtgctgggagaccctgcagagctgaggcctgtcctgagagtggtggctgttccttcagggctctggttgcagagaggtttagaggaggcttaaagtcttcctccactagaagggcagtccttactcctccgttcccaaggaaaaggagccagaaatggtcctagatgaggtggagcgccggcgtgggatctccgctgcattggtctatcctttcatgagaagtctcatggagtcgcccttcccagccccagggaagaccatcaaagtgaagacattcctgccaggtgctggcaatgaggtgttagagctgcggcggcccatggactcaaggctggagcacgtggactttgagtgcctttttacctgcctcagtgtgcgccagctcatccgaatctttgcctcactgctgctggagcgccgggtcatttttgtggcagataagctcagtaccctctccagctgctcccacgcggtggtggccttgctctaccccttctcctggcagcacaccttcattcctgtcctcccggcctccatgattgacatcgtctgctgtcccacccccttcctggttggcctgctctccagctccctccccaaactgaaggagctgcctgtggaggaggcgctgatggtgaatctgggatctgaccgattcatccgacagatggacgacgaagacacgttgttacctaggaagttacaggcagctctggagcaggctctggagaggaagaatgagctgatctcccaggactctgacagcgactccgacgatgaatgtaataccctcaatgggctggtgtcggaggtgtttatccggttctttgtggagaccgttgggcactactccctctttctgacacagagtgagaagggagagagggcctttcagcgagaggccttccgcaaatctgtggcctccaaaagcatccgccgctttcttgaggtttttatggagtctcagatgtttgctggcttcatccaagacagggagctaagaaagtgtcgggcaaagggcctttttgagcagcgagtggagcagtacttagaagaactcccagacactgagcagagtggaatgaataagtttctccgaggtttgggcaacaaaatgaagtttctccacaagaagaattaagcctccttctcagtagcagagtccagtgccttgcagagcctgaagcctggggagaaggcccagcctgggaccctctgggctgctgtggctcctctgcccccacagatcctatcctccaagccagcccacctctgccttcatcatatcccaggatactgtttgtaaataatctgctgtaagctttcttaactgttttt

SEQ ID NO: 20574 - DNA, 602 bp, Homo sapiens
  misc_feature 1..602: note = ENST00000524513
  source 1..602: mol_type = unassigned DNA
tttttgctatttcatcagctcattcgagggctttttcatctcatcacaatttttctgtctaacctcagggttagtacttcttctgtcctctaatactatccatttagtataacaacctttttggaacaacatggtagagttgtctgaaggaagctagagatgtccacttggggcagctctgaactgagaagcagcctcctcacctagtgcagcttgggaatgtgcatggggaggcagggtggcagcagcaaaccccggcaagatgtcactaatgatcgccttgatgagccagcccgaattctagtaagatgctcctgcaaattatcatcccagatgttttctttctccttttttggcatctgtgctccatggttcccttcatgtaggcctctccttcccttcctccaatgactgttctcttccctgtgcctgtttcttttacccaggcctttttgagcagcgagtggagcagtacttagaagaactcccagacactgagcagagtggaatgaataagtttctccgaggtttgggcaacaaaatgaagtttctccacaagaagaattaagcctccttctcagtagcagagtccagtgccttgc

SEQ ID NO: 20575 - DNA, 2679 bp, Homo sapiens
  misc_feature 1..2679: note = ENST00000530438
  source 1..2679: mol_type = unassigned DNA
gaagaaaacaagtccactcactgtcttctcccttctcccctctgagctgttcaagcaagttcccaggagcagttcagagcccctgttggactggaagggaggtaggaggagtggaatgcatgcaaaaaccgagctgatcaaaagacagtgctgtttcatggaagcctcccagaactgagagagagagagagagagagagagagagagagacagtgagaaagaaagaaaaagagagcgcccttgtgcacgcgctaggccaagagcgcgccgctgtgcgcgcgcccgcctagcgaggacagggtctccatgacaaccggcctggccggctagcagtgctctgctcacttggctgcgaggagcgccacgaaaggtcagaggaaggagctgtgggaagctcgcagcaggtatcggagcttaagccagtggatttgggggccctgggctccctagccggctgcggtgtgagaatggagtgggcaggaaagcagcgggactttcagggctctgggtttgcagagagccgaaatgaccatgactgccaacaagaattccagcatcacccacggagctggtggcactaaagcccctcgggggactctgagcagaaaatcctttgagtttgaggatgcatccagtctccagtccctgtacccctcttctcccactgagaatggtactgagaaccaacccaagtttggatccaaaagcactttagaagaaaatgcctatgaagatattgtgggagatctgcccaaggagaatccatatgaggatgtggacttaaagagccgaagagcaggacgaaaatcccagcaactgtctgagaactccttggactctttgcacaggatgtggagtcctcaggacaggaagtacaacagcccgcccacacagctttccctgaaacccaacagccagtccctgcgcagtgggaactggtcagaaaggaagagccaccggctgccacgattacccaagaggcacagccatgacgacatgctgctgctggctcagctgagtctgccgtcctcaccctccagcctcaatgaagacagcctcagcaccaccagcgagctgctgtccagccgccgggcccgccgcattcccaagcttgtccaaagaattaactccatctacaatgccaagagaggaaagaagagattaaaaaagttgtctatgtccagcattgaaacagcatcactgagagatgaaaacagtgagagcgagagcgactctgatgacaggttcaaagcccacacacagcgcctggtccacatccagtcgatgctgaagcgcgcccccagctatcgcacgctggagctggagctgctggagtggcaggagcgggagctttttgagtactttgtggtggtgtccctcaagaagaagccatcgcgaaacacctacctccccgaagtctcctaccagtttcccaagctggaccgacccaccaagcagatgcgagaggcagaggaaaggctcaaagccattccccagttttgcttccctgatgccaaggactggcttcctgtgtcagagtatagcagtgagaccttttctttcatgctgactggggaagatggcagcagacgctttggctactgcaggcgcttactgccaagtgggaaagggccccggttgccagaggtgtactgtgtcatcagccgccttggctgcttcggcttgttttccaaggtcctagatgaggtggagcgccggcgtgggatctccgctgcattggtctatcctttcatgagaagtctcatggagtcgcccttcccagccccagggaagaccatcaaagtgaagacattcctgccaggtgctggcaatgaggtgttagagctgcggcggcccatggactcaaggctggagcacgtggactttgagtgcctttttacctgcctcagtgtgcgccagctcatccgaatctttgcctcactgctgctggagcgccgggtcatttttgtggcagataagctcagtaccctctccagctgctcccacgcggtggtggccttgctctaccccttctcctggcagcacaccttcattcctgtcctcccggcctccatgattgacatcgtctgctgtcccacccccttcctggttggcctgctctccagctccctccccaaactgaaggagctgcctgtggaggaggcgctgatggtgaatctgggatctgaccgattcatccgacagatggacgacgaagacacgttgttacctaggaagttacaggcagctctggagcaggctctggagaggaagaatgagctgatctcccaggactctgacagcgactccgacgatgaatgtaataccctcaatgggctggtgtcggaggtgtttatccggttctttgtggagaccgttgggcactactccctctttctgacacagagtgagaagggagagagggcctttcagcgagaggccttccgcaaatctgtggcctccaaaagcatccgccgctttcttgaggtttttatggagtctcagatgtttgctggcttcatccaagacagggagctaagaaagtgtcgggcaaagggcctttttgagcagcgagtggagcagtacttagaagaactcccagacactgagcagagtggaatgaataagtttctccgaggtttgggcaacaaaatgaagtttctccacaagaagaattaa

SEQ ID NO: 20576 - DNA, 480 bp, Homo sapiens
  misc_feature 1..480: note = ENST00000532738
  source 1..480: mol_type = unassigned DNA
atgaggttgatgatagttatgagggttactgggagagataaatgagattatctactcacgctcttctaacaggtcttagcacatagtaagtgctcagtgtcagctatgattgtcactgtgctttctttctcctgcagatggacgacgaagacacgttgttacctaggaagttacaggcagctctggagcaggctctggagaggaagaatgagctgatctcccaggactctgacagcgactccgacgatgaatgtaataccctcaatgggctggtgtcggaggtgtttatccggttctttgtggagaccgttgggcactactccctctttctgacacagagtgagaagggagagagggcctttcagcgagaggccttccgcaaatctgtggcctccaaaagcatccgccgctttcttgaggtttttatggagtctcagatgtttgctggcttcatccaagacagggagctaagaaagtgtc

SEQ ID NO: 20577 - DNA, 776 bp, Homo sapiens
  misc_feature 1..776: note = ENST00000526062
  source 1..776: mol_type = unassigned DNA
acctgcctcagtgtgcgccagctcatccgaatctttgcctcactgctgctggagcgccgggtcatttttgtggcagataagctcagctgcctctgagcacattccaggaccattctgggagggacgatcccaaggtcttgttcttggcctggccgggtattcaagttctgccaatctggggtcttggaaaagatgtccttcctgttctgcctggggtctgcctctggctggagaggggagggtaccctctccagctgctcccacgcggtggtggccttgctctaccccttctcctggcagcacaccttcattcctgtcctcccggcctccatgattgacatcgtctgctgtcccacccccttcctggttggcctgctctccagctccctccccaaactgaaggagctgcctgtggaggaggcgctgatggtgaatctgggatctgaccgattcatccgacagatggacgacgaagacacgttgttacctaggaagttacaggcagctctggagcaggctctggagaggaagaatgagctgatctcccaggactctgacagcgactccgacgatgaatgtaataccctcaatgggctggtgtcggaggtgtttatccggttctttgtggagaccgttgggcactactccctctttctgacacagagtgagaagggagagagggcctttcagcgagaggccttccgcaaatctgtggcctccaaaagcatccgccgctttcttgaggtttttatggagtctcagatgtttgctggctt

SEQ ID NO: 20578 - DNA, 463 bp, Homo sapiens
  misc_feature 1..463: note = ENST00000532871
  source 1..463: mol_type = unassigned DNA
cctgacacccttcctctttgggctgctggcggtgggcacaggtcctagatgaggtggagcgccggcgtgggatctccgctgcattggtctatcctttcatgagaagtctcatggagtcgcccttcccagccccagggaagaccatcaaagtgaagacattcctgccaggtgctggcaatgagtaccctctccagctgctcccacgcggtggtggccttgctctaccccttctcctggcagcacaccttcattcctgtcctcccggcctccatgattgacatcgtctgctgtcccacccccttcctggttggcctgctctccagctccctccccaaactgaaggagctgcctgtggaggaggcgctgatggtgaatctgggatctgaccgattcatccgacagatggacgacgaagacacgttgttacctaggaagttacaggcagctctggagcaggctctgg

SEQ ID NO: 20579 - DNA, 551 bp, Homo sapiens
  misc_feature 1..551: note = ENST00000533081
  source 1..551: mol_type = unassigned DNA
gtcctagatgaggtggagcgccggcgtgggatctccgctgcattggtctatcctttcatgagaagtctcatggagtcgcccttcccagccccagggaagaccatcaaagtgaagacattcctgccaggtgctggcaatgaggtgttagagctgcggcggcccatggactcaaggctggagcacgtggactttgagtgcctttttacctgcctcagtgtgcgccagctcatccgaatctttgcctcactgctgctggagcgccgggtcatttttgtggcagataagctcagtaccctctccagctgctcccacgcggtggtggccttgctctaccccttctcctggcagcacaccttcattcctgtcctcccggcctccatgattgacatcgtctgctgtcccacccccttcctggttggcctgctctccagctccctccccaaactgaaggagctgcctgtggaggaggcgctgatggtgaatctgggatctgaccgattcatccgacagatagagggacctgctaagttgcccaggctggtctcgaactc

SEQ ID NO: 20580 - DNA, 1440 bp, Homo sapiens
  misc_feature 1..1440: note = ENST00000526701
  source 1..1440: mol_type = unassigned DNA
aagccattccccagttttgcttccctgatgccaaggactggcttcctgtgtcagagtatagcagtgagaccttttctttcatgctgactggggaagatggcagcagacgctttggctactgcaggcgcttactgccaagtgggaaagggccccggttgccagaggtgtactgtgtcatcagccgccttggctgcttcggcttgttttccaaggtcctagatgaggtggagcgccggcgtgggatctccgctgcattggtctatcctttcatgagaagtctcatggagtcgcccttcccagccccagggaagaccatcaaagtgaagacattcctgccaggtgctggcaatgagttttcaggaggcctgcacatctatgctgcacacacatgctgcgggaccaaggaggaggccaggcagaccccagggacagctgctttggcacggcctgagcgtcagcagttcctcctgccctcaccgctggagtcactcactaccttccacccctgtgactcccccagagaagtggctctctgagctgtggcactcaccttgggagcagcctttggaggaaagagggccaggcctggccctgataagacagtcctgcttcctggcaaggctgcagaatggccagccctttgcttatgttttccttgtgactggcatgggacttagggtgatggagataaaggccaggatagcaggacaaacagcctctggaaggaaactctttctgcaggaaagggagggggacagggcaacaaggaccccagcattgcccttccagaggcaatggctgggattagagtcctgggatgcggagatgcctggagagcagtggggtctagtcagcactgggggcttagacctttgtctggggaggtgggcaggaggaccctagagatgtggctgtgtggttcccttcttctccctatctctaagagcagtcagctctcctctcttcctgaggtcccgatggatggcccctcaactccttccttctggagccttccccgctttcacaggcagccctcttgcccacaggctgggtgttcgagtgctacgagagcagagctgtagtccgagggatggagaagaggggtttactgcatagcagggtagacgagagacctggaaaagagcaggttggaaggggaaagcagctccagttgcttcgtggagggccagagggcagcacccacttggctggccccggcccactttcccatcgctctcctgcaggtgttagagctgcggcggcccatggactcaaggctggagcacgtggactttgagtgcctttttacctgcctcagtgtgcgccagctcatccgaatctttgcctcactgctgctggagcgccgggtcatttttgtggcagataagctcagctgcctctgagcacattccaggaccattctgggagggacgatcccaa

SEQ ID NO: 20581 - DNA, 190 bp, Homo sapiens
  misc_feature 1..190: note = ENST00000530922
  source 1..190: mol_type = unassigned DNA
ctgcatagcagggtagacgagagacctggaaaagagcaggtgttagagctgcggcggcccatggactcaaggctggagcacgtggactttgagtgcctttttacctgcctcagtgtgcgccagctcatccgaatctttgcctcactgctgctggagcgccgggtcatttttgtggcagataagctcaggt

SEQ ID NO: 20582 - DNA, 738 bp, Homo sapiens
  misc_feature 1..738: note = ENST00000530559
  source 1..738: mol_type = unassigned DNA
cccccacgccagctttccctgaaacccaacagccagtccctgcgcagtgggaactggtcagaaaggaagagccaccggctgccacgattacccaagaggcacagccatgacgacatgctgctgctggctcagctgagtctgccgtcctcaccctccagcctcaatgaagacagcctcagcaccaccagcgagctgctgtccagccgccgggcccgccgcattcccaagcttgtccaaagaattaactccatctacaatgccaagagaggaaagaagagattaaaaaagttgtctatgtccagcattgaaacagcatcactgagagatgaaaacagtgagagcgagagcgactctgatgacaggttcaaagccaagtgggaaagggccccggttgccagaggtgtactgtgtcatcagccgccttggctgcttcggcttgttttccaaggtcctagatgaggtggagcgccggcgtgggatctccgctgcattggtctatcctttcatgagaagtctcatggagtcgcccttcccagccccagggaagaccatcaaagtgaagacattcctgccaggtgctggcaatgaggtgttagagctgcggcggcccatggactcaaggctggagcacgtggactttgagtgcctttttacctgcctcagtgtgcgccagctcatccgaatctttgcctcactgctgctggagcgccgggtcatttttgtggcagataagctcag

SEQ ID NO: 20583 - DNA, 1309 bp, Homo sapiens
  misc_feature 1..1309: note = ENST00000533020
  source 1..1309: mol_type = unassigned DNA
gtagcctccccactgcagacgggcagctgcatgactcatgagctgaggggccaggcagaagccattctctttggttcacaggaattctgcttgtttatttgtgtgtgtgtgagttcgtgtgtttccttcttcccttctcccccttctctaactcttcctcctctgcaggagatctgcccaaggagaatccatatgaggatgtggacttaaagagccgaagagcaggacgaaaatcccagcaactgtctgagaactccttggactctttgcacaggatgtggagtcctcaggacaggaagtacaacagcccgcccacacagctttccctgaaacccaacagccagtccctgcgcagtgggaactggtcagaaaggaagagccaccggctgccacgattacccaagaggcacagccatgacgacatgctgctgctggctcagctgagtctgccgtcctcaccctccagcctcaatgaagacagcctcagcaccaccagcgagctgctgtccagccgccgggcccgccgcattcccaagcttgtccaaagaattaactccatctacaatgccaagagaggaaagaagagattaaaaaagttgtctatgtccagcattgaaacagcatcactgagagatgaaaacagtgagagcgagagcgactctgatgacaggttcaaagcccacacacagcgcctggtccacatccagtcgatgctgaagcgcgcccccagctatcgcacgctggagctggagctgctggagtggcaggagcgggagctttttgagtactttgtggtggtgtccctcaagaagaagccatcgcgaaacacctacctccccgaagtctcctaccagtttcccaagctggaccgacccaccaagcagatgcgagaggcagaggaaaggctcaaagccattccccagttttgcttccctgatgccaaggactggcttcctgtgtcagagtatagcagtgagaccttttctttcatgctgactggggaagatggcagcagacgctttggctactgcaggcgcttactgccaagtgggaaagggccccggttgccagaggtgtactgtgtcatcagccgccttggctgcttcggcttgttttccaaggtcctagatgaggtggagcgccggcgtgggatctccgctgcattggtctatcctttcatgagaagtctcatggagtcgcccttcccagccccagggaagaccatcaaagtgaagacattcctgccaggtgctggcaatgaggtgttagagctgcggcggcccatggactcaaggctggagcacgtgga

SEQ ID NO: 20584 - DNA, 566 bp, Homo sapiens
  misc_feature 1..566: note = ENST00000526837
  source 1..566: mol_type = unassigned DNA
aagccattccccagttttgcttccctgatgccaaggactggcttcctgtgtcagagtatagcagtgagaccttttctttcatgctgactggggaagatggcagcagacgctttggctactgcaggcgcttactgccaagtgggaaagggccccggttgccagaggtgtactgtgtcatcagccgccttggctgcttcggcttgttttccaaggtcctagatgaggtggagcgccggcgtgggatctccgctgcattggtctatcctttcatgagaagtctcatggagtcgcccttcccagccccagggaagaccatcaaagtgaagacattcctgccaggtgctggcaatgagttttcaggaggcctgcacatctatgctgcacacacatgctgcgggaccaaggaggaggccaggcagaccccagggacagctgctttggcacggcctgagcgtcagcagttcctcctgccctcaccgctggagtcactcactaccttccacccctgtgactcccccagagaagtggctctctgagctgtggcactcaccttgggagcagccttt

SEQ ID NO: 20585 - DNA, 590 bp, Homo sapiens
  misc_feature 1..590: note = ENST00000530338
  source 1..590: mol_type = unassigned DNA
tggtccacatccagtcgatgctgaagcgcgcccccagctatcgcacgctggagctggagctgctggagtggcaggagcgggagctttttgagtactttgtggtggtgtccctcaagaagaagccatcgcgaaacacctacctccccgaagtctcctaccagtttcccaagctggaccgacccaccaagcagatgcgagaggcagaggaaaggctcaaagccattccccagttttgcttccctgatgccaaggactggcttcctgtgtcagagtatagtcctctcacacctccctgatgccagacctctctttgttccagtgagaccttttctttcatgctgactggggaagatggcagcagacgctttggctactgcaggcgcttactgccaagtgggaaagggccccggttgccagaggtgtactgtgtcatcagccgccttggctgcttcggcttgttttccaaggtcctagatgaggtggagcgccggcgtgggatctccgctgcattggtctatcctttcatgagaagtctcatggagtcgcccttcccagccccagggaagaccatcaaagtgaagacattcctg

SEQ ID NO: 20586 - DNA, 1412 bp, Homo sapiens
  misc_feature 1..1412: note = ENST00000532734
  source 1..1412: mol_type = unassigned DNA
attatgacttcaaggaagaatggaggtggggcgcatagctggcaagaaaccccgtgggaacaaagaagggctctgggtttgcagagagccgaaatgaccatgactgccaacaagaattccagcatcacccacggagctggtggcactaaagcccctcgggggactctgagcagaaaatcctttgagtttgaggatgcatccagtctccagtccctgtacccctcttctcccactgagaatggtactgagaaccaacccaagtttggatccaaaagcactttagaagaaaatgcctatgaagatattgtgggagatctgcccaaggagaatccatatgaggatgtggacttaaagagccgaagagcaggacgaaaatcccagcaactgtctgagaactccttggactctttgcacaggatgtggagtcctcaggacaggaagtacaacagcccgcccacacagctttccctgaaacccaacagccagtccctgcgcagtgggaactggtcagaaaggaagagccaccggctgccacgattacccaagaggcacagccatgacgacatgctgctgctggctcagctgagtctgccgtcctcaccctccagcctcaatgaagacagcctcagcaccaccagcgagctgctgtccagccgccgggcccgccgcattcccaagcttgtccaaagaattaactccatctacaatgccaagagaggaaagaagagattaaaaaagttgtctatgtccagcattgaaacagcatcactgagagatgaaaacagtgagagcgagagcgactctgatgacaggttcaaagcccacacacagcgcctggtccacatccagtcgatgctgaagcgcgcccccagctatcgcacgctggagctggagctgctggagtggcaggagcgggagctttttgagtactttgtggtggtgtccctcaagaagaagccatcgcgaaacacctacctccccgaagtctcctaccagtttcccaaggaatgtgctttctccagctcttcacgtggctgctggctccttctcatttctcaggctctgctcaagtaggacctctttcaggaggtctgtccagacacctgcatggagcccctcccctgcccagcttgctctgctggaccgacccaccaagcagatgcgagaggcagaggaaaggctcaaagccattccccagttttgcttccctgatgccaaggactggcttcctgtgtcagagtatagcagaccttttctttcatgctgactggggaagatggcagcagacgctttggctactgcaggcgcttactgccaagtgggaaagggccccggttgccagaggtgtactgtgtcatcagccgccttggctgcttcggcttgttttccaaggtcctagatgaggtggagcg

SEQ ID NO: 20587 - DNA, 862 bp, Homo sapiens
  misc_feature 1..862: note = ENST00000530593
  source 1..862: mol_type = unassigned DNA
agtccctgtacccctcttctcccactgagaatggtactgagaaccaacccaagtttggatccaaaagcactttagaagaaaatgcctatgaagatattgtgggagatctgcccaaggagaatccatatgaggatgtggacttaaagagccgaagagcaggacgaaaatcccagcaactgtctgagaactccttggactctttgcacaggatgtggagtcctcaggacaggaagtacaacagcccgcccacacagctttccctgaaacccaacagccagtccctgcgcagtgggaactggtcagaaaggaagagccaccggctgccacgattacccaagaggcacagccatgacgacatgctgctgctggctcagctgagtctgccgtcctcaccctccagcctcaatgaagacagcctcagcaccaccagcgagctgctgtccagccgccgggcccgccgcattcccaagcttgtccaaagaattaactccatctacaatgccaagagaggaaagaagagattaaaaaagttgtctatgtccagcattgaaacagcatcactgagagcccacacacagcgcctggtccacatccagtcgatgctgaagcgcgcccccagctatcgcacgctggagctggagctgctggagtggcaggagcgggagctttttgagtactttgtggtggtgtccctcaagaagaagccatcgcgaaacacctacctccccgaagtctcctaccagtttcccaagctggaccgacccaccaagcagatgcgagaggcagaggaaaggctcaaagccattccccagttttgcttccctgatgccaaggactggcttcctgtgtcagagtatagcag

SEQ ID NO: 20588 - DNA, 940 bp, Homo sapiens
  misc_feature 1..940: note = ENST00000528527
  source 1..940: mol_type = unassigned DNA
acttggctgcgaggagcgccacgaaaggtcagaggaaggagctgtgggaagctcgcagcaggtatcggagcttaagccagtggatttgggggccctgggctccctagccggctgcggtgtgagaatggagtgggcaggaaagcagcgggactttcagaaaatcctttgagtttgaggatgcatccagtctccagtccctgtacccctcttctcccactgagaatggtactgagaaccaacccaagtttggatccaaaagcactttagaagaaaatgcctatgaagatattgtgggagatctgcccaaggagaatccatatgaggatgtggacttaaagagccgaagagcaggacgaaaatcccagcaactgtctgagaactccttggactctttgcacaggatgtggagtcctcaggacaggaagtacaacagcccgcccacacagctttccctgaaacccaacagccagtccctgcgcagtgggaactggtcagaaaggaagagccaccggctgccacgattacccaagaggcacagccatgacgacatgctgctgctggctcagctgagtctgccgtcctcaccctccagcctcaatgaagacagcctcagcaccaccagcgagctgctgtccagccgccgggcccgccgcattcccaagcttgtccaaagaattaactccatctacaatgccaagagaggaaagaagagattaaaaaagttgtctatgtccagcattgaaacagcatcactgagagatgaaaacagtgagagcgagagcgactctgatgacaggttcaaagcccacacacagcgcctggtccacatccagtcgatgctgaagcgcgcccccagctatcgcacgctggagctggagctgctggagtggcaggagcgggagctttttgagtactttgtggtggtgtccctcaagaagaa

SEQ ID NO: 20589 - DNA, 452 bp, Homo sapiens
  misc_feature 1..452: note = ENST00000531060
  source 1..452: mol_type = unassigned DNA
ggacgaaaatcccagcaactgtctgagaactccttggactctttgcacaggatgtggagtcctcaggacaggaagtacaacagcccgcccacacagctttccctgaaacccaacagccagtccctgcgcagtgggaactggtcagaaaggaagagccaccggctgccacgattacccaagaggcacagccatgacgacatgctgctgctggctcagctgagtctgccgtcctcaccctccagcctcaatgaagacagcctcagcaccaccagcgagctgctgtccagccgccgggcccgccgcattcccaaggtaccctccccagaggcagcccactggagccgggcaggtgggcgggcaggcagccagcctttctctctctttcctggcttccttccttccctaatctggactgcttcctcgattccctttgaataaattctgggtccgtg

SEQ ID NO: 20590 - DNA, 592 bp, Homo sapiens
  misc_feature 1..592: note = ENST00000533425
  source 1..592: mol_type = unassigned DNA
agtgctctgctcacttggctgcgaggagcgccacgaaaggtcagaggaaggagctgtgggaagctcgcagcaggtatcggagcttaagccagtggatttgggggccctgggctccctagccggctgcggtgtgagaatggagtgggcaggaaagcagcgggactttcagggctctgggtttgcagagagccgaaatgaccatgactgccaacaagaattccagcatcacccacggagctggtggcactaaagcccctcgggggactctgagcagaaaatcctttgagtttgaggatgcatccagtctccagtccctgtacccctcttctcccactgagaatggtactgagaaccaacccaagtttggatccaaaagcactttagaagaaaatgcctatgaagatattgtgggagatctgcccaaggagaatccatatgaggatgtggacttaaagagccgaagagcaggacgaaaatcccagcaactgtctgagaactccttggactctttgcacaggatgtggagtcctcaggacaggaagtacaacagcccgcccacacagcctcaatgaagacagcctcagcaccacca

SEQ ID NO: 20591 - DNA, 600 bp, Homo sapiens
  misc_feature 1..600: note = ENST00000526057
  source 1..600: mol_type = unassigned DNA
agcccggggcgcggatgcctgcccgccgcccgccctctctgcaggagcggctcctcctccgggccgcgcggctcccggcgagaccccatccaggcgccgcgcccggcccggctggggaacgcagaggaagatgagagactgcttaggcgccaccactagtaccatgagtccctgcactggttaaagccatcgccacaacctggacaggcagcaagaaaatcctttgagtttgaggatgcatccagtctccagtccctgtacccctcttctcccactgagaatggtactgagaaccaacccaagtttggatccaaaagcactttagaagaaaatgcctatgaagatattgtgggagatctgcccaaggagaatccatatgaggatgtggacttaaagagccgaagagcaggacgaaaatcccagcaactgtctgagaactccttggactctttgcacaggatgtggagtcctcaggacaggaagtacaacagcccgcccacacagctttccctgaaacccaacagccagtccctgcgcagtgggaactggtcagaaaggaagagccaccggctgccacgattacccaagaggcacagccat

SEQ ID NO: 20592 - DNA, 595 bp, Homo sapiens
  misc_feature 1..595: note = ENST00000528196
  source 1..595: mol_type = unassigned DNA
ataaagacaggtagggctgaagggtggaggtagggtctccagctgcagttgtcaagaacccaacgtgaaggctgactgagcagagaaactgctgctgcccagaaagaaagcacttttagcagtgggctctgggtttgcagagagccgaaatgaccatgactgccaacaagaattccagcatcacccacggagctggtggcactaaagcccctcgggggactctgagcagaaaatcctttgagtttgaggatgcatccagtctccagtccctgtacccctcttctcccactgagaatggtactgagaaccaacccaagtttggatccaaaagcactttagaagaaaatgcctatgaagatattgtgggagatctgcccaaggagaatccatatgaggatgtggacttaaagagccgaagagcaggacgaaaatcccagcaactgtctgagaactccttggactctttgcacaggatgtggagtcctcaggacaggaagtacaacagcccgcccacacagctttccctgaaacccaacagccagtccctgcgcagtgggaactggtcagaaaggaagagccaccggctgccacgatt

SEQ ID NO: 20593 - DNA, 571 bp, Homo sapiens
  misc_feature 1..571: note = ENST00000527510
  source 1..571: mol_type = unassigned DNA
aaggtcagaggaaggagctgtgggaagctcgcagcaggtatcggagcttaagccagtggatttgggggccctgggctccctagccggctgcggtgtgagaatggagtgggcaggaaagcagcgggactttcagggctctgggtttgcagagagccgaaatgaccatgactgccaacaagaattccagcatcacccacggagctggtggcactaaagcccctcgggggactctgagcagaaaatcctttgagtttgaggatgcatccagtctccagtccctgtacccctcttctcccactgagaatggtactgagaaccaacccaagtttggatccaaaagcactttagaagaaaatgcctatgaagatattgtgggagatctgcccaaggagaatccatatgaggatgtggacttaaagagccgaagagcaggacgaaaatcccagcaactgtctgagaactccttggactctttgcacaggatgtggagtcctcaggacaggaagtacaacagcccgcccacacagccagtccctgcgcagtgggaactggtcagaaaggaagagccacc

SEQ ID NO: 20594 - DNA, 588 bp, Homo sapiens
  misc_feature 1..588: note = ENST00000530580
  source 1..588: mol_type = unassigned DNA
ttgactttcacttccccaggcctcagtgcctcttcccacagaggctgggttttctccttgttgctgcctgagcaggtgaccttgggatggttcccacagagcagtgtggctccaggcactgccctttgctgtctacttcagcacctgtggcttcagggctctgggtttgcagagagccgaaatgaccatgactgccaacaagaattccagcatcacccacggagctggtggcactaaagcccctcgggggactctgagcagaaaatcctttgagtttgaggatgcatccagtctccagtccctgtacccctcttctcccactgagaatggtactgagaaccaacccaagtttggatccaaaagcactttagaagaaaatgcctatgaagatattgtgggagatctgcccaaggagaatccatatgaggatgtggacttaaagagccgaagagcaggacgaaaatcccagcaactgtctgagaactccttggactctttgcacaggatgtggagtcctcaggacaggaagtacaacagcccgcccacacagctttccctgaaacccaacagccagtccctgcgcagtgg

SEQ ID NO: 20595 - DNA, 582 bp, Homo sapiens
  misc_feature 1..582: note = ENST00000532651
  source 1..582: mol_type = unassigned DNA
gtgtatgagaaaatgacataaagtttcagaccccgttgtgctttgctccagacccagacaactcttggtcggatggtgaggagatttcacaccctttggagagtttctttcttggataattcagggtcttgctgtgttgctcgggctgctcttgaactcctgggctcaaacagtcctcttgcctcagcctcccaacgtgctgggattacgggagcaagccaccccactgtgtgcagcccagaagttgagcctgagaggaagatgagagactgcttaggcgccaccactagtaccatgagtccctgcactggttaaagccatcgccacaacctggacaggcagcaagaaaatcctttgagtttgaggatgcatccagtctccagtccctgtacccctcttctcccactgagaatggtactgagaaccaacccaagtttggatccaaaagcactttagaagaaaatgcctatgaagatattgtgggagatctgcccaaggagaatccatatgaggatgtggacttaaagagccgaagagcaggacgaaaatcccagcaactgtctgagaactccttggactctt

SEQ ID NO: 20596 - DNA, 308 bp, Homo sapiens
  misc_feature 1..308: note = ENST00000527870
  source 1..308: mol_type = unassigned DNA
gctgcctttgtaaggagggcctatggtctttgctgttgccatggacattccccagcaaggcagcagagatctgattcagcaggaatgactcttgctcttgttatccacagaaaatcctttgagtttgaggatgcatccagtctccagtccctgtacccctcttctcccactgagaatggtactgagaaccaacccaagtttggatccaaaagcactttagaagaaaatgcctatgaagatattgtgggagatctgcccaaggagaatccatatgaggatgtggacttaaagagccgaagagcaggacg

SEQ ID NO: 20597 - DNA, 502 bp, Homo sapiens
  misc_feature 1..502: note = ENST00000531093
  source 1..502: mol_type = unassigned DNA
gggccatgagggctccaccctcatgaatggattaatgctgtcattgctagagtttgtttctgataaaaacaagtccggccccctcctgccctctctctcttttgtgtgtactgttgtgcccttctgcctttctgctatgggatgatgcaggaagaaggcccgcaccagattcagccatcaatcttaagacttccaagcctctggaaccgtaagaaataaatcctcacttcattagcataaattcagggctctgggtttgcagagagccgaaatgaccatgactgccaacaagaattccagcatcacccacggagctggtggcactaaagcccctcgggggactctgagcagaaaatcctttgagtttgaggatgcatccagtctccagtccctgtacccctcttctcccactgagaatggtactgagaaccaacccaagtttggatccaaaagcactttagaagaaaatgcctatgaagatattgtgggagatctgcccaag

SEQ ID NO: 20598 - DNA, 583 bp, Homo sapiens
  misc_feature 1..583: note = ENST00000533225
  source 1..583: mol_type = unassigned DNA
gtcacataatatccagtgcgtcctccctggcactccgattctcagtagtcatgaaccagctggcttctatatctctcaccaatcacaggtaatttaggtctccctcagggtcttgctgtgttgctcgggctgctcttgaactcctgggctcaaacagtcctcttgcctcagcctcccaacgtgctgggattacgggagcaagccaccccactgtgtgcagcccagaagttgagcctgagaggaagatgagagactgcttaggcgccaccactagtaccatgagtccctgcactggttaaagccatcgccacaacctggacaggcagcaagggctctgggtttgcagagagccgaaatgaccatgactgccaacaagaattccagcatcacccacggagctggtggcactaaagcccctcgggggactctgagcagaaaatcctttgagtttgaggatgcatccagtctccagtccctgtacccctcttctcccactgagaatggtactgagaaccaacccaagtttggatccaaaagcactttagaagaaaatgcctatgaagatattgtgggagatctgccc

SEQ ID NO: 20599 - DNA, 559 bp, Homo sapiens
  misc_feature 1..559: note = ENST00000526126
  source 1..559: mol_type = unassigned DNA
tcccggcgagaccccatccaggcgccgcgcccggcccggctggggaacgcagagatttcacaccctttggagagtttctttcttggataattcagggtcttgctgtgttgctcgggctgctcttgaactcctgggctcaaacagtcctcttgcctcagcctcccaacgtgctgggattacgggagcaagccaccccactgtgtgcagcccagaagttgagcctgagaggaagatgagagactgcttaggcgccaccactagtaccatgagtccctgcactggttaaagccatcgccacaacctggacaggcagcaagggctctgggtttgcagagagccgaaatgaccatgactgccaacaagaattccagcatcacccacggagctggtggcactaaagcccctcgggggactctgagcagaaaatcctttgagtttgaggatgcatccagtctccagtccctgtacccctcttctcccactgagaatggtactgagaaccaacccaagtttggatccaaaagcactttagaagaaaatgcctatgaagatattgtgg

SEQ ID NO: 20600 - DNA, 542 bp, Homo sapiens
  misc_feature 1..542: note = ENST00000526221
  source 1..542: mol_type = unassigned DNA
atagctggcaagaaaccccgtgggaacaaagaagggctctgggtttgcagagagccgaaatgaccatgactgccaacaagaattccagcatcacccacggagctggtggcactaaagcccctcgggggactctgagcaggtctcagtcagtctctccacctccagttctctccccaccaaggagtcccatctacccgctcagtgatagtgaaacctcagcctgcagggcctccggaggatgagcaggaccttctccgagtgttcctacccagagactgaggaggagggagaggcgctccctgtccgggactctttctaccggctggagaaacggctgggccggagtgagcccagcgccttcctcagggggcatggcagcaggaaggagagctcagcagtgctgagccggatccagaaaattgaacaggtcctgaaggagcagccgggccgggggctcccccagctccccagcagctgctacagcgtggaccgggggaaaaggaagactggaaccttgggctccttggaggagccggcagggg

SEQ ID NO: 20601 - DNA, 535 bp, Homo sapiens
  misc_feature 1..535: note = ENST00000529940
  source 1..535: mol_type = unassigned DNA
gtagtcatgaaccagctggcttctatatctctcaccaatcacaggaagatgagagactgcttaggcgccaccactagtaccatgagtccctgcactggttaaagccatcgccacaacctggacaggcagcaaggtctcagtcagtctctccacctccagttctctccccaccaaggagtcccatctacccgctcagtgatagtgaaacctcagcctgcaggtaccccagccactccagctcccgggtgctcctcaaggaccggcaccccccagctccttcaccccagaatcctcaagatccctccccagatacttccccacccacctgtcccttcaagaccgccagcttcggttatttggacagaagcccttcggcgtgcaagagagacgcccaaaaggaaagtgtccaaggcgcagcccaggatgtagcaggggtcgctgcctgcctcccccttgcccagagcacgccattcccggggccagcagctggcccccggggcgtcttgctgacccgtaccggtacccgcgcccacag

SEQ ID NO: 20602 - DNA, 560 bp, Homo sapiens
  misc_feature 1..560: note = ENST00000528523
  source 1..560: mol_type = unassigned DNA
agtgctctgctcacttggctgcgaggagcgccacgaaaggtcagaggaaggagctgtgggaagctcgcagcagggctctgggtttgcagagagccgaaatgaccatgactgccaacaagaattccagcatcacccacggagctggtggcactaaagcccctcgggggactctgagcaggtctcagtcagtctctccacctccagttctctccccaccaaggagtcccatctacccgctcagtgatagtgaaacctcagcctgcaggtaccccagccactccagctcccgggtgctcctcaaggaccggcaccccccagctccttcaccccagaatcctcaagatccctccccagatacttccccacccacctgtcccttcaagaccgccagcttcggttatttggacagaagcccttcggcgtgcaagagagacgcccaaaaggaaagtgtccaaggcgcagcccaggatgtagcaggggtcgctgcctgcctcccccttgcccagagcacgccattcccggggccagcagctggcccccggggcgtcttgctgacccgt

SEQ ID NO: 20603 - DNA, 560 bp, Homo sapiens
  misc_feature 1..560: note = ENST00000527930
  source 1..560: mol_type = unassigned DNA
aacagaggattatgacttcaaggaagaatggaggtggggcgcatagctggcaagaaaccccgtgggaacaaagaagggctctgggtttgcagagagccgaaatgaccatgactgccaacaagaattccagcatcacccacggagctggtggcactaaagcccctcgggggactctgagcaggtctcagtcagtctctccacctccagttctctccccaccaaggagtcccatctacccgctcagtgatagtgaaacctcagcctgcaggtaccccagccactccagctcccgggtgctcctcaaggaccggcaccccccagctccttcaccccagaatcctcaagatccctccccagatacttccccacccacctgtcccttcaagaccgccagcttcggttatttggacagaagcccttcggcgtgcaagagagacgcccaaaaggaaagtgtccaaggcgcagcccaggatgtagcaggggtcgctgcctgcctcccccttgcccagagcacgccattcccggggccagcagctggcccccggggcgtcttgctgacc

SEQ ID NO: 20604 - DNA, 599 bp, Homo sapiens
  misc_feature 1..599: note = ENST00000534783
  source 1..599: mol_type = unassigned DNA
gctgtgcgcgcgcccgcctagcgaggacagggtctccatgacaaccggcctggccggctagcagtgctctgctcacttggctgcgaggagcgccacgaaaggtcagaggaaggagctgtgggaagctcgcagcaggtatcggagcttaagccagtggatttgggggccctgggctccctagccggctgcggtgtgagaatggagtgggcaggaaagcagcgggactttcaggtctcagtcagtctctccacctccagttctctccccaccaaggagtcccatctacccgctcagtgatagtgaaacctcagcctgcaggtaccccagccactccagctcccgggtgctcctcaaggaccggcaccccccagctccttcaccccagaatcctcaagatccctccccagatacttccccacccacctgtcccttcaagaccgccagcttcggttatttggacagaagcccttcggcgtgcaagagagacgcccaaaaggaaagtgtccaaggcgcagcccaggatgtagcaggggtcgctgcctgcctcccccttgcccagagcacgccattcccggggccagcagctggcccccggggcg

SEQ ID NO: 20605 - DNA, 638 bp, Homo sapiens
  misc_feature 1..638: note = ENST00000533681
  source 1..638: mol_type = unassigned DNA
gattactgtgctttgggattaaagtgtcctgccgtttctggaagagactgctagtcataaagacaggtagggctgaagggtggaggtagggtctccagctgcagttgtcaagaacccaacgtgaaggctgactgagcagagaaactgctgctgcccagaaagaaagcacttttagcagtgggctctgggtttgcagagagccgaaatgaccatgactgccaacaagaattccagcatcacccacggagctggtggcactaaagcccctcgggggactctgagcaggtctcagtcagtctctccacctccagttctctccccaccaaggagtcccatctacccgctcagtgatagtgaaacctcagcctgcaggtaccccagccactccagctcccgggtgctcctcaaggaccggcaccccccagctccttcaccccagaatcctcaagatccctccccagatacttccccacccacctgtcccttcaagaccgccagcttcggttatttggacagaagcccttcggcgtgcaagagagacgcccaaaaggaaagtgtccaaggcgcagcccaggatgtagcaggggtcgctgcctgcctcccccttgcccagagcacgccattcccggggccagcag

SEQ ID NO: 20606 - DNA, 523 bp, Homo sapiens
  misc_feature 1..523: note = ENST00000526241
  source 1..523: mol_type = unassigned DNA
gccgcgcccggcccggctggggaacgcagagatttcacaccctttggagagtttctttcttggataattcagggctctgggtttgcagagagccgaaatgaccatgactgccaacaagaattccagcatcacccacggagctggtggcactaaagcccctcgggggactctgagcaggtctcagtcagtctctccacctccagttctctccccaccaaggagtcccatctacccgctcagtgatagtgaaacctcagcctgcaggtaccccagccactccagctcccgggtgctcctcaaggaccggcaccccccagctccttcaccccagaatcctcaagatccctccccagatacttccccacccacctgtcccttcaagaccgccagcttcggttatttggacagaagcccttcggcgtgcaagagagacgcccaaaaggaaagtgtccaaggcgcagcccaggatgtagcaggggtcgctgcctgcctcccccttgcccagagcacgccattcccgggg

SEQ ID NO: 20607 - DNA, 751 bp, Homo sapiens
  misc_feature 1..751: note = ENST00000530959
  source 1..751: mol_type = unassigned DNA
acataatatccagtgcgtcctccctggcactccgattctcagtagtcatgaaccagctggcttctatatctctcaccaatcacagggtcttgctgtgttgctcgggctgctcttgaactcctgggctcaaacagtcctcttgcctcagcctcccaacgtgctgggattacgggagcaagccaccccactgtgtgcagcccagaagttgagcctgagaggaagatgagagactgcttaggcgccaccactagtaccatgagtccctgcactggttaaagccatcgccacaacctggacaggcagcaagggctctgggtttgcagagagccgaaatgaccatgactgccaacaagaattccagcatcacccacggagctggtggcactaaagcccctcgggggactctgagcaggtctcagtcagtctctccacctccagttctctccccaccaaggagtcccatctacccgctcagtgatagtgaaacctcagcctgcaggtaccccagccactccagctcccgggtgctcctcaaggaccggcaccccccagctccttcaccccagaatcctcaagatccctccccagatacttccccacccacctgtcccttcaagaccgccagcttcggttatttggacagaagcccttcggcgtgcaagagagacgcccaaaaggaaagtgtccaaggcgcagcccaggatgtagcaggggtcgctgcctgcctcccccttgcccagagcacgccatt

SEQ ID NO: 20608 - DNA, 547 bp, Homo sapiens
  misc_feature 1..547: note = ENST00000533580
  source 1..547: mol_type = unassigned DNA
agttgtcagaggcagggctggactcaaggcaggtgtttttccactgcccctcggggcctgcgactgtgcctgtttgtctggatgcagtttgtagaaaagttccagagggctctgggtttgcagagagccgaaatgaccatgactgccaacaagaattccagcatcacccacggagctggtggcactaaagcccctcgggggactctgagcaggtctcagtcagtctctccacctccagttctctccccaccaaggagtcccatctacccgctcagtgatagtgaaacctcagcctgcaggtaccccagccactccagctcccgggtgctcctcaaggaccggcaccccccagctccttcaccccagaatcctcaagatccctccccagatacttccccacccacctgtcccttcaagaccgccagcttcggttatttggacagaagcccttcggcgtgcaagagagacgcccaaaaggaaagtgtccaaggcgcagcccaggatgtagcaggggtcgctgcctgcctcccccttgcccagagcacgc

SEQ ID NO: 20609 - DNA, 887 bp, Homo sapiens
  misc_feature 1..887: note = ENST00000526155
  source 1..887: mol_type = unassigned DNA
cttggtcggatggtgaggaggtgagggccgtccagtttgggggccaacttctcctccctgctgcccccggcccccgcctccctcacccctgtcccccaccctccctcgcacactctcggcgcggctttctcgctgcctccggcgcctccgagcgctcccctccgccgggctccagcagcccaccctctctgtcttgggtggaggcgcacatcctccacgccccctccactcaaatctgcgctccctcccctctctctccctgcagcccggccgcagcccggggcgcggatgcctgcccgccgcccgccctctctgcaggagcggctcctcctccgggccgcgcggctcccggcgagaccccatccaggcgccgcgcccggcccggctggggaacgcagaggaagatgagagactgcttaggcgccaccactagtaccatgagtccctgcactggttaaagccatcgccacaacctggacaggcagcaagggctctgggtttgcagagagccgaaatgaccatgactgccaacaagaattccagcatcacccacggagctggtggcactaaagcccctcgggggactctgagcaggtctcagtcagtctctccacctccagttctctccccaccaaggagtcccatctacccgctcagtgatagtgaaacctcagcctgcaggtaccccagccactccagctcccgggtgctcctcaaggaccggcaccccccagctccttcaccccagaatcctcaagatccctccccagatacttccccacccacctgtcccttcaagaccgccagcttcggttatttggacagaagcccttcggcgtgcaagagagacgcccaaaaggaaagtgtccaaggcgcagcccaggatg

SEQ ID NO: 20610 - DNA, 564 bp, Homo sapiens
  misc_feature 1..564: note = ENST00000534248
  source 1..564: mol_type = unassigned DNA
taatatccagtgcgtcctccctggcactccgattctcagtagtcatgaaccagctggcttctatatctctcaccaatcacaggaagatgagagactgcttaggcgccaccactagtaccatgagtccctgcactggttaaagccatcgccacaacctggacaggcagcaagggctctgggtttgcagagagccgaaatgaccatgactgccaacaagaattccagcatcacccacggagctggtggcactaaagcccctcgggggactctgagcaggtctcagtcagtctctccacctccagttctctccccaccaaggagtcccatctacccgctcagtgatagtgaaacctcagcctgcaggtaccccagccactccagctcccgggtgctcctcaaggaccggcaccccccagctccttcaccccagaatcctcaagatccctccccagatacttccccacccacctgtcccttcaagaccgccagcttcggttatttggacagaagcccttcggcgtgcaagagagacgcccaaaaggaaagtgtccaaggcgcagccca

SEQ ID NO: 20611 - DNA, 573 bp, Homo sapiens
  misc_feature 1..573: note = ENST00000527347
  source 1..573: mol_type = unassigned DNA
gtgcgcgcccggtcccgcccctgccctcccagcccttttccctctgctcccgactcccggccccggcagcggtgtccagctccatttcacaccctttggagagtttctttcttggataattcaggaagatgagagactgcttaggcgccaccactagtaccatgagtccctgcactggttaaagccatcgccacaacctggacaggcagcaagggctctgggtttgcagagagccgaaatgaccatgactgccaacaagaattccagcatcacccacggagctggtggcactaaagcccctcgggggactctgagcaggtctcagtcagtctctccacctccagttctctccccaccaaggagtcccatctacccgctcagtgatagtgaaacctcagcctgcaggtaccccagccactccagctcccgggtgctcctcaaggaccggcaccccccagctccttcaccccagaatcctcaagatccctccccagatacttccccacccacctgtcccttcaagaccgccagcttcggttatttggacagaagcccttcggcgtgcaagagaga

SEQ ID NO: 20612 - DNA, 822 bp, Homo sapiens
  misc_feature 1..822: note = ENST00000533016
  source 1..822: mol_type = unassigned DNA
tattctaagccactaggccgtggtggcttctttgaaaggttgaagtcttgaaaggtaagaagaccccatctagctgggtttcatgtgctgccctcaccttacccctacaagtggcacagcaagctgcctgcgatgtctggtggttgactctgctgcctgcatggttcaggtgagcagagcagttcatgttgaagcccctcccaccggtcaggagcctgtaggactgtgttgttttccttcctgtgtcctcagtgactgggctagtgtcttgcacaaggcaggtgcttggtcattgtttgtggattgaatggcttctcagcctgagcttcaggggaccttggcctgggccttggagcatactaggagttggataagcagagaggaagaaggagagcactccaggctgccagtgatttgagcccagaaacatggggcagaaatggacacgtggacatgtttggagcagaaggtgtcctgcctggagagagggctctgggtttgcagagagccgaaatgaccatgactgccaacaagaattccagcatcacccacggagctggtggcactaaagcccctcgggggactctgagcaggtctcagtcagtctctccacctccagttctctccccaccaaggagtcccatctacccgctcagtgatagtgaaacctcagcctgcaggtaccccagccactccagctcccgggtgctcctcaaggaccggcaccccccagctccttcaccccagaatcctcaagatccctccccagatacttccccacccacctgtcccttcaagaccgccagcttcggttatttggac

SEQ ID NO: 20613 - DNA, 631 bp, Homo sapiens
  misc_feature 1..631: note = ENST00000527516
  source 1..631: mol_type = unassigned DNA
agaccccgttgtgctttgctccagacccagacaactcttggtcggatggtgaggagcccggccgcagcccggggcgcggatgcctgcccgccgcccgccctctctgcaggagcggctcctcctccgggccgcgcggctcccggcgagaccccatccaggcgccgcgcccggcccggctggggaacgcagagatttcacaccctttggagagtttctttcttggataattcaggaagatgagagactgcttaggcgccaccactagtaccatgagtccctgcactggttaaagccatcgccacaacctggacaggcagcaagggctctgggtttgcagagagccgaaatgaccatgactgccaacaagaattccagcatcacccacggagctggtggcactaaagcccctcgggggactctgagcaggtctcagtcagtctctccacctccagttctctccccaccaaggagtcccatctacccgctcagtgatagtgaaacctcagcctgcaggtaccccagccactccagctcccgggtgctcctcaaggaccggcaccccccagctccttcaccccagaatcctcaagatccctccccagatacttccccacccacctgtcccttcaag

SEQ ID NO: 20614 - DNA, 514 bp, Homo sapiens
  misc_feature 1..514: note = ENST00000527473
  source 1..514: mol_type = unassigned DNA
aaacttagggggtctgccgtgtcccagggactgtgctcattttctgacaggagcaatattattaccgactgtgacagcagctcccactaagcctgcaccttagctgcagatccttagcagggcagagagacaaggctgtatttgtatcaggaagatgagagactgcttaggcgccaccactagtaccatgagtccctgcactggttaaagccatcgccacaacctggacaggcagcaagggctctgggtttgcagagagccgaaatgaccatgactgccaacaagaattccagcatcacccacggagctggtggcactaaagcccctcgggggactctgagcaggtctcagtcagtctctccacctccagttctctccccaccaaggagtcccatctacccgctcagtgatagtgaaacctcagcctgcaggtaccccagccactccagctcccgggtgctcctcaaggaccggcaccccccagctccttcaccccagaatcctcaagatccct

SEQ ID NO: 20615 - DNA, 534 bp, Homo sapiens
  misc_feature 1..534: note = ENST00000530938
  source 1..534: mol_type = unassigned DNA
gatgcctgcccgccgcccgccctctctgcaggagcggctcctcctccgggccgcgcggctcccggcgagaccccatccaggcgccgcgcccggcccggctggggaacgcagagatttcacaccctttggagagtttctttcttggataattcagggtcttgctgtgttgctcgggctgctcttgaactcctgggctcaaacagtcctcttgcctcagcctcccaacgtgctgggattacgggagcaagccaccccactgtgtgcagcccagaagttgagcctgagagggctctgggtttgcagagagccgaaatgaccatgactgccaacaagaattccagcatcacccacggagctggtggcactaaagcccctcgggggactctgagcaggtctcagtcagtctctccacctccagttctctccccaccaaggagtcccatctacccgctcagtgatagtgaaacctcagcctgcaggtaccccagccactccagctcccgggtgctcctcaaggaccggcaccccccagct

SEQ ID NO: 20616 - DNA, 556 bp, Homo sapiens
  misc_feature 1..556: note = ENST00000533471
  source 1..556: mol_type = unassigned DNA
gtgtgtatgagaaaatgacataaagtttcagaccccgttgtgctttgctccagacccagacaactcttggtcggatggtgaggagcccggccgcagcccggggcgcggatgcctgcccgccgcccgccctctctgcaggagcggctcctcctccgggccgcgcggctcccggcgagaccccatccaggcgccgcgcccggcccggctggggaacgcagaggaagatgagagactgcttaggcgccaccactagtaccatgagtccctgcactggttaaagccatcgccacaacctggacaggcagcaagggctctgggtttgcagagagccgaaatgaccatgactgccaacaagaattccagcatcacccacggagctggtggcactaaagcccctcgggggactctgagcaggtctcagtcagtctctccacctccagttctctccccaccaaggagtcccatctacccgctcagtgatagtgaaacctcagcctgcaggtaccccagccactccagctcccgggtgctcctcaaggaccggcaccccccagct

SEQ ID NO: 20617 - DNA, 590 bp, Homo sapiens
  misc_feature 1..590: note = ENST00000524757
  source 1..590: mol_type = unassigned DNA
agacccagacaactcttggtcggatggtgaggagcccggccgcagcccggggcgcggatgcctgcccgccgcccgccctctctgcaggagcggctcctcctccgggccgcgcggctcccggcgagaccccatccaggcgccgcgcccggcccggctggggaacgcagagggatggtgacagaatggatagtatagaaaatggattggaattgaggaggaaactagaagctaagaggagttaggaggcccttgtaacaatccagatttcacaccctttggagagtttctttcttggataattcaggaagatgagagactgcttaggcgccaccactagtaccatgagtccctgcactggttaaagccatcgccacaacctggacaggcagcaagggctctgggtttgcagagagccgaaatgaccatgactgccaacaagaattccagcatcacccacggagctggtggcactaaagcccctcgggggactctgagcaggtctcagtcagtctctccacctccagttctctccccaccaaggagtcccatctacccgctcagtgatagtgaaacctcagcctgcaggtacc

SEQ ID NO: 20618 - DNA, 576 bp, Homo sapiens
  misc_feature 1..576: note = ENST00000527392
  source 1..576: mol_type = unassigned DNA
agacccagacaactcttggtcggatggtgaggagcccggccgcagcccggggcgcggatgcctgcccgccgcccgccctctctgcaggagcggctcctcctccgggccgcgcggctcccggcgagaccccatccaggcgccgcgcccggcccggctggggaacgcagagggtcttgctgtgttgctcgggctgctcttgaactcctgggctcaaacagtcctcttgcctcagcctcccaacgtgctgggattacgggagcaagccaccccactgtgtgcagcccagaagttgagcctgagaggaagatgagagactgcttaggcgccaccactagtaccatgagtccctgcactggttaaagccatcgccacaacctggacaggcagcaagggctctgggtttgcagagagccgaaatgaccatgactgccaacaagaattccagcatcacccacggagctggtggcactaaagcccctcgggggactctgagcaggtctcagtcagtctctccacctccagttctctccccaccaaggagtcccatctacccgctcagtgatagtgaaacctcag

SEQ ID NO: 20619 - DNA, 550 bp, Homo sapiens
  misc_feature 1..550: note = ENST00000526828
  source 1..550: mol_type = unassigned DNA
gttgacactctgaatggtttgtgaaggcatcctctggcccctgaaggcattaccatccttaccaggtttaaaatctttcagagtgcacccagcatcatcagctcctgcaagcagaaagggcccaagggagcatgaacacacactggggtcttgctgtgttgctcgggctgctcttgaactcctgggctcaaacagtcctcttgcctcagcctcccaacgtgctgggattacgggagcaagccaccccactgtgtgcagcccagaagttgagcctgagaggaagatgagagactgcttaggcgccaccactagtaccatgagtccctgcactggttaaagccatcgccacaacctggacaggcagcaagggctctgggtttgcagagagccgaaatgaccatgactgccaacaagaattccagcatcacccacggagctggtggcactaaagcccctcgggggactctgagcaggtctcagtcagtctctccacctccagttctctccccaccaaggagtcccatctacccgctcagtgatagtgaaacct

SEQ ID NO: 20620 - DNA, 580 bp, Homo sapiens
  misc_feature 1..580: note = ENST00000525169
  source 1..580: mol_type = unassigned DNA
tccagacccagacaactcttggtcggatggtgaggagcccggccgcagcccggggcgcggatgcctgcccgccgcccgccctctctgcaggagcggctcctcctccgggccgcgcggctcccggcgagaccccatccaggcgccgcgcccggcccggctggggaacgcagagatttcacaccctttggagagtttctttcttggataattcagggtcttgctgtgttgctcgggctgctcttgaactcctgggctcaaacagtcctcttgcctcagcctcccaacgtgctgggattacgggagcaagccaccccactgtgtgcagcccagaagttgagcctgagaggaagatgagagactgcttaggcgccaccactagtaccatgagtccctgcactggttaaagccatcgccacaacctggacaggcagcaagggctctgggtttgcagagagccgaaatgaccatgactgccaacaagaattccagcatcacccacggagctggtggcactaaagcccctcgggggactctgagcaggtctcagtcagtctctccacctccagttctctccccacca

SEQ ID NO: 20621 - DNA, 659 bp, Homo sapiens
  misc_feature 1..659: note = ENST00000534665
  source 1..659: mol_type = unassigned DNA
agacccagacaactcttggtcggatggtgaggaggtgagggccgtccagtttgggggccaacttctcctccctgctgcccccggcccccgcctccctcacccctgtcccccaccctccctcgcacactctcggcgcggctttctcgctgcctccggcgcctccgagcgctcccctccgccgggctccagcagcccaccctctctgtcttgggtggaggcgcacatcctccacgccccctccactcaaatctgcgctccctcccctctctctccctgcagcccggccgcagcccggggcgcggatgcctgcccgccgcccgccctctctgcaggagcggctcctcctccgggccgcgcggctcccggcgagaccccatccaggcgccgcgcccggcccggctggggaacgcagagatttcacaccctttggagagtttctttcttggataattcaggaagatgagagactgcttaggcgccaccactagtaccatgagtccctgcactggttaaagccatcgccacaacctggacaggcagcaagggctctgggtttgcagagagccgaaatgaccatgactgccaacaagaattccagcatcacccacggagctggtggcactaaagcccctcgggggactctgagcaggtctcagtca

SEQ ID NO: 20622 - DNA, 299 bp, Homo sapiens
  misc_feature 1..299: note = ENST00000531578
  source 1..299: mol_type = unassigned DNA
acataatatccagtgcgtcctccctggcactccgattctcagtagtcatgaaccagctggcttctatatctctcaccaatcacaggtaatttaggtctccctcaggaagatgagagactgcttaggcgccaccactagtaccatgagtccctgcactggttaaagccatcgccacaacctggacaggcagcaagggctctgggtttgcagagagccgaaatgaccatgactgccaacaagaattccagcatcacccacggagctggtggcactaaagcccctcgggggactctgagcag

SEQ ID NO: 20623 - DNA, 3674 bp, Homo sapiens
  misc_feature 1..3674: note = ENST00000531237
  source 1..3674: mol_type = unassigned DNA
atggggatgggactaaacttagggggtctgccgtgtcccagggactgtgctcattttctgacaggagcaatattattaccgactgtgacagcagctcccactaagcctgcaccttagctgcagatccttagcagggcagagagacaaggctgtatttgtatcaggaagatgagagactgcttaggcgccaccactagtaccatgagtccctgcactggttaaagccatcgccacaacctggacaggcagcaaggtaagcagagaggccagtccaggcgagctcctgggatgtgagtgcatttccgccccaactgctgcccggaaaaatcccaagtgcacaaacaagtcaaggcagcgcatcagggtccctcctacccgagctccaggacccagaggaagctgggtccccttcaagcgcttcagctagctccctcccccctggcagggattcttccaagttataaaaaatgagacactggaggggaagaaaacaagtccactcactgtcttctcccttctcccctctgagctgttcaagcaagttcccaggagcagttcagagcccctgttggactggaagggaggtaggaggagtggaatgcatgcaaaaaccgagctgatcaaaagacagtgctgtttcatggaagcctcccagaactgagagagagagagagagagagagagagagagagacagtgagaaagaaagaaaaagagagcgcccttgtgcacgcgctaggccaagagcgcgccgctgtgcgcgcgcccgcctagcgaggacagggtctccatgacaaccggcctggccggctagcagtgctctgctcacttggctgcgaggagcgccacgaaaggtcagaggaaggagctgtgggaagctcgcagcaggtatcggagcttaagccagtggatttgggggccctgggctccctagccggctgcggtgtgagaatggagtgggcaggaaagcagcgggactttcaggtaagggcagctccgggctgggatcatttggcctcctttcctggcccttctctccggctgttttctgggagtcaggcgagtgtctgtagtctctgctcggggtttggggctcaggaatgatgtcatgctccaacagttggattctattagcttaaggaggagggaaacagccaattttcttgactttgcaaatctagctgatctcactcttgctgaatctgaggtgtttagacttcactctaaaaagcatcattttacttttatttagcacaaaggcacaggatatttttacaggaagaatcttttatatggaaaaatctgagttaacatcactcccgtggtgtttgtagttcttacagggaaactccagtgccttttgagccgcttgttcgtcctagtgaacactgtctgttttgtctcttggtgctgctatgtctgacctgtaatggaaaaaaaaaaaaaaaaaaggctaattaagctcagccaggagcctgtggtgagttccaagtccctctagagcatttattaggacagagggactgtcacagggatgcctgagctggggttttgcactctctctcttccaggcagcttggtaagaatcaagctgtcctcccacatcaaaaggtcgatcacagactttcctaagaggtggaggagggggctggcttggggttggggggcctgcaaacaggtttctcatccagatgtcccagagtgagctctcagcagcagctgctaagagctggggaacatgaggcactgtagttgtgccgggtggattcctttggttacattttgaccaaatctcagggcacgcagtgtccacgctgtgcactcctacactgattgtcctaagttttggtaaaacttgttctgacctagaggagtggtacatggtgagctgtgtggccttggaaaggagaccctcccagaaaggcagttttataggtgatagggtagtggggttgtcagtaatattatgaggaggatgaatgcagcaaacacttcctgcaacggagacccatcaggggttgtgcttccacttgagccatgttatgtcttaaattcacttcttggcctcagggaactttgcaaatgcctttggtttctctgtgggatgagggaacagctgctgtcctggttcttcagtttttcttcttgaactttctgaacagaatgtcttttgtattctggcaaacaatgagggggcattctgattaacttcggatcagcttgccaatgcaagcactggccatgtccccagttccggctccctaaaatgagtacatgtatacatcgtggttgtggcctgagggtccacaagggtgaactccatggccctggacctcagacggtccacttctgaagttattcctcttgctacatacactccagggatcctttgcttagttgaaacctacattttgctggagggatgtggcataacactgagccagtggccccttcagttggcagtgtaaatccagaacctcagccttcttttctacttgtgtgtgtagttggagctcttcaattttaccatccccacatctgtgaagagggctagcagagacccagtttcaggagctgctgctccttctgttggtatagcagaaagaataatggatttgggttgctagacttgagtcgacggctagattctgttcccatagggcggccacgggcaagtatcttaactaataggagcttcagattcttacctgtgagatggaggtaataagaacaacttcacaggactgttgggaggagccagtgggataacttccatgaaagtagtttgaaacaagtcacgtcctatctaacgaaccgtgttgtgaattgaagcttgaggaatgacccaactctctctggaaagtcactttgcctctctgttctggttctctcattttataaagtgccttcttcctttctgcatttataagtaaacatgagaaaaatctgaaaagacttcttcaggatgtttaaggaaacaaatgttgctttccttgggttgggtcgtttcataagagtgatgtttgccataaaactggagcctcatagacgatcctgcagggaggaagctttccttggtcacctgactcatgtgtttatatatagtatagaggagaggtattccaaaagacccgtcgcttttcctgtgtcccacagctgcctgtagagttgtggcaccataaactttagcagctggaaaagaggccaggcctggttccctcatcctgctgggtcctgctgggcacactctgcagtgggcaaaggggtctttctccttcattctgggtttagaaggcagggttctaactgggagaaagtgttattgctccgaaaggcttcttgggggctgggcaggtctttcaggaactcataaggccacagcttatggggaaagaaaaagaaacaaggaagtgggaattccaagggcagagattcttgatatgccatgggactgtgccaaggaatggaagagcaggggaagggagactccaggcaaggagagtcccaggtctgtcctcattgagtcgaaagggcgtatggcatactagagcgcgtcacccacagccccagctttactgtaggatggggaagacctgccagccatatcccggagtggtgtctgggaagaagcccttgagcagacccatagtaggcagattaaaaaaatgaaacaaa

SEQ ID NO: 20624 - DNA, 536 bp, Homo sapiens
  misc_feature 1..536: note = ENST00000531640
  source 1..536: mol_type = unassigned DNA
gatgcttaggaaggtccactttgagggacacgctcagtgggggtcactttaaggaacacaaataaatcctcctttaagtctcctctgtggttcatgaaaaaggagagaaactccatcctcacctagtctcaacagatggcttgatgagcaattatcaggtaccagcccctggaagccaccaatctgtcttctgtctctattattttgactactcctttcacagaaaaccactggaggagatactcacaaaaatgaaggggaagaacaggaaacaggaagacatgagatgaaggaaacaggagattcaacatggatttcacaccctttggagagtttctttcttggataattcagggtcttgctgtgttgctcgggctgctcttgaactcctgggctcaaacagtcctcttgcctcagcctcccaacgtgctgggattacgggagcaagccaccccactgtgtgcagcccagaagttgagcctgagagatgagagactgcttaggcgccaccactagtaccatgagtccctgcactg

SEQ ID NO: 20625 - DNA, 333 bp, Homo sapiens
  misc_feature 1..333: note = ENST00000528452
  source 1..333: mol_type = unassigned DNA
agttccactgagaccagccatggaagggtcttgctgtgttgctcgggctgctcttgaactcctgggctcaaacagtcctcttgcctcagcctcccaacgtgctgggattacgggagcaagccaccccactgtgtgcagcccagaagttgagcctgagaggcactgtgagcagctgttgctatcacacgggcggatcagaacatgaagaatggagctaaatagagctgtctgcatgctgttctgatgggctcaggctcagcctcagagaataggtggattggagcctgtgatgggggctctttcccccaccagagtgggtgaaagcagggagga

SEQ ID NO: 20626 - DNA, 1071 bp, Homo sapiens
  misc_feature 1..1071: note = ENST00000626808
  source 1..1071: mol_type = unassigned DNA
atgacttcaaggaagaatggaggtggggcgcatagctggcaagaaaccccgtgggaacaaagaagggctctgggtttgcagagagccgaaatgaccatgactgccaacaagaattccagcatcacccacggagctggtggcactaaagcccctcgggggactctgagcagaaaatcctttgagtttgaggatgcatccagtctccagtccctgtacccctcttctcccactgagaatggtactgagaaccaacccaagtttggatccaaaagcactttagaagaaaatgcctatgaagatattgtgggagatctgcccaaggagaatccatatgaggatgtggacttaaagagccgaagagcaggacgaaaatcccagcaactgtctgagaactccttggactctttgcacaggatgtggagtcctcaggacaggaagtacaacagcccgcccacacagctttccctgaaacccaacagccagtccctgcgcagtgggaactggtcagaaaggaagagccaccggctgccacgattacccaagaggcacagccatgacgacatgctgctgctggctcagctgagtctgccgtcctcaccctccagcctcaatgaagacagcctcagcaccaccagcgagctgctgtccagccgccgggcccgccgcattcccaagcttgtccaaagaattaactccatctacaatgccaagagaggaaagaagagattaaaaaagttgtctatgtccagcattgaaacagcatcactgagagatgaaaacagtgagagcgagagcgactctgatgacaggttcaaagcccacacacagcgcctggtccacatccagtcgatgctgaagcgcgcccccagctatcgcacgctggagctggagctgctggagtggcaggagcgggagctttttgagtactttgtggtggtgtccctcaagaagaagccatcgcgaaacacctacctccccgaagtctcctaccagtttcccaaggaatgtgctttctccagctcttcacgtggctgctggctccttctcatttctcaggctctgctcaagtag

SEQ ID NO: 20627 - DNA, 6857 bp, Homo sapiens
  misc_feature 1..6857: note = ENST00000361686
  source 1..6857: mol_type = unassigned DNA
ttccgccggggcaggcgccgggactccctcctggccgcccacagcctgtgcgcattcctgcattcctgccgccgcccgggacccgagtgccccggaggtgtccaggcgcggtgccaggcgggtactgtgcaggttcattctgccacccatctgcattaagacacaaggtgctgaccgcagagacctgccatgaaaccacacttgaagcaatggagacaacgaatgcttttcggaatattcgcttgggggctcctctttttgctgattttcatctacttcaccgacagcaaccccgctgagcctgtacccagctccctctccttcctggagaccaggaggctcctgccggtgcaggggaagcagcgggccatcatgggcgccgcacatgagccctccccgcctgggggcctggacgcacgccaggcgctgccccgcgcccacccagccggttcctttcatgcggggcctggagacctgcagaaatgggcccagtcccaagatgggtttgaacataaagagtttttttcatcccaggtggggagaaaatctcaaagtgctttctacccggaggatgacgactacttttttgctgctggtcagccagggtggcacagccacactcaggggacattgggattcccttcccccggggagccaggcccacgggagggggcttttccggctgcacaggtccagaggaggcgggtgaagaagaggcaccggaggcagagaaggagccacgtgttggaggagggcgacgacggcgacaggctgtactcctccatgtccagggccttcctgtaccggctctggaaggggaacgtctcttccaaaatgctgaacccgcgcctgcagaaggcgatgaaggattacctgaccgccaacaagcacggggtgcgcttccgcgggaagcgggaggccgggctgagcagggcacagctgctgtgccagctgcggagccgcgcgcgcgtgcggacgctggacggcaccgaggcgcccttttctgcgctgggctggcggcgcctggtgcccgccgtgcccctgagccagctgcacccccgcggcctgcgcagctgcgctgtcgtcatgtctgcaggcgcaatcctcaactcttccttgggcgaggaaatagattctcatgatgcggttttgagatttaactctgctcctacacgtggttatgagaaagatgttgggaataaaaccaccatacgcatcattaattcgcagattctgaccaaccccagccatcacttcattgacagttcactgtataaagacgtcattttggtggcctgggaccctgccccatattccgcaaatcttaacctgtggtacaaaaaaccggattacaacctgttcactccatatattcagcatcgtcagagaaacccaaatcagccattttacattcttcatcctaaatttatatggcagctctgggatattatccaggagaacactaaagagaagattcaaccaaacccaccatcttctggtttcattggaatcctcataatgatgtccatgtgcagagaggtgcacgtgtatgaatatatcccatccgtgcggcagacggagctgtgccactaccacgagctgtactacgacgcagcctgcaccctcggggcgtaccacccactactctatgagaagctcctggtgcagcgcctgaacatgggcacgcagggggatttgcatcgcaagggcaaggtggttcttcccggcttccaggcggtgcactgccctgcaccaagtccagtcattccacactcttaaaaagggtttcttgggaatcaatgtgcaataaggtactactgttgtactcaaagtcacaaaagaatacttgaagatagattttagacagtgtagttttgagtctttaaacagtaatttagtggtggtcatgataatccttctctttctaagccattgagtatgtattactgctttgaacatagaaatggtttttttaaaaaaataaggctcaagaaagatgcaaaaccaaggatagctagaaagaaaacacatgtatgaccatgggtatgatacctccagaaatgttaacaacttattcttctgccatgagtacccctcatcagggttggtttcaatgacaggttttggtgatgttcctgaccatatgaagtggtttatgtttagaaacattcaaattgagggacatcatttacagcatcgagtgtgtcagttatacatgcattcatcattaaatatcctaggttttatgacagacattgaaattatcactcagatgtgtttaacagcaaaaaattcccagcacatcctggcaaaggcttttatttccaaccgttgcattcttcatctctgcctcccattgcccactgaatgctttgctttctgtgcatcaagacagagttctaaaaccagaaaacatccatcttgaaaggtccaagaaaaagccaaattccatatagcaccacagaggaggccctttgtttccctgcagtatttcaaccaggaacattagtatcacatccaccaggaggcacatcactggcaagtaacatagaatcacagggctgcaggtgcccctggacactccccggttctggcttttctgccttgtacctcctcacctgcagatctaccctgcagcttttgcatagtcagtgacacacttgacaattggcacagctgtgctggggaagacgggagacaccttgctccttccaaactagaaggaaagattttggagccatcaccctgtgcttctagggatgcacgcctgtctttattatacaggtttcttgcaggtttttatcagccagtgggaactccacagtgatgagcactgaatcttcactaaatcttcctacagacatttaggaatccagtccttgcttttgcagatatgttttatgtcagcagcatgacaaagccatataattaaataatttatgtgaaagcattgcttattaacaaggaaaatatgtagatgcttcagagggaaaggcagctagagggaaattttcatcccaatatgttagctatattcagggttgattttttctttaatctcaactgtcactgatacattgaaaaatttttgctatgaatatagtgaaacagaaacattctgtaataccttaattaaacatgctattatttcaatgtataaccaaaacatatctccatggtacagttaagacttgttgcaatgacaatagcagcttaattaaatgcgttctcccttgcaaaatgtatgaatgtcaggagagtttagtggaaaagttttctttgtttcaggattggtttcttctagactgttctcaggactactttcttgagcaagaatggcttacagagactgaaggcttctgtttggttagtctattcagcagatatggagctggaaaacaagacatctcctatagcttgctataatagtgaaggagaaattggaaagttttaatcacaataatatccaataaaagcccattttgagagttttgttattaagtcaatgagaagggataggtaactttgtcctatatattaacttatgtctaaatagacatggttaagccatgttcctttctaatttcttttcttttcttttttttttttttttttgagacagtctctcgctctgtcgcccaggctagagtgcagtggtgcgatcttggttcactgccagctctgcctcccacgttcacaccattctcctgcctcagcctcctgagtagctggggactacaggcacccgccaccacgcccagctaattttttgtatttttagtagagacagggtttcaccgtgttagccagggtggtctcgatctcctgaccttgtgatctgcctgcctcggcctcccaaagtgatgggattataggcgtgagccaccaccgcgcccggtcattcctttctaatttcttgaaaaaactttgtcttgtccttatgtttacatgtgtgtaataatttcagcaactctggaatgtgggtgaggtggctgtggtggatgaatattactccctaccctccttggatctttctagatcttccagaccattaaatgcccctgaagctccttttatagttttgcaagtggatttacttgtagacatccttactatccagcataatcccccttggctgacatgagaacttggttagaggagaatttattggggtcagtgtaaatattcaagttcaaaagcctcagaacccaacactttaaagatttttaaatggaattttgtcgtagtcattgtacttttaaaatagtactttcagtttcattgaggttacaagaaagactgaagagtacaaaggaaatttagttacaatttttgcatttattatggccttaaagactcttgggaatcaggctctgttcaacagtcaataaatgtaatacacacattaatatagtactgactgggcgttcttctataaaagtttaagttctttggcttctaagaaaatgttgggcagttacagttaacttgatgactacttctagtattagccaaatgggtcctaagtggcagcattttgccagacattgactaaatccttacatgccacatttactgaattccaataaacatatagttcttctgtggagtagttaacagtaagtggcagctcactgaatttctcccaggttctgtctcttccaaaatcctccatcctctcttatgaagggaagctgataaaaaaaaatcctcttggtgcaagctgaagctgttaaggattccttttttcactctcaggaccaacagacgttcttttgtatttcaagataatttcacctgttgttgttgttgttgttgttgttgttgttgttgttgttgttgttacaaagaaacaaattttgagcagcaatgacaattcaaccatatctagattctccctaccttatttctccagccagtcacaccaggcagacgggtaacctttaacagacctggtgttctcatggaataccgatgctcgtcccagggagctgacctttctcactatgtccttatagagctgctcttacagagaactttgtgctcaggaccaagggatggtcaattaaaagttgcatgtaagcatcaggcttggatgggcaagggagggcttttatacatctttgaacgaccaggtctttccttgtctgcctgaaggcagagcttcgagaaacagcacttcccatgtgtctggtcctcttggtctctcagccagacacttaatcaatcctggactctccagtagtcctcagtcattgtagccatagcatctgcaaaaaaagaaatgctaaaataatcattagcgttttcaaaattaggaaatcaaagtagctgggtcactctcttacatgtgtatgagccagttaattctgctggacagatcatacttacgctgctgattgactcttctgagcagtaacacatctcctgaattaattaggtaggtcccgtttgggtgctttaagtgggatcagtcttagatgagtgccagtatgtgattgaatttcatacgcacaaatgccatgattcaagttctctctccagtttttcttatagatcaacacacagtacatgtggtcagttacttggttgaatttctgcttagctgtggtaagagacagagaaagggagtgaggtgggaccaggggaattatcagaaagacatgagtgaacctattggccaggtagcttccaagtatgttctattgtattgtctgttttgattctgatagtttagaactctttctgatagtttagaactcttacccagtggttacatgactgatcaaggcaactccatctggaaattaattgcttgggtaaaatgtccctgagtttcaacttgtcttttatctctggatattctcttatgagattattatgcatgtttctgtcacatgggcattatttacacacttgataaatgaaaggtatttctctgtccgttcaaggaaataaaatgtaagttcttgttttattaaatgaatgaagccttttggttaaaaaaaaagtaatgtaatatgtttctgttcaaacttgagctaatgacatttaaggaattaaagacattgatctagttcttagtatgaaaagtgtacatgtagatatagttatataattgtgtatatacatatctacacacatggttggttttatattgctttttcatcaatatttttgactgaaacctttacaataaattttattttaattatgtaaccactaatattttgagagaaggaagcaaatgttatatgtccttctgttaaaagaaaaaaaattcagtcctccgccaaccgcttcccacacactcatactctgcacatcttggctacattaaaatggactgacagaattatttaaaaggcactatgaaggtagaacactaccttaatattttatcctagtcagaagcctgatttaacactgaactttgaagggaagcttagctgtagctcatggctttcaaagattagaagaaacatttactggttctatggaaaatagtcttcttgctaggtagattggaaacaaagaaattgcattggtggtgttaaaatctaacatttataacaaatcctgttttattctagatgaaatacttagacaattcttccagtggaaaccagtgaacttttttaacagctttgggaattcttttgtatgataatttttaaaatgaaatgtgtactcttcaaactaattaaagcttgaagttttccaggagtcgcattttaaaagtgtttgtacacattttaacacttggatattttctattttggttttgtatatttttatgtatacacaatgtacagacttttttcttgtaaataaaacatgttttcatttgtctagaa

SEQ ID NO: 20628 - DNA, 7275 bp, Homo sapiens
  misc_feature 1..7275: note = ENST00000409382
  source 1..7275: mol_type = unassigned DNA
gcagcctcggtgcgtgggccgggaaccgccgcctctccccggggctcggggccgcggttcctctggccgcgggagccgccgccgcgctgcccgaaacaatgaggcgtgcagcgcggggctgagcgtagcctcccgccggctttgaggccgagccacccgctgtgccccgccgcccgcgcttgcagctgccgccggcgcggagcagcgctggccccggagaggtgatcccgcaggccgcctgggacgggagcgcggggcagctccgagaccccacggtggcaggaggaggactcgagcctgcggcaggacgactcccgccgcgcactcgccttctgcagcccccaagttccgcggcgtgagtcggggaccccggccagggtcccagctctagcgggcgccagcgtgagtgtgggagcgcgtagcgcgcgcacccgagcggctgccggggaataaaatgtgacacgcacgccttggactccagtgccgcgctgccagggggagcaccgagcaccacggtgtcgtgcgcttcgaggcgcggcgtgggaagaaggctggttcattctgccacccatctgcattaagacacaaggtgctgaccgcagagacctgccatgaaaccacacttgaagcaatggagacaacgaatgcttttcggaatattcgcttgggggctcctctttttgctgattttcatctacttcaccgacagcaaccccgctgagcctgtacccagctccctctccttcctggagaccaggaggctcctgccggtgcaggggaagcagcgggccatcatgggcgccgcacatgagccctccccgcctgggggcctggacgcacgccaggcgctgccccgcgcccacccagccggttcctttcatgcggggcctggagacctgcagaaatgggcccagtcccaagatgggtttgaacataaagagtttttttcatcccaggtggggagaaaatctcaaagtgctttctacccggaggatgacgactacttttttgctgctggtcagccagggtggcacagccacactcaggggacattgggattcccttcccccggggagccaggcccacgggagggggcttttccggctgcacaggtccagaggaggcgggtgaagaagaggcaccggaggcagagaaggagccacgtgttggaggagggcgacgacggcgacaggctgtactcctccatgtccagggccttcctgtaccggctctggaaggggaacgtctcttccaaaatgctgaacccgcgcctgcagaaggcgatgaaggattacctgaccgccaacaagcacggggtgcgcttccgcgggaagcgggaggccgggctgagcagggcacagctgctgtgccagctgcggagccgcgcgcgcgtgcggacgctggacggcaccgaggcgcccttttctgcgctgggctggcggcgcctggtgcccgccgtgcccctgagccagctgcacccccgcggcctgcgcagctgcgctgtcgtcatgtctgcaggcgcaatcctcaactcttccttgggcgaggaaatagattctcatgatgcggttttgagatttaactctgctcctacacgtggttatgagaaagatgttgggaataaaaccaccatacgcatcattaattcgcagattctgaccaaccccagccatcacttcattgacagttcactgtataaagacgtcattttggtggcctgggaccctgccccatattccgcaaatcttaacctgtggtacaaaaaaccggattacaacctgttcactccatatattcagcatcgtcagagaaacccaaatcagccattttacattcttcatcctaaatttatatggcagctctgggatattatccaggagaacactaaagagaagattcaaccaaacccaccatcttctggtttcattggaatcctcataatgatgtccatgtgcagagaggtgcacgtgtatgaatatatcccatccgtgcggcagacggagctgtgccactaccacgagctgtactacgacgcagcctgcaccctcggggcgtaccacccactactctatgagaagctcctggtgcagcgcctgaacatgggcacgcagggggatttgcatcgcaagggcaaggtggttcttcccggcttccaggcggtgcactgccctgcaccaagtccagtcattccacactcttaaaaagggtttcttgggaatcaatgtgcaataaggtactactgttgtactcaaagtcacaaaagaatacttgaagatagattttagacagtgtagttttgagtctttaaacagtaatttagtggtggtcatgataatccttctctttctaagccattgagtatgtattactgctttgaacatagaaatggtttttttaaaaaaataaggctcaagaaagatgcaaaaccaaggatagctagaaagaaaacacatgtatgaccatgggtatgatacctccagaaatgttaacaacttattcttctgccatgagtacccctcatcagggttggtttcaatgacaggttttggtgatgttcctgaccatatgaagtggtttatgtttagaaacattcaaattgagggacatcatttacagcatcgagtgtgtcagttatacatgcattcatcattaaatatcctaggttttatgacagacattgaaattatcactcagatgtgtttaacagcaaaaaattcccagcacatcctggcaaaggcttttatttccaaccgttgcattcttcatctctgcctcccattgcccactgaatgctttgctttctgtgcatcaagacagagttctaaaaccagaaaacatccatcttgaaaggtccaagaaaaagccaaattccatatagcaccacagaggaggccctttgtttccctgcagtatttcaaccaggaacattagtatcacatccaccaggaggcacatcactggcaagtaacatagaatcacagggctgcaggtgcccctggacactccccggttctggcttttctgccttgtacctcctcacctgcagatctaccctgcagcttttgcatagtcagtgacacacttgacaattggcacagctgtgctggggaagacgggagacaccttgctccttccaaactagaaggaaagattttggagccatcaccctgtgcttctagggatgcacgcctgtctttattatacaggtttcttgcaggtttttatcagccagtgggaactccacagtgatgagcactgaatcttcactaaatcttcctacagacatttaggaatccagtccttgcttttgcagatatgttttatgtcagcagcatgacaaagccatataattaaataatttatgtgaaagcattgcttattaacaaggaaaatatgtagatgcttcagagggaaaggcagctagagggaaattttcatcccaatatgttagctatattcagggttgattttttctttaatctcaactgtcactgatacattgaaaaatttttgctatgaatatagtgaaacagaaacattctgtaataccttaattaaacatgctattatttcaatgtataaccaaaacatatctccatggtacagttaagacttgttgcaatgacaatagcagcttaattaaatgcgttctcccttgcaaaatgtatgaatgtcaggagagtttagtggaaaagttttctttgtttcaggattggtttcttctagactgttctcaggactactttcttgagcaagaatggcttacagagactgaaggcttctgtttggttagtctattcagcagatatggagctggaaaacaagacatctcctatagcttgctataatagtgaaggagaaattggaaagttttaatcacaataatatccaataaaagcccattttgagagttttgttattaagtcaatgagaagggataggtaactttgtcctatatattaacttatgtctaaatagacatggttaagccatgttcctttctaatttcttttcttttcttttttttttttttttttgagacagtctctcgctctgtcgcccaggctagagtgcagtggtgcgatcttggttcactgccagctctgcctcccacgttcacaccattctcctgcctcagcctcctgagtagctggggactacaggcacccgccaccacgcccagctaattttttgtatttttagtagagacagggtttcaccgtgttagccagggtggtctcgatctcctgaccttgtgatctgcctgcctcggcctcccaaagtgatgggattataggcgtgagccaccaccgcgcccggtcattcctttctaatttcttgaaaaaactttgtcttgtccttatgtttacatgtgtgtaataatttcagcaactctggaatgtgggtgaggtggctgtggtggatgaatattactccctaccctccttggatctttctagatcttccagaccattaaatgcccctgaagctccttttatagttttgcaagtggatttacttgtagacatccttactatccagcataatcccccttggctgacatgagaacttggttagaggagaatttattggggtcagtgtaaatattcaagttcaaaagcctcagaacccaacactttaaagatttttaaatggaattttgtcgtagtcattgtacttttaaaatagtactttcagtttcattgaggttacaagaaagactgaagagtacaaaggaaatttagttacaatttttgcatttattatggccttaaagactcttgggaatcaggctctgttcaacagtcaataaatgtaatacacacattaatatagtactgactgggcgttcttctataaaagtttaagttctttggcttctaagaaaatgttgggcagttacagttaacttgatgactacttctagtattagccaaatgggtcctaagtggcagcattttgccagacattgactaaatccttacatgccacatttactgaattccaataaacatatagttcttctgtggagtagttaacagtaagtggcagctcactgaatttctcccaggttctgtctcttccaaaatcctccatcctctcttatgaagggaagctgataaaaaaaaatcctcttggtgcaagctgaagctgttaaggattccttttttcactctcaggaccaacagacgttcttttgtatttcaagataatttcacctgttgttgttgttgttgttgttgttgttgttgttgttgttgttgttacaaagaaacaaattttgagcagcaatgacaattcaaccatatctagattctccctaccttatttctccagccagtcacaccaggcagacgggtaacctttaacagacctggtgttctcatggaataccgatgctcgtcccagggagctgacctttctcactatgtccttatagagctgctcttacagagaactttgtgctcaggaccaagggatggtcaattaaaagttgcatgtaagcatcaggcttggatgggcaagggagggcttttatacatctttgaacgaccaggtctttccttgtctgcctgaaggcagagcttcgagaaacagcacttcccatgtgtctggtcctcttggtctctcagccagacacttaatcaatcctggactctccagtagtcctcagtcattgtagccatagcatctgcaaaaaaagaaatgctaaaataatcattagcgttttcaaaattaggaaatcaaagtagctgggtcactctcttacatgtgtatgagccagttaattctgctggacagatcatacttacgctgctgattgactcttctgagcagtaacacatctcctgaattaattaggtaggtcccgtttgggtgctttaagtgggatcagtcttagatgagtgccagtatgtgattgaatttcatacgcacaaatgccatgattcaagttctctctccagtttttcttatagatcaacacacagtacatgtggtcagttacttggttgaatttctgcttagctgtggtaagagacagagaaagggagtgaggtgggaccaggggaattatcagaaagacatgagtgaacctattggccaggtagcttccaagtatgttctattgtattgtctgttttgattctgatagtttagaactctttctgatagtttagaactcttacccagtggttacatgactgatcaaggcaactccatctggaaattaattgcttgggtaaaatgtccctgagtttcaacttgtcttttatctctggatattctcttatgagattattatgcatgtttctgtcacatgggcattatttacacacttgataaatgaaaggtatttctctgtccgttcaaggaaataaaatgtaagttcttgttttattaaatgaatgaagccttttggttaaaaaaaaagtaatgtaatatgtttctgttcaaacttgagctaatgacatttaaggaattaaagacattgatctagttcttagtatgaaaagtgtacatgtagatatagttatataattgtgtatatacatatctacacacatggttggttttatattgctttttcatcaatatttttgactgaaacctttacaataaattttattttaattatgtaaccactaatattttgagagaaggaagcaaatgttatatgtccttctgttaaaagaaaaaaaattcagtcctccgccaaccgcttcccacacactcatactctgcacatcttggctacattaaaatggactgacagaattatttaaaaggcactatgaaggtagaacactaccttaatattttatcctagtcagaagcctgatttaacactgaactttgaagggaagcttagctgtagctcatggctttcaaagattagaagaaacatttactggttctatggaaaatagtcttcttgctaggtagattggaaacaaagaaattgcattggtggtgttaaaatctaacatttataacaaatcctgttttattctagatgaaatacttagacaattcttccagtggaaaccagtgaacttttttaacagctttgggaattcttttgtatgataatttttaaaatgaaatgtgtactcttcaaactaattaaagcttgaagttttccaggagtcgcattttaaaagtgtttgtacacattttaacacttggatattttctattttggttttgtatatttttatgtatacacaatgtacagacttttttcttgtaaataaaacatgttttcatttgtct

SEQ ID NO: 20629 - DNA, 574 bp, Homo sapiens
  misc_feature 1..574: note = ENST00000361803
  source 1..574: mol_type = unassigned DNA
ttctggtttcattggaatcctcataatgatgtccatgtgcagagaggtgcacgtgtatgaatatatcccatccgtgcggcagacggagctgtgccactaccacgagctgtactacgacgcagcctgcaccctcggggcgtaccacccactactctatgagaagctcctggtgcagcgcctgaacatgggcacgcagggggatttgcatcgcaagggcaaggtggttcttcccggcttccaggcggtgcactgccctgcaccaagtccagtcattccacactcttaaaaagggtttcttgggaatcaatgtgcaataagatgaaatacttagacaattcttccagtggaaaccagtgaacttttttaacagctttgggaattcttttgtatgataatttttaaaatgaaatgtgtactcttcaaactaattaaagcttgaagttttccaggagtcgcattttaaaagtgtttgtacacattttaacacttggatattttctattttggttttgtatatttttatgtatacacaatgtacagacttttttcttgtaaataaaacatgttttcattt

SEQ ID NO: 20630 - DNA, 1657 bp, Homo sapiens
  misc_feature 1..1657: note = ENST00000409087
  source 1..1657: mol_type = unassigned DNA
cttccgccggggcaggcgccgggactccctcctggccgcccacagcctgtgcgcattcctgcattcctgccgccgcccgggacccgagtgccccggaggtgtccaggcgcggtgccaggcgggtactgtgcaggttcattctgccacccatctgcattaagacacaaggtgctgaccgcagagacctgccatgaaaccacacttgaagcaatggagacaacgaatgcttttcggaatattcgcttgggggctcctctttttgctgattttcatctacttcaccgacagcaaccccgctgagcctgtacccagctccctctccttcctggagaccaggaggctcctgccggtgcaggggaagcagcgggccatcatgggcgccgcacatgagccctccccgcctgggggcctggacgcacgccaggcgctgccccgcgcccacccagccggttcctttcatgcggggcctggagacctgcagaaatgggcccagtcccaagatgggtttgaacataaagagtttttttcatcccaggtggggagaaaatctcaaagtgctttctacccggaggatgacgactacttttttgctgctggtcagccagggtggcacagccacactcaggggacattgggattcccttcccccggggagccaggcccacgggagggggcttttccggctgcacaggtccagaggaggcgggtgaagaagaggcaccggaggcagagaaggagccacgtgttggaggagggcgacgacggcgacaggctgtactcctccatgtccagggccttcctgtaccggctctggaaggggaacgtctcttccaaaatgctgaacccgcgcctgcagaaggcgatgaaggattacctgaccgccaacaagcacggggtgcgcttccgcgggaagcgggaggccgggctgagcagggcacagctgctgtgccagctgcggagccgcgcgcgcgtgcggacgctggacggcaccgaggcgcccttttctgcgctgggctggcggcgcctggtgcccgccgtgcccctgagccagctgcacccccgcggcctgcgcagctgcgctgtcgtcatgtctgcaggcgcaatcctcaactcttccttgggcgaggaaatagattctcatgatgcggttttgagatttaactctgctcctacacgtggttatgagaaagatgttgggaataaaaccaccatacgcatcattaattcgcagattctgaccaaccccagccatcacttcattgacagttcactgtataaagacgtcattttggtggcctgggaccctgccccatattccgcaaatcttaacctgtggtacaaaaaaccggattacaacctgttcactccatatattcagcatcgtcagagaaacccaaatcagccattttacattcttcatcctaaatttatatggcagctctgggatattatccaggagaacactaaagagaagattcaaccaaacccaccatcttctggtttcattggctcatttgtaaaaattggccatatcagagcttgcagtgagccgagatcacgcgactgcactccagcctggacgacagagtgagactccatctcaaaaaaaaaaaaaaaactggccatataagaaacttaacattcatactgtttaaag

SEQ ID NO: 20631 - DNA, 308 bp, Homo sapiens
  misc_feature 1..308: note = ENST00000419159
  source 1..308: mol_type = unassigned DNA
acactccgtgtttaggagcgagacccgtgtgtggggaatgttgaaggtggtttggggaaaagcaggaaattctggagaagcgaacgggaggacggcttgcgctttggggacgggcggatacagttgtgcccctgtggctcagtaaaggttcattctgccacccatctgcattaagacacaaggtgctgaccgcagagacctgccatgaaaccacacttgaagcaatggagacaacgaatgcttttcggaatattcgcttgggggctcctctttttgctgattttcatctacttcaccgacagcaaccc

SEQ ID NO: 20632 - DNA, 6861 bp, Homo sapiens
  misc_feature 1..6861: note = ENST00000328299
  source 1..6861: mol_type = unassigned DNA
gcagcttacaccgcggtccccttatttggatctgcgggaatgtgggctggagaggtcctgccgtggtaccagcctccagcctgcccccaggactgcccctgacccaggcgcgcccgctgctcggtggcaggagggccggcggagcgccatggcctgcatcctgaagagaaagtctgtgattgctgtgagcttcatagcagcgttccttttcctgctggttgtgcgtcttgtaaatgaagtgaatttcccattgctactaaactgctttggacaacctggtacaaagtggataccattctcctacacatacaggcggccccttcgaactcactatggatacataaatgtgaagacacaagagcctttgcaactggactgtgacctttgtgccatagtgtcaaactcaggtcagatggttggccagaaggtgggaaatgagatagatcgatcctcctgcatttggagaatgaacaatgcccccaccaaaggttatgaagaagatgtcggccgcatgaccatgattcgagttgtgtcccataccagcgttcctcttttgctaaaaaaccctgattattttttcaaggaagcgaatactactatttatgttatttggggacctttccgcaatatgaggaaagatggcaatggcatcgtttacaacatgttgaaaaagacagttggtatctatccgaatgcccaaatatacgtgaccacagagaagcgcatgagttactgtgatggagtttttaagaaggaaactgggaaggacagagtccagtctggctcatatctcagcacagggtggtttaccttccttctggccatggacgcctgttatggcattcacgtctacgggatgataaatgacacctactgcaagacagaagggtatagaaaagtcccctaccattattatgaacaaggaagagatgagtgtgatgaatattttcttcatgaacatgccccatatgggggtcataggtttatcactgaaaagaaagtgtttgctaaatgggccaagaagcacaggataatatttacacatccaaactggacattgtcttgataatggttttcctgatcttgccgcatcacttaatgtgatccccatactgcaactgtgatgctgatgatgctaatggagatgatggtaatgataaagacaacaacaatgattatcaagttcctgtacactctcagatgtggatggtgactctgctagtaatttaaacttggcatttcatggaggatggttgtgctcatgatgttctttctggaggttcaacactacgtaccgcactttataatttaactggaattgagatgaaggccagtgacatgacaactgtgacctaagaaatgggaagattatctttcaagatagctgcctagaattgttcaacagtgagtaacttccagaagccaaaagagtttggcttcatgaggcaaggtgattgactcaatggcttgttgaatctcagcagttccgccatcttgaagaatgattgattgtcaaacactgacccaagaactgctatcagggtgcaagtatcttactacttagcctaaggatgggaaaatatctcttcctaatataccatctttctacagtatttcctacagctaaagcctcaggccattgcctaattaacaatgaagatttcatggacatcctacacttcaggattacttgactatctcaaacacataaatcaaaatgggccaagtagcaaatcttgatgaatttccactcttaccatccattcttactaccaacagtataactgaacatgtgattagaatgatctatattaatgtttagttatttttggttgagtgctaaatatttcagaaggctacttaacatgtaagataccaacttcaacactgtaataacatatactgtgaaaacattcctaaaaagtaaccaaagggtttgctaactctgcttcaacatccaacaacacaaaactatatgatttttaaaatcatgaaatagagacagcaaagcatatttttacatcaatttgtatcctatcatacttcataatatatatttgtatattcaaatttctattttataggcccaaggtgtgtttctccaaacattacattctcattgccaagtgccagctgttacacatggagaggaaatgattccttatattaaacctgaccagagctttttgccttctagggatttatttttcccatagtgtatcagttgttatgccacaataacaacaataataatgttcttaatgtccaaagtgctttgtcatttagagtcctttaacatctgttataccatgtgatgcccttgaacaccccattgggctattgtctgtgtattctgctctctttagcagatgatctgtaatttggtcattgttctgttatattccagattgctctacttgctaatatttgtatagaatagaatttatgtaaactagtaaccagttgatctctgtgccaaatacattatatcaggattacacaaaaagtatcacaaaggatggtcttggccatatgctagggcccctgtgaaaataagtagttttgagaagtttttctatatacgtatatatacacgtgtggttctatttaggtggggaaaaaatgaaaaagcagggacaacaggaggaaatgaaggcagagaaatatagtttcctttcctaggattgagacaattctatttttcatatactcgttgctcattaaatagtaaagggttgatttgctgcaagagtagctgagaattcaaaaacatccttgcagaatgattcaaaagacaaaagccaggctcaacttatagaatgttttggaaactggaagtaatgatacatttcacttcagaagcacttgtaggtctttactagtgctaagtattatggtgagctatcattaaagtgtgccatcttggataaaggccttttgcctactctcttctgcaattttgacacctcaatattcacacccataaacattactaagccccagttctatcgttggaaggagttgttattcttttgttgttcccttatgcaatttttaattctatgaatgttaagtttttttgagctaatgatagatagaaatgcccactcaaagaaaaataaacagagacaaatgttaaaattgccatacagactgtttttccccctgttgtttcactttaaaataaaaagaaatccttgattaatcagaatggcttgggacatgaacttaatttatttagttttctaataaatgaagggccaactcttatttgttctagcccctactgatgagaaacatttgaaaacttgcttgctctcctgcctcgttgtagctttctctgatgaagacttctgcagtatattgtatccctcactctatagcagaaggtgtgtgtggaatatgtagactccagtgttttcttaggaggggtgggaaagggctttctttcctctcctctcctctcgtctcctctttctttcctttctttttgcaactaaactgctactctacactttttattgttgttttctttgtctttttctttctacaaacaggaaacaaaaaaaaaaaaaaacaagtttttctcaatttggagactcaattgaataatttccagtataatcagcattttgatagaatctcacaacttatttttctctgcttttatttcctgtttttctttgttccatctttctaattctagtgaaaatgcaaagtctaatttctcccatgttgagaataaatttttcatctatgatttgctgatagagaagagcttggtaagggagcaattcaaggaaactattttgccatgcacatttctgatcaattcccacagattctggtcaaatgaaagatattctatccaacatttaaacattgaaaaatttaactgaacttacttatcactgatgtgtatttatcccagaaattaattaatatctgtgaaaaataaaaatatttcaatactatccgtgcttcttggaaaatgaactataaaaaagggtcacaatttttctgaaattggcatgaaaacattcaagataaaaataatagactaaacattattttctgttatgcataattctatgaaaaagcaaggtaatttaaaaagagttttaaaatgtgtgtttgaatcttttccaatttaaccaagtgagaagtagcaatgatttacattgttatgatgataatgtgaataagaaaccttttagagtatatgattttacattgctatcaaacctatcaaagaaaaggcaattggaatttggaggaatgtttgtatatatgcacatagagtctatttgtgtgtgtgtgaacgcacatatatatacatctatatacttataactatatataaaagcatatatataatcctatattcttcactggtgcatgtgaatcacagaaagccctattttagacttcatctgaaattcgttgggttacattttgaatcctgatgaaaaaagcaaaaatccaaattaaatggactgattgctaagagtacgtaaaatcatattcaaaagctggccagaagaataaagctagagaagctgctaaatctagaaaacacaatcagatgccacagttgtcacaaatcagacttgtaagtatagcaatctgtattgtaggttctgccgattgcaggcttagctaaagtcacattgaaaaacattgcatcaagcttcattcacactgaagtaaatgaacattggtcctcctattcaaataagccagtctttagcataagcaaaatccagatttgcatgatttttattatatagctacagaactgtgaccactgtgaaaaaggaaaattatacaaggagattgctcttggaggatttggtatgaatcagctgaggtaggaacaagagtctgaattggggacctgctgaccttccaagaagtagaaggccatcagaagaaaatcactgttacttagagaagagacaacactaaagtacttcacctggtagtgttaattggatgttaattatgagctcggtttaatttcaataagcaagaaaatataatcagatgactgatttaaaaaaaaacaacaacaatgtgcccatctagcctttaatgtgacatgtcaaatgcaaataataaattatgttattcagtatcagttgtttgcatgtcttagcacaacaaaggatttacagtctgagggccaagagagaaaaaatgcttttttcttaaaacagcatatttaaaagacaagacctcatcatttcagtagtgtacatagattagtgactgaaggagccagtgctagcctttttaagtaggtcaggcttttagagctgaaagagattttaaagaccagccaattcaactcctacaccttggagctgaggaaacagacagaggtgaagtgacttgcctgtagttataaactggactaatggcagtactgagactcaaattcttgtctcatgttttcttctctagtgctttttccactacactttttagacagaagagtagctggaaaaagaatgcctaactgatttactaaagagtctattcatggaatccaagggctccaaattgtgctaattctgctcaggatgaaacaaatccccacgctgaagtggagaaatattttcataattgaaggaacatatcccattgattgtctacactttcttctctctgtttgttgctattggtaaggctaggctatgttctgttatcacaaaattctaggacttgtttaaagaacttaaaggtcagtttcttagtttctctttgtgattgaggatgagcaagccattgatacaccaagagctgctgagtgttggaggttgcctggtgaaactggcaggccctgttgttgacatttccccagagctaaaatgtcctcatactcaaaccaactgtgctgcccaagttagtgaaattatccatcagcactaacaccaccctttgggttcatgctcatccctgcactccatgtgacctttgagcccagatacccttctagaaggtgaatgaaagccccacatgtcccgcaagacttagtctgcataaaagatttaaaaggatttttttttctctacagtccatttatatgatactgttagaagtgaagaattttgaaactacatacactggcctctgaaaatggttcttgtggctcagaaatagtatattgttctgttgcttgtttttgctgaactgtagagaaaacaccagagtaaaattccatgtaaattgctaaggcatcgaatcagaactgtccttgggcgttgtaacagtgcagaaaatctcatttagtttttttctttttttttttcagttaactacttgtttgtttcttttcagaataggcacttttttttgagtagaaaacctcttctttctccacagatacatctctttttgttcacgccttgaagacttcagaaaaatagaagctcacttccttccataaaggtgaagaacatcttgatgaataaacagtcaactaccaagttcacatatttgcctatgaagtgagagctatttctaagaaacttcaaaaagatcaaaacgaggcaattttatagctttttgttacctaatctacaaagtactaatttccttgtgtttagctttgttgtcactgttactgagtaaatacccatttctgttacatatggtacattttttgcttcacttattttcctgagttcccatgattttttttctgtagtttctcattcattttaaaacccataatcttcatctatttttagaagaaagtgtaaatgcacagttgtacgtttgttgagagtttttatggcattatagtgctttatttataagcattgtgtcttagaataaagcttacaaaatggcaaa

SEQ ID NO: 20633 - DNA, 861 bp, Homo sapiens
  misc_feature 1..861: note = ENST00000464140
  source 1..861: mol_type = unassigned DNA
cctggtacaaagtggataccattctcctacacatacaggcggccccttcgaactcactatggatacataaatgtgaagacacaagagcctttgcaactggactgtgacctttgtgccatagtgtcaaactcaggtcagatggttggccagaaggtgggaaatgagatagatcgatcctcctgcatttggagaatgaacaatgcccccaccaaaggttatgaagaagatgtcggccgcatgaccatgattcgagttgtgtcccataccagcgttcctcttttgctaaaaaaccctgattattttttcaaggaagcgaatactactatttatgttatttggggacctttccgcaatatgaggaaagatggcaatggcatcgtttacaacatgttgaaaaagacagttggtatctatccgaatgcccaaatatacgtgaccacagagaagcgcatgagttactgtgatggagtttttaagaaggaaactgggaaggacagtacagagtgaccatgcagtgttgattgatcgaacagcaaccaccacatacatgtcctgccccaccacaaaaggaaggaaggaataaaagaaagaaagaaagaaacaaacaaacaaacaaacaaaactaagcaagacaaaacaaatacccatgtcagtggttcaaagattaagattgtggctttgtgtaaagttctttccctttgtagacttgctgcataattattcaggtatgatggttacagtttttaaaaaggaagggaaattgtggtatgtggtatgtaaatatttttaaatgttgtctctctgttttgatcagtttttgttttattcaatttgtctttattaaatcttatcaaagcaaaa

SEQ ID NO: 20634 - DNA, 617 bp, Homo sapiens
  misc_feature 1..617: note = ENST00000621530
  source 1..617: mol_type = unassigned DNA
tgtagagaaagtctgtgattgctgtgagcttcatagcagcgttccttttcctgctggttgtgcgtcttgtaaatgaagtgaatttcccattgctactaaactgctttggacaacctggtacaaagtggataccattctcctacacatacaggcggccccttcgaactcactatggatacataaatgtgaagacacaagagcctttgcaactggactgtgacctttgtgccatagtgtcaaactcaggtcagatggttggccagaaggtgggaaatgagatagatcgatcctcctgcatttggagaatgaacaatgcccccaccaaaggttatgaagaagatgtcggccgcatgaccatgattcgagttgtgtcccataccagcgttcctcttttgctaaaaaaccctgattattttttcaaggaagcgaatactactatttatgttatttggggacctttccgcaatatgaggaaagatggcaatggcatcgtttacaacatgttgaaaaagacagttggtatctatccgaatgcccaaatatacgtgaccacagagaagcgcatgagttactgtgatggagtttttaagaaggaaactgggaaggacagaaatgag

SEQ ID NO: 20635 - DNA, 3751 bp, Homo sapiens
  misc_feature 1..3751: note = ENST00000477717
  source 1..3751: mol_type = unassigned DNA
agttgtgtagatcgctgagagactacgagggtccggttcagttttaattctgtctctaatctctgcaacagccgcgcttcccgggtcccgcggctcccgcgcgcgatctgccgcggccggctgctgggcaaaaatcagagccgcctccgccccattacccatcatggaaaccctccaggaaaaagtggccccggacgcgcgagcctgaggattctgcacaaaagaggtgcccaaaatgaagaccctgatgcgccatggtctggcagtgtgtttagcgctcaccaccatgtgcaccagcttgttgctagtgtacagcagcctcggcggccagaaggagcggcccccgcagcagcagcagcagcagcagcaacagcagcagcaggcgtcggccaccggcagctcgcagccggcggcggagagcagcacccagcagcgccccggggtccccgcgggaccgcggccactggacggatacctcggagtggcggaccacaagcccctgaaaatgcactgcagggactgtgccctggtgaccagctcagggcatctgctgcacagtcggcaaggctcccagattgaccagacagagtgtgtcatccgcatgaatgacgcccccacacgcggctatgggcgtgacgtgggcaatcgcaccagcctgagggtcatcgcgcattccagcatccagaggatcctccgcaaccgccatgacctgctcaacgtgagccagggcaccgtgttcatcttctggggccccagcagctacatgcggcgggacggcaagggccaggtctacaacaacctgcatctcctgagccaggtgctgccccggctgaaggccttcatgattactcgccacaagatgctgcagtttgatgagctcttcaagcaggagactggcaaagacaggaagatatccaacacttggctcagcactggctggtttacaatgacaattgcactggagctctgtgacaggatcaatgtttatggcatggtgcccccagacttctgcagggatcccaatcacccttcagtaccttatcattattatgaaccttttggacctgatgaatgtacaatgtacctctcccatgagcgaggacgcaagggcagtcatcaccgctttatcacagagaaacgagtctttaagaactgggcacggacattcaatattcacttttttcaaccagactggaaaccagaatcacttgctataaatcatcctgagaataaacctgtgttctaaggaatgagcatgccagactgtaatcccaggtattcactgcatcagacaccgagacactgaacttcctgagccaccagacaggaaagggtagcagaaaacagcttcactcctcaggaagtaccatggacagacgcctaccaggggtgacaaagcagtgcagttggattgtaaggaaaaattccggaattaatgcatcctaatgaatgttgtccccttcaatggtgttaccttaggagctgaacattcaattcagttacaccactatgactaaaaacagtttggatctcttagtattgcctttgaaactgcaacataagcaactcaacaatattagttgcattcctttatagacataccatgtcaaagacgtttttctatcaagttgtattctttcctgttctataacctttgtcatctgttagactctgtatgtgtgatttgtaaaaagcaggctgaaactatggacatgatttctgaagagcacatctccactgactttcataaagcaaatgtccaatatttatttattgagagttttttagtgcaatctgggccagtatttttatagattatgattatgtggtaatttatccttcctaactctttaatcctgaatgatggttggaaatggcctagaattaggttactctgttcacaatgctcattgttagcatgcaattggtatttgacttggaagtgttgtgttgtattttttgaacccctaggcttcaggaaaactgctcttttgtaaaaagaatagcgatgacattttctaatgtgcagaaatgttccaaaaggacaaaattgaaaaccaaaaactatgttattaaaacaaaaaaatgctaacaagagaaatttaaaggtagttttctttagtaataatttatgtaagtgtcctctcttgagccctagtttcctttttggcagaatgatgtcactgtaccagacaacctcttaggtttcatcccaaatctaaacttgtggcctcttcttgacccatttgaagactctgcacttggagtgatggggccccaacagtagcaggaactttattttggggagccttatctacattcatattacttatatcactcttgtggttaaaactacacttcttcctgtgtccacatgggctaaaatctaccccctgcttctctcgaagcatcaccatccgcctcttccccagcctctcaacacaaaaacacaggatacacacacacacacacacacaaaagacatagctccaaggggttccctggctacaatagcaaacagctgcccttctgtgaggaaaagagactacaaggacatgccctatcattcaactcatttatgctatgaactgtttagactcactacaaatcttcttagattatattcattaccattccctggtctgaaggagtataaaggacttattttattcagagccaagataaattcatattatagatttttatttaaacaagtaatattgttcaaaaatagtctcttataaatatactagtgttttctttacacatgacttagaaggcattagtttctctaatgccaaatttgaaggcaccagcaaatattatgtatgaagactgacattgttttacagacatgacctggcttatgataaaagaagttttatcgcattaccacttcttttcccttttcttaattagtacactaactagtactattaattacacggagtattgttgttaaaatgcaaacacaatcagggtactcacataacataaacaaagttgatattgatgtgtatggcttgggctgttcaaagccagtaagattgaaatggccgtccaaaacatactggaatatgttctttaagttttctcatagtttttaaagggactatgaattttattccaacacattgtcttccacagcatggactctgaacacatcatactttatcaacatatgaaaaagtgtattaattttatacaatttacttataggccacctttataatcacttgaagacgttatgttgctcaaacataagtggctcctttggcaatttctatatttgtggaaatttggaaaggcatagtttcaacatgcaagaatgtaattatattgcttcatctaataatatctcacatatctgtctatcttcagattttagattttctttattaaaaaaaccatcatggtagctccatctcgtttgtaacttctccctctcaaatactcagaagaatgaagaggccaaattcagaaaatcatggcttcactgggaaatgttttaaatctacatgtagctaggatatgtgatttcatattttttaaaaatgtggtgtaaataagtgtaaaaaattaccacttgcaaagtggttttattacagcgttaaagaaaatgactagaattctgatagattgtgctgatgaacctggttgtgggcaattgaattcttgtcttcccactaccatttcatgactgtcgtctgaacactattcaacaccattaaatataaactctgatataaaa

SEQ ID NO: 20636 - DNA, 573 bp, Homo sapiens
  misc_feature 1..573: note = ENST00000480428
  source 1..573: mol_type = unassigned DNA
agttttaattctgtctctaatctctgcaacagccgcgcttcccgggtcccgcggctcccgcgcgcgatctgccgcggccggctgctgggcaaaaatcagagccgcctccgccccattacccatcatggaaaccctccaggaaaaagtggccccggacgcgcgagcctgaggattctgcacaaaagaggtgcccaaaatgaagaccctgatgcgccatggtctggcagtgtgtttagcgctcaccaccatgtgcaccagcttgttgctagtgtacagcagcctcggcggccagaaggagcggcccccgcagcagcagcagcagcagcagcaacagcagcagcaggcgtcggccaccggcagctcgcagccggcggcggagagcagcacccagcagcgccccggggtccccgcgggaccgcggccactggacggatacctcggagtggcggaccacaaggcctcaggaaaatgatggaatatgctggatgtgatgaccaccaagccatatgctgctgcgtattgaatcagaattccaacagccttttttatctgccattgttttacatagtctgg

SEQ ID NO: 20637 - DNA, 2055 bp, Homo sapiens
  misc_feature 1..2055: note = ENST00000318803
  source 1..2055: mol_type = unassigned DNA
agttttaattctgtctctaatctctgcaacagccgcgcttcccgggtcccgcggctcccgcgcgcgatctgccgcggccggctgctgggcaaaaatcagagccgcctccgccccattacccatcatggaaaccctccaggaaaaagtggccccggacgcgcgagcctgaggattctgcacaaaagaggtgcccaaaatgaagaccctgatgcgccatggtctggcagtgtgtttagcgctcaccaccatgtgcaccagcttgttgctagtgtacagcagcctcggcggccagaaggagcggcccccgcagcagcagcagcagcagcagcaacagcagcagcaggcgtcggccaccggcagctcgcagccggcggcggagagcagcacccagcagcgccccggggtccccgcgggaccgcggccactggacggatacctcggagtggcggaccacaagcccctgaaaatgcactgcagggactgtgccctggtgaccagctcagggcatctgctgcacagtcggcaaggctcccagattgaccagacagagtgtgtcatccgcatgaatgacgcccccacacgcggctatgggcgtgacgtgggcaatcgcaccagcctgagggtcatcgcgcattccagcatccagaggatcctccgcaaccgccatgacctgctcaacgtgagccagggcaccgtgttcatcttctggggccccagcagctacatgcggcgggacggcaagggccaggtctacaacaacctgcatctcctgagccaggtgctgccccggctgaaggccttcatgattactcgccacaagatgctgcagtttgatgagctcttcaagcaggagactggcaaagacagatatccaacacttggctcagcactggctggtttacaatgacaattgcactggagctctgtgacaggatcaatgtttatggcatggtgcccccagacttctgcagggatcccaatcacccttcagtaccttatcattattatgaaccttttggacctgatgaatgtacaatgtacctctcccatgagcgaggacgcaagggcagtcatcaccgctttatcacagagaaacgagtctttaagaactgggcacggacattcaatattcacttttttcaaccagactggaaaccagaatcacttgctataaatcatcctgagaataaacctgtgttctaaggaatgagcatgccagactgtaatcccaggtattcactgcatcagacaccgagacactgaacttcctgagccaccagacaggaaagggtagcagaaaacagcttcactcctcaggaagtaccatggacagacgcctaccaggggtgacaaagcagtgcagttggattgtaaggaaaaattccggaattaatgcatcctaatgaatgttgtccccttcaatggtgttaccttaggagctgaacattcaattcagttacaccactatgactaaaaacagtttggatctcttagtattgcctttgaaactgcaacataagcaactcaacaatattagttgcattcctttatagacataccatgtcaaagacgtttttctatcaagttgtattctttcctgttctataacctttgtcatctgttagactctgtatgtgtgatttgtaaaaagcaggctgaaactatggacatgatttctgaagagcacatctccactgactttcataaagcaaatgtccaatatttatttattgagagttttttagtgcaatctgggccagtatttttatagattatgattatgtggtaatttatccttcctaactctttaatcctgaatgatggttggaaatggcctagaattaggttactctgttcacaatgctcattgttagcatgcaattggtatttgacttggaagtgttgtgttgtattttttgaacccctaggcttcaggaaaactgctcttttgtaaaaagaatagcgatgacattttctaatgtgcagaaatgttccaaaaggacaaaattgaaaaccaaaaactatgttattaaaacaaaaaaatgctaacaagag

SEQ ID NO: 20638 - DNA, 787 bp, Homo sapiens
  misc_feature 1..787: note = ENST00000496845
  source 1..787: mol_type = unassigned DNA
ttttaattctgtctctaatctctgcaacagccgcgcttcccgggtcccgcggctcccgcgcgcgatctgccgcggccggctgctgggcaaaaatcagagccgcctccgccccattacccatcatggaaaccctccaggaaaaagtggccccggacgcgcgagcctgaggattctgcacaaaagaggtgcccaaaatgaagaccctgatgcgccatggtctggcagtgtgtttagcgctcaccaccatgtgcaccagcttgttgctagtgtacagcagcctcggcggccagaaggagcggcccccgcagcagcagcagcagcagcagcaacagcagcagcaggcgtcggccaccggcagctcgcagccggcggcggagagcagcacccagcagcgccccggggtccccgcgggaccgcggccactggacggatacctcggagtggcggaccacaaggtgacagcatgcccgccagcccgctcgccactcagcctggggatcccgcacacctgagccttccccctttcccggggctgggaggcgctgtgagtaggtgccgttcgaaggctggaggggagtggacccgctggggtagggtgggctagttccaacttggtatgaattcttatttggagaaagacacaaagttttgtagaaaataggggtgaggtgcgtggaccccaaagcctaatttcccagcagaaatcggccctggaactagaactccctgatccccagaattgcagctgcggatggaggtccggttcctgaagcctcgggtttggccg

SEQ ID NO: 20639 - DNA, 533 bp, Homo sapiens
  misc_feature 1..533: note = ENST00000488940
  source 1..533: mol_type = unassigned DNA
tgcgtgagggaagagcagagtcatagactctcctcagactatcttattgacggacaagttacagcccctgaaaatgcactgcagggactgtgccctggtgaccagctcagggcatctgctgcacagtcggcaaggctcccagattgaccagacagagtgtgtcatccgcatgaatgacgcccccacacgcggctatgggcgtgacgtgggcaatcgcaccagcctgagggtcatcgcgcattccagcatccagaggatcctccgcaaccgccatgacctgctcaacgtgagccagggcaccgtgttcatcttctggggccccagcagctacatgcggcgggacggcaagggccaggtctacaacaacctgcatctcctgagccaggtgctgccccggctgaaggccttcatgattactcgccacaagatgctgcagtttgatgagctcttcaagcaggagactggcaaagacaggaagatatccaacacttggctcagcactggctggtttacaatgacaattgcactggagc

SEQ ID NO: 20640 - DNA, 8251 bp, Homo sapiens
  misc_feature 1..8251: note = ENST00000388887
  source 1..8251: mol_type = unassigned DNA
accaagactcctggatttgccatttttcctttctgaaggcaggtctcacctatctcctggttcgatctaggaaaaaggaaaggaagggatttaaaagtaaacagtgaaatgagaaagaattcactgggagtttatcaaactaagttaaaatagctaagtcagcctgacaggtgcttggcacagagaaggagcaaatatttcctcatgatgctacaacatttagtaattttttgtcttggattggttgtacaaaatttctgctccccagctgaaaccacagggcaggcaagaagatgtgataggaagtctcttcttacaattaggaccgagtgccgatcctgcgctctcaaccttggagtcaagtgcccggatggttacaccatgattaccagtggctctgtaggggttcgagattgcaggtacacctttgaggtcagaacatactctctgtctctccccggatgccgccatatttgtaggaaggactatctccaacctcggtgttgtcctggccgctggggcccagactgtatagagtgcccaggtggagcggggtcaccctgcaatggcagaggcagttgtgctgaaggcatggaaggaaatggaacctgctcctgccaagaagggtttggtggaacagcctgtgaaacctgtgctgacgacaacttatttggacccagctgttcatcagtgtgcaactgtgtgcatggggtgtgcaacagtggactagatggcgatggaacctgtgagtgctactctgcgtacactggccccaagtgtgacaagcccatccctgaatgtgcagccttgctctgcccagaaaattccagatgttcgccttccactgaagatgaaaacaaactggaatgcaaatgccttcccaattaccgaggcgatggcaaatactgcgaccccatcaatccatgtttacgaaaaatctgccaccctcatgctcattgtacgtacctgggaccaaatcggcacagttgtacatgccaagaaggctaccgtggggatggccaagtgtgcttgcctgtggacccctgccaaattaactttggaaactgccctacaaagtctacagtgtgcaaatatgatgggcctggacagtctcactgcgagtgtaaggagcattaccagaatttcgtacctggagtggggtgcagtatgactgatatatgtaaatcagataacccgtgtcataggaatgcaaattgcaccaccgtcgcaccaggccgaactgaatgcatttgccagaaaggttacgtgggtgatggcttaacgtgttatggaaacattatggagcgactcagagaattaaatactgaacccagaggaaaatggcaaggaaggctgacctctttcatctcactcctagacaaagcttatgcctggccactgagtaagctgggacccttcacggtgctgttacctacagacaagggactgaaaggattcaatgtaaatgagcttttggtggataataaagctgctcaatactttgtgaaactccacataattgctggtcagatgaacatcgaatatatgaataacacagacatgttctacaccttgactggaaagtcgggggaaatcttcaacagcgataaggacaatcaaataaagcttaaactccatggaggcaaaaagaaggtaaaaattatacaaggggacatcattgcttccaatgggcttctgcacatccttgacagagccatggacaagttagaacccacatttgagagcaacaatgagcaaaccataatgacaatgctacaaccaaggtacagcaagttcagatctttgttagaggaaaccaatttgggacatgccttagatgaggatggagttggtggaccatacaccatttttgttccaaataatgaagcattgaataacatgaaggacggcactctcgattacctcctttctccagagggatctcggaagcttctggaactcgtcagataccacattgtcccatttacccagcttgaagtggccactctcatctccacccctcacatcaggagcatggccaaccagctcatacagttcaacaccaccgacaatggacagattctggcaaatgatgtggcaatggaagaaattgagatcactgccaaaaatggccgaatttacacactgacaggagttctcattcctccctccattgtcccgattctgccccatcgatgtgatgaaacaaagagagagatgaaactgggcacttgtgtgagctgttctctggtgtactggagcagatgtcctgctaactctgagcccacagcactcttcacacacagatgtgtctacagtggcaggtttgggagcctgaagagcggctgtgcccggtactgcaatgccactgtgaagattccaaagtgctgcaaaggcttctatggacctgactgcaaccagtgtccaggaggcttctcaaatccatgctcaggaaatggacagtgtgcagatagcctcggcggcaacgggacatgcatttgtgaggagggcttccaaggctcccagtgtcagttctgctctgatcccaataaatacggacctcggtgtaacaaaaaatgcctgtgcgttcacggaacatgcaataacaggatagacagcgatggggcctgcctcactggcacatgcagagacggctctgccgggagactctgtgataagcagacctcagcctgtgggccctacgtgcagttctgtcacatccacgccacctgtgaatacagcaatgggacagccagttgtatttgcaaagcaggatatgaaggagatggaactctgtgttctgagatggacccttgcacaggactaactccaggaggctgtagccgcaatgcagaatgcatcaaaactggcacgggcacccacacctgcgtgtgtcagcagggttggacagggaatgggagagactgctcggagatcaacaactgcctgctgcccagtgcaggcggctgccacgacaacgcatcctgtttgtatgtgggtcccgggcagaatgagtgtgagtgcaagaaaggatttcgaggaaatgggattgactgtgaaccaataacttcatgcttggaacaaaccgggaaatgtcatccattggcaagctgtcaatctacttcgtctggtgtctggagctgtgtttgtcaagagggctatgaaggagatggctttctgtgctatggaaacgcagcagtggaattgtcatttctctccgaagcagctatatttaaccgatggataaataatgcttctctacaacccacactgtcagccacctcaaacctcactgtcctcgtgccttcccaacaagctactgaggacatggaccaggatgagaaaagcttctggttgtcacagagcaatattccagccctaataaagtaccatatgctactaggcacatacagagtggcagatctgcagaccctgtcttcttctgacatgttggcaacatctttgcagggcaacttccttcacttggcaaaggtggatgggaatatcacaattgaaggggcctccattgtcgatggggacaacgcagccacaaatggagtgatacacatcatcaacaaggtgctggtcccacaaagacgtctaactggctccttaccaaacctgctcatgcggctggaacagatgcctgactattccatcttccggggctacatcattcaatataatctggcgaatgcaattgaggctgccgatgcctacacagtgtttgctccaaacaacaatgccatcgagaattacatcagggagaagaaagtcttgtctctagaggaggacgtcctccggtatcatgtggtcctggaggagaaactcctgaagaatgacctgcacaatggcatgcatcgtgagaccatgctgggtttctcctatttccttagcttctttctccataatgaccagctctatgtaaatgaggctccaataaactacaccaatgtagccactgataagggagtgatccatggcttgggaaaagttctggaaattcagaagaacagatgtgataataatgacactactattatacgaggaagatgtaggacatgctcctcagagctgacctgcccattcggaactaaatctctaggtaatgagaagaggagatgcatctatacctcctatttcatgggaagacgaaccctgtttattgggtgccagccaaaatgtgtgagaaccgtcattacgagagaatgctgtgccggcttctttggcccccaatgccagccctgcccagggaatgcccagaatgtctgctttggtaatggcatctgtttggatggagtgaatggcacaggtgtgtgtgagtgtggggagggcttcagcggcacagcctgcgagacctgcaccgagggcaagtacggcatccactgtgaccaagcatgttcttgtgtccatgggagatgcaaccaaggacccttgggagatggctcctgtgactgtgatgttggctggcgaggagtgcattgtgacaatgcaaccacagaagacaactgcaatgggacatgccataccagcgccaactgcctcaccaactcagatggtacagcttcatgcaagtgtgcagcaggattccaaggaaacgggaccatctgcacagcaatcaatgcctgtgagatcagcaatggaggttgctctgccaaggctgactgtaagagaaccaccccaggaaggcgagtgtgcacgtgcaaagcaggctacacgggtgatggcattgtgtgcctggaaatcaacccgtgtttggagaaccatggtggctgtgacaagaatgcggagtgcacacagacaggacccaaccaggctgcctgtaactgtttgccagcatacactggagatggaaaggtctgcacactcatcaatgtctgcttaactaaaaatggcggctgtagtgaatttgccatctgcaaccacactgggcaagtagaaaggacttgtacttgcaagccaaactacattggagatggatttacctgccgcggcagcatttatcaggagcttcccaagaacccgaaaacttcccagtatttcttccagttgcaggagcatttcgtgaaagatctggtcggcccaggccccttcactgtttttgcacctttatctgcagcctttgatgaggaagctcgggttaaagactgggacaaatacggtttaatgccccaggttcttcggtaccatgtggtcgcctgccaccagctgcttctggaaaacctgaaattgatctcaaatgctacttccctccaaggagagccaatagtcatctccgtctctcagagcacggtgtatataaacaataaggctaagatcatatccagtgatatcatcagtactaatgggattgttcatatcatagacaaattgctatctcccaaaaatttgcttatcactcccaaagacaactctggaagaattctgcaaaatcttacgactttggcaacaaacaatggctacatcaaatttagcaacttaatacaggactcaggtttgctgagtgtcatcaccgatcccatccacaccccagtcactctcttctggcccaccgaccaagccctccatgccctacctgctgaacaacaggacttcctgttcaaccaagacaacaaggacaagctgaaggagtatttgaagtttcatgtgatacgagatgccaaggttttagctgtggatcttcccacatccactgcctggaagaccctgcaaggttcagagctgagtgtgaaatgtggagctggcagggacatcggtgacctctttctgaatggccaaacctgcagaattgtgcagcgggagctcttgtttgacctgggtgtggcctacggcattgactgtctgctgattgatcccaccctggggggccgctgtgacacctttactactttcgatgcctcgggggagtgtgggagctgtgtcaatactcccagctgcccaaggtggagtaaaccaaagggtgtgaagcagaagtgtctctacaacctgcccttcaagaggaacctggaaggctgccgggagcggtgcagcctggtgatacagatccccaggtgctgcaagggctacttcgggcgagactgtcaggcctgccctggaggaccagatgccccgtgtaataaccggggtgtctgccttgatcagtactcggccaccggagagtgtaaatgcaacaccggcttcaatgggacggcgtgtgagatgtgctggccggggagattcgggcctgattgtctgccctgtggctgctcagaccacggacagtgcgatgatggcatcacgggctccgggcagtgcctctgtgaaacggggtggacaggcccctcgtgtgacactcaggcagttttgcctgcagtgtgtacgcctccttgttctgctcatgccacctgtaaggagaacaacacgtgtgagtgtaacctggattatgaaggtgacggaatcacatgcacagttgtggatttctgcaaacaggacaacgggggctgtgcaaaggtggccagatgctcccagaagggcacgaaggtctcctgcagctgccagaagggatacaaaggggacgggcacagctgcacagagatagacccctgtgcagacggccttaacggagggtgtcacgagcacgccacctgtaagatgacaggcccgggcaagcacaagtgtgagtgtaaaagtcactatgtcggagatgggctgaactgtgagccggagcagctgcccattgaccgctgcttacaggacaatgggcagtgccatgcagacgccaaatgtgtcgacctccacttccaggataccactgttggggtgttccatctacgctccccactgggccagtataagctgacctttgacaaagccagagaggcctgtgccaacgaagctgcgaccatggcaacctacaaccagctctcctatgcccagaaggccaagtaccacctgtgctcagcaggctggctggagaccgggcgggttgcctaccccacagccttcgcctcccagaactgtggctctggtgtggttgggatagtggactatggacctagacccaacaagagtgaaatgtgggatgtcttctgctatcggatgaaagatgtgaactgcacctgcaaggtgggctatgtgggagatggcttctcatgcagtgggaacctgctgcaggtcctgatgtccttcccctcactcacaaacttcctgacggaagtgctggcctattccaacagctcagctcgaggccgtgcatttctagaacacctgactgacctgtccatccgcggcaccctctttgtgccacagaacagtgggctgggggagaatgagaccttgtctgggcgggacatcgagcaccacctcgccaatgtcagcatgtttttctacaatgaccttgtcaatggcaccaccctgcaaacgaggctgggaagcaagctgctcatcactgccagccaggacccactccaaccgacggagaccaggtttgttgatggaagagccattctgcagtgggacatctttgcctccaatgggatcattcatgtcatttccaggcctttaaaagcaccccctgcccccgtgaccttgacccacactggcttgggagcagggatcttctttgccatcatcctggtgactggggctgttgccttggctgcttactcctactttcggataaaccggagaacaatcggcttccagcattttgagtcggaagaggacattaatgttgcagctcttggcaagcagcagcctgagaatatctcgaaccccttgtatgagagcacaacctcagctcccccagaaccttcctacgaccccttcacggactctgaagaacggcagcttgagggcaatgaccccttgaggacactgtgagggcctggacgggagatgccagccatcactcactgccacctgggccatcaactgtgaattctcagcaccagttgccttttaggaacgtaaagtcctttaagcactcagaagccatacctcatctctctggctgatctgggggttgtttctgtgggtgagagatgtgttgctgtgcccacccagtacagcttcctcctctgaccctttggctcttcttcctttgtactcttcagctggcacctgctccattctgccctacatgatgggtaactgtgatctttcttccctgttagattgtaagcctccgtctttgtatcccagcccctagcccagtgcctgacacaggaactgtgcacaataaaggtttatggaacagaaacaaagtcaacag

SEQ ID NO: 20641 - DNA, 310 bp, Homo sapiens
  misc_feature 1..310: note = ENST00000549474
  source 1..310: mol_type = unassigned DNA
cagaagaacagatgtgataataatgacactactattatacgaggaagatgtaggacatgctcctcagagctgacctgcccattcggaactaaatctctatagccagttgaggaccgcagcaagaaatcttgtcagagaagagagattccatatccaaaaccatatccagcctggatatattccacctgcctgatttccttttatagttgaagttgcaactaactttctcaaagaaacagatggcagggtaatgagaagaggagatgcatctatacctcctatttcatgggaagacgaaccctgtttattg

SEQ ID NO: 20642 - DNA, 301 bp, Homo sapiens
  misc_feature 1..301: note = ENST00000549798
  source 1..301: mol_type = unassigned DNA
tggctttgagcttcatggcagccagtataaaaaaggattgacatgacctcatagttttatatcgctcacatgatacatatcacttccaaagaagtagcttttctgagcacaaaatactaaaaatcctcaggtgagatttagtaagagggctaagacagcaactggttctctttttcagcaaccacagaagacaactgcaatgggacatgccataccagcgccaactgcctcaccaactcagatggtacagcttcatgcaagtgtgcagcaggattccaaggaaacgggaccatctgcacag

SEQ ID NO: 20643 - DNA, 793 bp, Homo sapiens
  misc_feature 1..793: note = ENST00000548073
  source 1..793: mol_type = unassigned DNA
caagaaagagaggacacttttgttcacccagtggctcaatcaatcagtcaacatctaatgaccacctactgtgtgccaggcacagaggtgcaataggcaaagtgagactttatgggttttatggcctaataggggaatcagacattaaccaagtgatgccacaacacatgaacttgcagctgacccatggccctgtctgtatccctgcaggccaagtaccacctgtgctcagcaggctggctggagaccgggcgggttgcctaccccacagccttcgcctcccagaactgtggctctggtgtggttgggatagtggactatggacctagacccaacaagagtgaaatgtgggatgtcttctgctatcggatgaaagatgtgaactgcacctgcaaggtgggctatgtgggagatggcttctcatgcagtgggaacctgctgcaggtcctgatgtccttcccctcactcacaaacttcctgacggattcactgaggaaaggaaaagtcctcaaactctcccacggcgcaggcagaagacacagcaaaggagcagcaggctgagttggctcacaccatgaatattcacagatgggtgatgccctgggaccttcttcagccacccaggtccctgcacaccagggctggcccctctgatgacttccttcttctccccaggaagtgctggcctattccaacagctcagctcgaggccgtgcatttctagaacacctgactgacctgtccatccgcggcaccctctttgtgccacagaacagtgggctgggggagaatg

SEQ ID NO: 20644 - DNA, 561 bp, Homo sapiens
  misc_feature 1..561: note = ENST00000548579
  source 1..561: mol_type = unassigned DNA
tcaagcagccacgtggaggatgggctgtgacgtggctgtgtcttaaaccataggattcactgaggaaaggaaaagtcctcaaactctcccacggcgcaggcagaagacacagcaaaggagcagcaggctgagttggctcacaccatgaatattcacagatgggtgatgccctgggaccttcttcagccacccaggtccctgcacaccagggctggcccctctgatgacttccttcttctccccaggaagtgctggcctattccaacagctcagctcgaggccgtgcatttctagaacacctgactgacctgtccatccgcggcaccctctttgtgccacagaacagtgggctgggggagaatgagaccttgtctgggcgggacatcgagcaccacctcgccaatgtcagcatgtttttctacaatgaccttgtcaatggcaccaccctgcaaacgaggctgggaagcaagctgctcatcactgccagccaggacccactccaaccgacggagaccaggtttgttgatggaagagccattctgcagtgggacatctttgcct

SEQ ID NO: 20645 - DNA, 499 bp, Homo sapiens
  misc_feature 1..499: note = ENST00000552777
  source 1..499: mol_type = unassigned DNA
gaggacattaatgttgcagctcttggcaagcagcagcctgagaatatctcgaaccccttgtatgagagcacaacctcagctcccccagaaccttcctacgaccccttcacgatgaagaaactgcagccgagttgggatgatttgtcttgggccacccagcttcaagcaggagagactaaaacaggtggccctacccccagcccatcctgcctcccaacacaaggcagcagcacaaacaaacacgcccagcacatacgtgttcacagtgctcagggagagtcatgcctcagaccagtggccaccagaaagattcaactaggactcaacacacagaatgccctgcccccttacaaccctctcttttccaggactctgaagaacggcagcttgagggcaatgaccccttgaggacactgtgagggcctggacgggagatgccagccatcactcactgccacctgggccatcaactgtgaattctcagcaccagttgcctttt

SEQ ID NO: 20646 - DNA, 3227 bp, Homo sapiens
  misc_feature 1..3227: note = ENST00000273183
  source 1..3227: mol_type = unassigned DNA
agaagcccgctcgcccgctgccgagtggcagtcacgactgtgaggtcgccggcgaggtggccgcgggcgcggcggggcggggcagggcgcactctcctccacgcccgcggaagtgccggggaggtgggcagggcggggagggagagggagcgaggctggaggagggcacgtcggcgcctcggcgaggatgggagtccccaggacccggagctgagcagcctggcgcgcggcgggcagggcgcgcaggacagaagcctcgctgttcctccgggagcccaacaccgttcccgcgcggccacgatgatccctccgagcagcccccgcgaggacggcgtggacgggctgcccaaggaggcggtgggcgccgagcaaccgccctctcctgcatccaccagcagccaggaatccaagctccagaaactaaaacgatcactttctttcaagaccaagagtttacggagcaaaagtgctgacaacttcttccagcgaaccaacagcgaagacatgaaactgcaagcacacatggtggctgagatcagccccagctccagcccactccctgctccaggaagcctgacgtccacacccgccagggctggtctgcatccaggtggcaaggctcatgcctttcaggaatacatcttcaagaagcccactttctgtgatgtctgcaaccacatgatagtgggaacaaatgctaagcatggactgcgctgcaaagcctgtaagatgagcatccaccacaagtgcacagatggcctggcaccccagcggtgcatgggcaagctgccaaaggggtttcggcgttactacagctcccccttgctcattcatgaacagtttggctgcattaaagaagttatgcccattgcctgtggcaataaggtggaccctgtctacgagaccctccgcttcggcacctccctggcccagaggacaaagaagggcagctccggcagtggctctgactcacctcacagaacctctacttcagatcttgtggaggttcctgaggaagccaatgggccaggaggcgggtatgacctaaggaaacgcagcaacagcgtgtttacatatccagaaaatggcactgatgatttcagagatccagcgaagaacataaaccaccagggatctctttccaaagacccattacagatgaacacctatgttgccttgtacaaatttgtaccacaggagaatgaagatttggaaatgaggccaggagacataattactcttttagaggattccaatgaagactggtggaaagggaaaattcaagacagaattggcttctttccagccaactttgttcagagactacaacaaaatgagaagatttttagatgtgttagaaccttcattgggtgtaaggaacaggggcagataacactgaaagagaatcagatctgcgtgagttctgaagaagaacaagatggttttatcagagtcctcagtggaaaaaagaaaggcctcatcccccttgatgtactagaaaacatctgattgctggctcctcctccgtttgcagtaggcaagctctgctgcgatgcctctgcctcatctcacactgcgtcaacccaaaggagctgccgcactgacccagccccccaggaaacagtgagacaagaatcaagtatctgagactgtggagtaatagccacaaaacagagggcccactgcacagcatatccaggctgccacaggtggggacgaggctgagagagtcagcaggcagagccagatgccatgcttggcagcagcagtaggactataaaccacagctgtcccccaggatcccactcctttcctgtctgtgtggtgtaagttaacacactggagtgtgctccagtttgcagggtagcccagtgcaaggttcagatccatgtagctaagtattatcctgcttccagacctatgtcaccagtaccaatcagtcagtgtcatcacatttcaggccccaagcaatctctgtgcaaagcatcagaaagacctgcttcccagcccccagcattccagtgctctccaggcttcctctctttgtgattgtgctgtccagagtgtccagcttgttctttctttctcttcagtcctctgagtacatctggtggtgtgcattagatgtgagggctatgttgacatggcatcacctccaaagacctgacctgcctaaagactgatgacaggccatccttcctgctgttctaggtactggcctgggtgacagagcaggacatgagacatagatacagtggggaggagaagtggggaaaggtggagcagagagttcttacttattgaagattatacagccctttcggttatgaagtccctgcttgaaggcaatggacctggggaagagactatcacaaaaagtctccattttcattttacatcctctctattggaggcagcacttttccctcatgctgtcctataggactccactttgaaggttgtgcctacgttgcagggaactaggaacatggaggggaaccaacaacagcatcttagaagaaatgtagccaaattggagtccattcttctttagggcagtatatgaaatcctagcagatgtaaaatggaaaagaatcctaatgcttcttccttcagaaagtagaggaactaggggcccaattagcatcatctaggggaatctctattactctgtacttatactaatgtttacaagaatgcaatatactgtgatgccttcctactcaagcctcctagcattcaaacttccatcctattagtcattaacatggttaaacttcaattcacaatcaccttggaatcaatgtcagtttgatttattttgttacagagcaataaaatcattagaacaatggtttttaaaagacttaagtggatgcatcctatgcatgtaagcattatttcccaaaccaaagcatcattcatctccatttatttcttttgttcccgctcagtgtgaagttgggaactgagaggggatggctgctggtttcacagaagtttggatgccttactcttatcttaaagccagcatccagaatttcctccctctctgatgccacatgcaaaaccaggtgtacgatgtcaagatggattctttgagagccagggtagatcatatgactgcctttctgtaaaattggatgcctagtacaaatgctctttgcctctaattcagtattccatttaataaaaacaatacagtggctggaaaggagcatcagaaa

SEQ ID NO: 20647 - DNA, 1366 bp, Homo sapiens
  misc_feature 1..1366: note = ENST00000457375
  source 1..1366: mol_type = unassigned DNA
aggagggcacgtcggcgcctcggcgaggatgggagtccccaggacccggagctgagcagcctggcgcgcggcgggcagggcgcgcaggacagaagcctcgctgttcctccgggagcccaacaccgttcccgcgcggccacgatgatccctccgagcagcccccgcgaggacggcgtggacgggctgcccaaggaggcggtgggcgccgagcaaccgccctctcctgcatccaccagcagccaggaatccaagctccagaaactaaaacgatcactttctttcaagaccaagagtttacggagcaaaagtgctgacaacttcttccagcgaaccaacagcgaagacatgaaactgcaagcacacatggtggctgagatcagccccagctccagcccactccctgctccaggaagcctgacgtccacacccgccagggctggtctgcatccaggtggcaaggctcatgcctttcaggaatacatcttcaagaagcccactttctgtgatgtctgcaaccacatgatagtggcctgtggcaataaggtggaccctgtctacgagaccctccgcttcggcacctccctggcccagaggacaaagaagggcagctccggcagtggctctgactcacctcacagaacctctacttcagatcttgtggaggttcctgaggaagccaatgggccaggaggcgggtatgacctaaggaaacgcagcaacagcgtgtttacatatccagaaaatggcactgatgatttcagagatccagcgaagaacataaaccaccagggatctctttccaaagacccattacagatgaacacctatgttgccttgtacaaatttgtaccacaggagaatgaagatttggaaatgaggccaggagacataattactcttttagaggattccaatgaagactggtggaaagggaaaattcaagacagaattggcttctttccagccaactttgttcagagactacaacaaaatgagaagatttttagatgtgttagaaccttcattgggtgtaaggaacaggggcagataacactgaaagagaatcagatctgcgtgagttctgaagaagaacaagatggttttatcagagtcctcagtggaaaaaagaaaggcctcatcccccttgatgtactagaaaacatctgattgctggctcctcctccgtttgcagtaggcaagctctgctgcgatgcctctgcctcatctcacactgcgtcaacccaaaggagctgccgcactgacccagccccccaggaaacagtgagacaagaatcaagtatctgagactgtggagtaatagccacaaaacagagggcccactgcacagcatatccaggctgccaca

SEQ ID NO: 20648 - DNA, 605 bp, Homo sapiens
  misc_feature 1..605: note = ENST00000427486
  source 1..605: mol_type = unassigned DNA
aggatgggagtccccaggacccggagctgagcagcctggcgcgcggcgggcagggcgcgcaggacagaagcctcgctgttcctccgggagcccaacaccgttcccgcgcggccacgatgatccctccgagcagcccccgcgaggacggcgtggacgggctgcccaaggaggcggtgggcgccgagcaaccgccctctcctgcatccaccagcagccaggaatccaaggaacaaatgctaagcatggactgcgctgcaaagcctgtaagatgagcatccaccacaagtgcacagatggcctggcaccccagcggtgcatgggcaagctgccaaaggggtttcggcgttactacagctcccccttgctcattcatgaacagtttggctgcattaaagaagttatgcccattgcctgtggcaataaggtggaccctgtctacgagaccctccgcttcggcacctccctggcccagaggacaaagaagggcagctccggcagtggctctgactcacctcacagaacctctacttcagatcttgtggaggttcctgaggaagccaatgggccaggaggcgggtatgacctaaggaaacgcagcaacagcg

SEQ ID NO: 20649 - DNA, 827 bp, Homo sapiens
  misc_feature 1..827: note = ENST00000434649
  source 1..827: mol_type = unassigned DNA
gcgggcagggcgcgcaggacagaagcctcgctgttcctccgggagcccaacaccgttcccgcgcggccacgatgatccctccgagcagcccccgcgaggacggcgtggacgggctgcccaaggaggcggtgggcgccgagcaaccgccctctcctgcatccaccagcagccaggaatccaagaccaagagtttacggagcaaaagtgctgacaacttcttccagcgaaccaacagcgaagacatgaaactgcaagcacacatggtggctgagatcagccccagctccagcccactccctgctccaggaagcctgacgtccacacccgccagggctggtctgcatccaggtggcaaggctcatgcctttcaggaatacatcttcaagaagcccactttctgtgatgtctgcaaccacatgatagtggcctgtggcaataaggtggaccctgtctacgagaccctccgcttcggcacctccctggcccagaggacaaagaagggcagctccggcagtggctctgactcacctcacagaacctctacttcagatcttgtggaggttcctgaggaagccaatgggccaggaggcgggtatgacctaaggaaacgcagcaacagcgtgtttacatatccagaaaatggcactgatgatttcagagatccagcgaagaacataaaccaccagggatctctttccaaagacccattacagatgaacacctatgttgccttgtacaaatttgtaccacaggagaatgaagatttggaaatgaggccaggagacataattactcttttagaggattccaatgaagactggtggaaa

SEQ ID NO: 20650 - DNA, 1230 bp, Homo sapiens
  misc_feature 1..1230: note = ENST00000476388
  source 1..1230: mol_type = unassigned DNA
aggacggcgtggacgggctgcccaaggaggcggtgggcgccgagcaaccgccctctcctgcatccaccagcagccaggaatccaagccctatggatgacgtgaactgagtggttcttgacccagaaaaccaaatgaactcttgaggaatcatgtccatcaaaagtttagttggcctgtagtgctgagagcaacacaaatgattctgcacagtgacactgacttgaagatatcttgtatccactccatccatccacgtgcatcttggggaaaaatagaggaggcaagtcatgcattaaattatcaagctccagaaactaaaacgatcactttctttcaagaccaagagtttacggagcaaaagtgctgacaacttcttccagcgaaccaacagcgaagacatgaaactgcaagcacacatggtggctgagatcagccccagctccagcccactccctgctccaggaagcctgacgtccacacccgccagggctggtctgcatccaggtggcaaggctcatgcctttcaggaatacatcttcaagaagcccactttctgtgatgtctgcaaccacatgatagtgggaacaaatgctaagcatggactgcgctgcaaagcctgtaagatgagcatccaccacaagtgcacagatggcctggcaccccagcggtgcatgggcaagctgccaaaggggtttcggcgttactacagctcccccttgctcattcatgaacagtttggctgcattaaagaagttatgcccattgttgcctcctactgcaaactttgtgtctcaagtctttgtaccttggtgagcacagcctcccagtagaggagataaagctgatccctgcaagaacctggaaatcagagaggaataacgaaagaggaaattcaatcaggaagaattcgggagcagagtactagctgcctgtggcaataaggtggaccctgtctacgagaccctccgcttcggcacctccctggcccagaggacaaagaagggcagctccggcagtggctctgactcacctcacagaacctctacttcagatcttgtggaggttcctgaggaagccaatgggccaggaggcgggtatgacctaaggaaacgcagcaacagcgtgtttacatatccagaaaatggcactgatgatttcagagatccagcgaagaacataaaccaccagggatctctttccaaagacccattacagatgaacacctatgt

SEQ ID NO: 20651 - DNA, 476 bp, Homo sapiens
  misc_feature 1..476: note = ENST00000486143
  source 1..476: mol_type = unassigned DNA
gctgcccaaggaggcggtgggcgccgagcaaccgccctctcctgcatccaccagcagccaggaatccaagctccagaaactaaaacgatcactttctttcaagaccaagagtttacggagcaaaagtgctgacaacttcttccagcgaaccaacagcgaagacatgaaactgcaagcacacatggtggctgagatcagccccagctccagcccactccctgctccaggaagcctgacgtccacacccgccagggctggtctgcatccaggtggcaaggctcatgcctttcaggaatacatcttcaagaagcccactttctgtgatgtctgcaaccacatgatagtggatgcttcatatatacagattatcctggtaaataattggggatacacataaaaacacctgaaccaaagcatatacaaagtactagggaaagccacaagtggaaacaatagttctacctcaggaggaagag

SEQ ID NO: 20652 - DNA, 715 bp, Homo sapiens
  misc_feature 1..715: note = ENST00000473452
  source 1..715: mol_type = unassigned DNA
ccgcttcggcacctccctggcccagaggacaaagaagggcagctccggcagtggctctgactcacctcacagaacctctacttcagatcttgtggaggttcctgaggaagccaatgggccaggaggcgggtatgacctaaggaaacgcagcaacagcgtgtttacatatccagaaaatggcactgatgatttcagagatccagcgaagaacataaaccaccagggatctctttccaaagacccattacagatgaacacctatgttgccttgtacaaatttgtaccacaggagaatgaagatttggaaatgaggtaaaaaccttctgtaaagaaaaaaaagagtaaaattttaaagtcagtatttctccatgtgaaaaagtaagtccatctgtgcccctcctaatgctttatagctgtgattctcaaactttagcatgtatctaatgacctgcaaggctggttaacacacaggccctgtccccagagtttttgattcatcagatctgaggcagggcctcagaagttgcattcctaaggagttcccaggtggcactgacaatgctgtccaaggaacacactttgggaagcaccactttagtacatgctcaacagaactgctaatgggagttttcatgaaggttgaacgttaaatgcacttggcatctggtggggcctaatagggaatcaaaaaatatatttaatcaaatatcagata

SEQ ID NO: 20653 - DNA, 431 bp, Homo sapiens
  misc_feature 1..431: note = ENST00000465064
  source 1..431: mol_type = unassigned DNA
attactcttttagaggattccaatgaagactggtggaaagggaaaattcaagacagaattggcttctttccagccaactttgttcagagactacaacaaaatgagaagatttttagatgtgttagaaccttcattgggtgtaaggaacaggggcagataacactgaaagagaatcaggtgagtaaaccacacaaacacattccagatatgagccaaatagggtgtcattttaataaacttaataatatgtataaatctgaatgagtggggtcacattcaaagtattcactttgagaaaagatatacttactccaatgatgtcagtgttgtaggagctaaacatgcaaactaaaattttaggaatctcacttggtgatacctgttcataaacgaaacgtgatagtggcaggcgacgacatctcgtcccccat

SEQ ID NO: 20654 - DNA, 3362 bp, Homo sapiens
  misc_feature 1..3362: note = ENST00000333461
  source 1..3362: mol_type = unassigned DNA
atggggggcgggcgcagcggacggcggagccggctggacacggacagctccttggctccctccctcggctcatccccgcggccccacttccctcctccccgcgctgcgagcagcatcctctgcagaccctcggtcctcgcgcccggggtcgtcccgctcctgcggctcagcgtggtggcctcccctcgcccgccaccccggcaactttctctgcccgctcccgcgggttgggggctgccgtgccgggggctaactgggggcagcctctggagaacggcttcagagtcccggagacgcccgccacccgcagcctgcccgcggtgggcctgccgtcggatctcggcaccctctcctcccctctccccgaaccatgaccgagatgagcgagaaggagaacgaaccggatgacgcggccacccacagccccccagggaccgtctccgccctccaggaaaccaagctccagcgattcaagcgctccctctccctcaagaccatcctccgaagtaagagcttggagaacttcttccttcgctcgggctctgagctcaagtgccccaccgaggtgctgctgacgcccccaaccccactgccccctccctccccaccacccacagcctcggacaggggcctggctaccccatccccctccccatgcccagtcccacgccccctggcagcgctcaaaccagtgaggctgcacagcttccaggaacatgtcttcaagcgagctagcccttgtgagctgtgccaccagctcatcgtaggaaactccaaacagggcttgcgatgtaagatgtgcaaagtcagcgtccacctctggtgctctgaggagatctcccaccagcaatgcccaggcaagacgtccacctccttccgccgcaacttcagttcccctctcctggtgcatgagccgccaccagtctgtgccacaagcaaagagtccccacccactggggacagtgggaaggtggaccctgtctacgagaccctgcgctatggcacctccctggcactgatgaaccgctccagtttcagcagcacctctgagtccccgacaaggagcctgagtgagcgggatgagctgaccgaggatggggaaggcagcatccgcagctctgaggaggggcctggtgacagtgcatctccagtattcacagccccagcagagagtgaagggccaggaccagaggagaagagtcctggacagcagctccccaaagccaccctgcggaaggatgtggggcccatgtactcctacgttgcactctacaagtttctgccccaggagaacaatgatctggctctgcagcctggagatcggatcatgctggtggatgactctaacgaggactggtggaagggcaagatcggcgaccgggttggcttcttcccagctaattttgtgcaacgggtgaggccaggcgagaatgtttggcgctgctgccaacccttctccgggaacaaggaacagggttacatgagcctcaaggagaaccagatctgcgtgggcgtgggcagaagcaaggatgctgacggcttcatccgcgtcagcagtggcaagaagcggggcctggtgccagtcgacgccctgactgagatctgagaggagccaagggaacccagatgacacccttgcccatgcctggaccttgcttctggccagggaggggatcaggcccccttgtccactccatacccttcctccctctgtccctctcctaggtgccacttaccgtggcttaggagccttttgtactggggaagattttatttcttgggtggggtgccctgagtgggttgatcctctgggacttggcggggatggggtggggtgggagggaatgaggaagctacaggtaggtccacccaacgcccaggcaccccagtctacttgctgggctgagtccagccctggggaagattcctggggaatttatttgctgcttctcccagccttcccctgcccacaccacctgcgcatgcctggcacacccctctccccacagagcctctgcttgggtctatgtgtgtgtgaccgtgcatctgctcctttgcaagtggggtcttgggagcaggcctttttgtgtcctcggccctccacccttggtggggaggggacccaggaccataggaaggtcctgagtccacctcctggtctccacctctgtcattccgtcaattctcaggaaagttttgcaggaatctctcccgttacttgaaacctgggcggacagatgaggggaaggctgaggtccctggaaggtgtaacaaatcagagactatctgttcaagtagaaaacccaagagctggccaggtgtggtggctcatgcctgtaatcccagcactttgggaggctgaggtgggcagatcacctgaggtcaggagttcaagaccagcctggccaacatggtgaaaccccgtctctactaaaagtacgaaacttagccaggcatgatgggggtctgcctgtaatgccagctactccagaggctgaggcaagagaatcacttgaacccgggaggcggaggtttcagtgagccgagattgcaccattgcaccccagcctgggcaacagagcgagactccgtctcaaaaaaaaaaaaagaaagaaagaaaaggaaacccaagagctgcctggacacacggaaacccaactgagaacaaaatcctggcccgtgcttggtcaaagcaaacccatttcactgtcaggacccccggtcacacaggaaccacccgccaggggagcctgtgactgtcagttcctgtcccaggctttgcccggccgccccaggaacccaaccctctgggctgacctttctcctgcttctctccaggctctgcaggggacagggcaggtgctgcaggagcccctttgctggctttatctgctcccttgttctggacacagagccctgggaaaaagagggggtggaagacagacaaggaaggtggaatgttctgttttggccaccaggaaatggggtggggtgggcatacacagagaggacccctctcttaatacagctgcttttctcggtgccaacctccctcccccaagctcagatcctcctcttatgcccttgattgtgccagcccatgccacccccatcctgggcacagttacaccctcccatgcagtgggagaaacacagaccctcgtacccaaaggcccctgccccacttctcccccacaaagcggggtctcaagccacactgccctgtttgctgccatgaggcccccccccccagcaatatcccaggggcgggcccaatgcccactgtacatgaggctgcatgatgggtctggggccttgctgattccccagacccctaattaaatgtttcttgtcccagccca

SEQ ID NO: 20655 - DNA, 2251 bp, Homo sapiens
  misc_feature 1..2251: note = ENST00000584501
  source 1..2251: mol_type = unassigned DNA
ctttctctgcccgctcccgcgggttgggggctgccgtgccgggggctaactgggggcagcctctggagaacggcttcagagtcccggagacgcccgccacccgcagcctgcccgcggtgggcctgccgtcggatctcggcaccctctcctcccctctccccgaaccatgaccgagatgagcgagaaggagaacgaaccggatgacgcggccacccacagccccccagggaccgtctccgccctccaggaaaccaagctccagcgattcaagcgctccctctccctcaagaccatcctccgaagtaagagcttggagaacttcttccttcgctcgggctctgagctcaagtgccccaccgaggaaactccaaacagggcttgcgatgtaagatgtgcaaagtcagcgtccacctctggtgctctgaggagatctcccaccagcaatgcccaggcaagacgtccacctccttccgccgcaacttcagttcccctctcctggtgcatgagccgccaccagtctgtgccacaagcaaagagtccccacccactggggacagtgggaaggtggaccctgtctacgagaccctgcgctatggcacctccctggcactgatgaaccgctccagtttcagcagcacctctgagtccccgacaaggagcctgagtgagcgggatgagctgaccgaggatggggaaggcagcatccgcagctctgaggaggggcctggtgacagtgcatctccagtattcacagccccagcagagagtgaagggccaggaccagaggagaagagtcctggacagcagctccccaaagccaccctgcggaaggatgtggggcccatgtactcctacgttgcactctacaagtttctgccccaggagaacaatgatctggctctgcagcctggagatcggatcatgctggtggatgactctaacgaggactggtggaagggcaagatcggcgaccgggttggcttcttcccagctaattttgtgcaacgggtgaggccaggcgagaatgtttggcgctgctgccaacccttctccgggaacaaggaacagggttacatgagcctcaaggagaaccagatctgcgtgggcgtgggcagaagcaaggatgctgacggcttcatccgcgtcagcagtggcaagaagcggggcctggtgccagtcgacgccctgactgagatctgagaggagccaagggaacccagatgacacccttgcccatgcctggaccttgcttctggccagggaggggatcaggcccccttgtccactccatacccttcctccctctgtccctctcctaggtgccacttaccgtggcttaggagccttttgtactggggaagattttatttcttgggtggggtgccctgagtgggttgatcctctgggacttggcggggatggggtggggtgggagggaatgaggaagctacaggtaggtccacccaacgcccaggcaccccagtctacttgctgggctgagtccagccctggggaagattcctggggaatttatttgctgcttctcccagccttcccctgcccacaccacctgcgcatgcctggcacacccctctccccacagagcctctgcttgggtctatgtgtgtgtgaccgtgcatctgctcctttgcaagtggggtcttgggagcaggcctttttgtgtcctcggccctccacccttggtggggaggggacccaggaccataggaaggtcctgagtccacctcctggtctccacctctgtcattccgtcaattctcaggaaagttttgcaggaatctctcccgttacttgaaacctgggcggacagatgaggggaaggctgaggtccctggaaggtgtaacaaatcagagactatctgttcaagtagaaaacccaagagctggccaggtgtggtggctcatgcctgtaatcccagcactttgggaggctgaggtgggcagatcacctgaggtcaggagttcaagaccagcctggccaacatggtgaaaccccgtctctactaaaagtacgaaacttagccaggcatgatgggggtctgcctgtaatgccagctactccagaggctgaggcaagagaatcacttgaacccgggaggcggaggtttcagtgagccgagattgcaccattgcaccccagcctgggcaacagagcgagactccgtctcaaaaaaaaaaaaagaaagaaagaaaaggaaacccaagagctgcctggacacacggaaaccca

SEQ ID NO: 20656 - DNA, 4450 bp, Homo sapiens
  misc_feature 1..4450: note = ENST00000426455
  source 1..4450: mol_type = unassigned DNA
gtggcgatccggctcaaaaggcggggcctgggtggaacctagcctatggcaattgagaagccagattaaaggggttactagcagtctggtccaaaacccgcccaatggagtaggagattgagggtagcgggggtgggacctgggtgggggcggggctaaagcgggccgcccgcgtgcccaagcccacgtgagagggcaggacgcctgagagcttgaggccacacgaggctgtggagcggcgtgactcaaacgtggcgcgcatcagctcgcacacttccaaacctcgcgatagctactggccctgggcgagccgttgggattgcgcttgcgcacagcgtgtcttctggatcgccatacctaccctgtggtcctcatcttcctggcctcatagctcctcctctccaagcatgtcttccccgttgcaaagagctgtgggagataccaagagggccttgtctgcatcttctagttcctctgccagtctaccctttgatgacagggactcaaaccatacctcagaggggaatggcgactctttgttagctgatgaagacactgactttgaagacagcttgaatcgcaatgtgaagaagagagcagcaaaacgaccaccgaaaacaacaccggtggcaaaacatccaaagaaagggtcccgagtggtacatcgtcatagccggaaacagtcagagccaccagccaatgatcttttcaatgctgtgaaagccgccaaaagtgacatgcagtctttggtagatgagtggctggatagctacaagcaagaccaggatgcaggatttctggagcttgttaactttttcatccaatcttgcggatgtaaaggcattgtgacccctgagatgttcaagaagatgtccaactcagagatcatccagcacctaacagagcagtttaatgaggactcgggggactaccctctcatagctccaggtccatcctggaagaagttccagggcagcttctgtgaatttgtgaggacattggtctgtcagtgccagtacagcctcctctatgatggcttccctatggacgacctcatctccctgctcactggcctctcagactcacaagtccgcgccttccgtcacactagcaccctggctgctatgaaactgatgacctccctggtaaaagttgccctccaactgagtgtgcaccaagataacaatcagcgtcagtatgaggctgaaagaaacaaggggccagggcagagggcacctgagcggctggagagcctgttggagaaacgcaaagagctccaagagcatcaagaggagattgaggggatgatgaatgccctcttcaggggtgtctttgttcatcggtacagggatgtccttcctgagatccgtgctatctgcattgaggaaattgggtgttggatgcaaagctacagcacgtctttcctcaccgacagctatttaaaatatattggttggactctgcatgataagcaccgagaagtccgcctgaagtgtgtgaaggccctgaaagggctgtacggtaaccgggacctgaccacacgcctggagctcttcaccagccgcttcaaggaccggatggtttccatggtcatggacagagagtatgatgtggcagtggaggctgtcagattactgatacttatccttaagaacatggaaggggtgctgacggacgcggattgtgagagcgtctacccagttgtgtatgcctctcatcgaggcctggcctctgccgcaggcgaatttctgtactggaaactcttctaccctgagtgcgagataagaatgatgggtggaagagagcaacgccagagcccaggcgcccagaggactttcttccagcttctgctgtccttctttgtggagagcgagctccatgaccacgctgcttacttagtagacagtctgtgggactgtgcaggggctcggctgaaggactgggagggtctgacaagcctgctgctggagaaggaccagaacctgggtgatgtgcaggagagcacactgatagaaatccttgtgtccagtgcccggcaagcttcagaggggcacccgcctgtgggccgggtcactgggaggaagggcttaacctctaaggagcgcaagacccaagccgatgacagggtgaagttgactgagcacctcatccccctgctgccccagctcctggccaagttctcagctgatgcagagaaggtcactcccctgctccagcttctcagctgctttgacctccacatctactgcactgggcgcttggagaagcacctggagctgttcctgcagcaactccaggaggtggtggtgaagcatgcagagccagcggtgcttgaggctggggcgcatgccctctacctgctctgtaatcccgaattcactttcttcagccgggcggactttgcccgcagccagctagtagatttgctgactgaccgcttccagcaggagcttgaagagctgttacagtcgtccttcctagatgaggatgaggtatataatctggcagccactctgaaacgcctctctgccttctacaacactcatgacctgactcgctgggagctctatgagccatgttgccaactcctgcagaaggctgtggacacaggagaggttcctcaccaggttatcctgccagccttgactcttgtctatttttccattctctggacactaacccacatttctaaatcagatgcttcccagaagcagctgtcgagtttgagggacagaatggtggccttctgtgaactctgccagagttgcctctcagatgtggatactgagatccaggagcaggcttttgtcttattaagtgatctacttctcatctttagccctcagatgattgttgggggccgtgatttccttaggccacttgtcttttttcctgaagctactctccagtctgagctagccagcttcctcatggaccacgtcttcatccagccgggagacctgggcagtggtgattcccaggaggatcatttacagatagagcggctacaccagcggcgccgcctcctagccgggttctgcaagctgttgctttatggggtgctggagatggatgcagcctcagatgttttcaaacactacaacaagttctacaatgactatggtgacattatcaaggaaacattaactagagcaaggcagattgaccgaagtcattgttcccgaatcctgctgctgagcctcaagcagctgtacacagaactgctgcaggagcatgggccccagggcctgaatgagcttcctgccttcatcgagatgagggacctggcccggaggtttgccttgagttttggaccccagcagctgcagaaccgtgacctcgtggtcatgctacacaaggaaggcatccagttctccttgtctgagcttcctccagctggctcctccaatcagcctccaaatctggcattcctggagctcctttcagagttttccccccgactcttccatcaggacaagcagcttttactgtcctatctagaaaagtgcctgcagcatgtctcccaggcacctggccatccctggggcccagtcaccacctactgccactccctcagccctgtggagaacacagcagagaccagccctcaggtcctccccagctccaagaggaggcgcgttgaagggcctgccaagcctaacagagaggacgtctcctcgtcccaggaagaaagtctgcagctgaacagcatcccgcccacgcccaccctcacctccacagctgtgaagagcaggcagcccctgtgggggttgaaagagatggaggaagaagatggctcagagttggattttgcccagggtcagcccgtcgcaggcaccgagaggtcaaggttcttgggtccacaatatttccagactccacacaacccttcaggtcctggcctgggcaaccagctgatgcgactcagccttatggaagaggacgaggaagaagagttagaaatccaggatgagtcaaatgaagaacggcaggatacagacatgcaagcaagtagctactcttccaccagtgagcgcgggctggacctcttagattctacagagctggatattgaggatttctgacaggactctgggcccctccccagctccactccctacctcaagaatgtgaccatttggaaaaggcaaagagaaaaggagcaaaatgaagcattcccccaggcttcagccctgggctctgaggggaaagagttgggcattgtttttctaacctaacctttccctctggggtagagaagccgagagaccctgtcctccctaatgcactgtggcccagtccccttgcctttttcctgttctgtttggagtggagaagggcagcacctctgtgtttaatggaaatagcccatagtctcctggatttttggaacatctttctcagcctattttgtgtcctaatgattcgctcaataaacatgtttgaatcc

SEQ ID NO: 20657 - DNA, 4163 bp, Homo sapiens
  misc_feature 1..4163: note = ENST00000394018
  source 1..4163: mol_type = unassigned DNA
agcccacgtgagagggcaggacgcctgagagcttgaggccacacgaggctgtggagcggcgtgactcaaacgtggcgcgcatcagctcgcacacttccaaacctcgcgatagctactggccctgggcgagccgttgggattgcgcttgcgcacagcgtgtcttgtacgttcccgcgcttttctggaatctttcgcccccggaagggcagcggcgggcgcctgtgtggaagctggatcgccatacctaccctgtggtcctcatcttcctggcctcatagctcctcctctccaagcatgtcttccccgttgcaaagagctgtgggagataccaagagggccttgtctgcatcttctagttcctctgccagtctaccctttgatgacagggactcaaaccatacctcagaggggaatggcgactctttgttagctgatgaagacactgactttgaagacagcttgaatcgcaatgtgaagaagagagcagcaaaacgaccaccgaaaacaacaccggtggcaaaacatccaaagaaagggtcccgagtggtacatcgtcatagccggaaacagtcagagccaccagccaatgatcttttcaatgctgtgaaagccgccaaaagtgacatgcaggactcgggggactaccctctcatagctccaggtccatcctggaagaagttccagggcagcttctgtgaatttgtgaggacattggtctgtcagtgccagtacagcctcctctatgatggcttccctatggacgacctcatctccctgctcactggcctctcagactcacaagtccgcgccttccgtcacactagcaccctggctgctatgaaactgatgacctccctggtaaaagttgccctccaactgagtgtgcaccaagataacaatcagcgtcagtatgaggctgaaagaaacaaggggccagggcagagggcacctgagcggctggagagcctgttggagaaacgcaaagagctccaagagcatcaagaggagattgaggggatgatgaatgccctcttcaggggtgtctttgttcatcggtacagggatgtccttcctgagatccgtgctatctgcattgaggaaattgggtgttggatgcaaagctacagcacgtctttcctcaccgacagctatttaaaatatattggttggactctgcatgataagcaccgagaagtccgcctgaagtgtgtgaaggccctgaaagggctgtacggtaaccgggacctgaccacacgcctggagctcttcaccagccgcttcaaggaccggatggtttccatggtcatggacagagagtatgatgtggcagtggaggctgtcagattactgatacttatccttaagaacatggaaggggtgctgacggacgcggattgtgagagcgtctacccagttgtgtatgcctctcatcgaggcctggcctctgccgcaggcgaatttctgtactggaaactcttctaccctgagtgcgagataagaatgatgggtggaagagagcaacgccagagcccaggcgcccagaggactttcttccagcttctgctgtccttctttgtggagagcgagctccatgaccacgctgcttacttagtagacagtctgtgggactgtgcaggggctcggctgaaggactgggagggtctgacaagcctgctgctggagaaggaccagaacctgggtgatgtgcaggagagcacactgatagaaatccttgtgtccagtgcccggcaagcttcagaggggcacccgcctgtgggccgggtcactgggaggaagggcttaacctctaaggagcgcaagacccaagccgatgacagggtgaagttgactgagcacctcatccccctgctgccccagctcctggccaagttctcagctgatgcagagaaggtcactcccctgctccagcttctcagctgctttgacctccacatctactgcactgggcgcttggagaagcacctggagctgttcctgcagcaactccaggaggtggtggtgaagcatgcagagccagcggtgcttgaggctggggcgcatgccctctacctgctctgtaatcccgaattcactttcttcagccgggcggactttgcccgcagccagctagtagatttgctgactgaccgcttccagcaggagcttgaagagctgttacagtcgtccttcctagatgaggatgaggtatataatctggcagccactctgaaacgcctctctgccttctacaacactcatgacctgactcgctgggagctctatgagccatgttgccaactcctgcagaaggctgtggacacaggagaggttcctcaccaggttatcctgccagccttgactcttgtctatttttccattctctggacactaacccacatttctaaatcagatgcttcccagaagcagctgtcgagtttgagggacagaatggtggccttctgtgaactctgccagagttgcctctcagatgtggatactgagatccaggagcaggcttttgtcttattaagtgatctacttctcatctttagccctcagatgattgttgggggccgtgatttccttaggccacttgtcttttttcctgaagctactctccagtctgagctagccagcttcctcatggaccacgtcttcatccagccgggagacctgggcagtggtgattcccaggaggatcatttacagatagagcggctacaccagcggcgccgcctcctagccgggttctgcaagctgttgctttatggggtgctggagatggatgcagcctcagatgttttcaaacactacaacaagttctacaatgactatggtgacattatcaaggaaacattaactagagcaaggcagattgaccgaagtcattgttcccgaatcctgctgctgagcctcaagcagctgtacacagaactgctgcaggagcatgggccccagggcctgaatgagcttcctgccttcatcgagatgagggacctggcccggaggtttgccttgagttttggaccccagcagctgcagaaccgtgacctcgtggtcatgctacacaaggaaggcatccagttctccttgtctgagcttcctccagctggctcctccaatcagcctccaaatctggcattcctggagctcctttcagagttttccccccgactcttccatcaggacaagcagcttttactgtcctatctagaaaagtgcctgcagcatgtctcccaggcacctggccatccctggggcccagtcaccacctactgccactccctcagccctgtggagaacacagcagagaccagccctcaggtcctccccagctccaagaggaggcgcgttgaagggcctgccaagcctaacagagaggacgtctcctcgtcccaggaagaaagtctgcagctgaacagcatcccgcccacgcccaccctcacctccacagctgtgaagagcaggcagcccctgtgggggttgaaagagatggaggaagaagatggctcagagttggattttgcccagggtcagcccgtcgcaggcaccgagaggtcaaggttcttgggtccacaatatttccagactccacacaacccttcaggtcctggcctgggcaaccagctgatgcgactcagccttatggaagaggacgaggaagaagagttagaaatccaggatgagtcaaatgaagaacggcaggatacagacatgcaagcaagtagctactcttccaccagtgagcgcgggctggacctcttagattctacagagctggatattgaggatttctgacaggactctgggcccctccccagctccactccctacctcaagaatgtgaccatttggaaaaggcaaagagaaaaggagcaaaatgaagcattcccccaggcttcagccctgggctctgaggggaaagagttgggcattgtttttctaacctaacctttccctctggggtagagaagccgagagaccctgtcctccctaatgcactgtggcccagtccccttgcctttttcctgttctgtttggagtggagaagggcagcacctctgtgtttaatggaaatagcccatagtctcctggatttttggaacatctttctcagcctattttgtgtcctaatgattcgctcaataaacatgtttgaatcc

SEQ ID NO: 20658 - DNA, 605 bp, Homo sapiens
  misc_feature 1..605: note = ENST00000416412
  source 1..605: mol_type = unassigned DNA
gggcgagccgttgggattgcgcttgcgcacagcgtgtcttgtacgttcccgcgcttttctggaatctttcgcccccggaagggcagcggcgggcgcctgtgtggaagctggatcgccatacctaccctgtggtcctcatcttcctggcctcatagctcctcctctccaagcatgtcttccccgttgcaaagagctgtgggagataccaagagggccttgtctgcatcttctagttcctctgccagtctaccctttgatgacagggactcaaaccatacctcagaggggaatggcgactctttgttagctgatgaagacactgactttgaagacagcttgaatcgcaatgtgaagaagagagcagcaaaacgaccaccgaaaacaacaccggtggcaaaacatccaaagaaagggtcccgagtggtacatcgtcatagccggaaacagtcagagccaccagccaatgatcttttcaatgctgtgaaagccgccaaaagtgacatgcagtctttggtagatgagtggctggatagctacaagcaagaccaggatgcaggatttctggagcttgttaactttttcatccaatcttgcggatgtaaagg

SEQ ID NO: 20659 - DNA, 4198 bp, Homo sapiens
  misc_feature 1..4198: note = ENST00000317296
  source 1..4198: mol_type = unassigned DNA
gcgcttttctggaatctttcgcccccggaagggcagcggcgggcgcctgtgtggaaggtggggtggccagagacacccgagggacctgagctggatcgccatacctaccctgtggtcctcatcttcctggcctcatagctcctcctctccaagcatgtcttccccgttgcaaagagctgtgggagataccaagagggccttgtctgcatcttctagttcctctgccagtctaccctttgatgacagggactcaaaccatacctcagaggggaatggcgactctttgttagctgatgaagacactgactttgaagacagcttgaatcgcaatgtgaagaagagagcagcaaaacgaccaccgaaaacaacaccggtggcaaaacatccaaagaaagggtcccgagtggtacatcgtcatagccggaaacagtcagagccaccagccaatgatcttttcaatgctgtgaaagccgccaaaagtgacatgcagtctttggtagatgagtggctggatagctacaagcaagaccaggatgcaggatttctggagcttgttaactttttcatccaatcttgcggatgtaaaggcattgtgacccctgagatgttcaagaagatgtccaactcagagatcatccagcacctaacagagcagtttaatgaggactcgggggactaccctctcatagctccaggtccatcctggaagaagttccagggcagcttctgtgaatttgtgaggacattggtctgtcagtgccagtacagcctcctctatgatggcttccctatggacgacctcatctccctgctcactggcctctcagactcacaagtccgcgccttccgtcacactagcaccctggctgctatgaaactgatgacctccctggtaaaagttgccctccaactgagtgtgcaccaagataacaatcagcgtcagtatgaggctgaaagaaacaaggggccagggcagagggcacctgagcggctggagagcctgttggagaaacgcaaagagctccaagagcatcaagaggagattgaggggatgatgaatgccctcttcaggggtgtctttgttcatcggtacagggatgtccttcctgagatccgtgctatctgcattgaggaaattgggtgttggatgcaaagctacagcacgtctttcctcaccgacagctatttaaaatatattggttggactctgcatgataagcaccgagaagtccgcctgaagtgtgtgaaggccctgaaagggctgtacggtaaccgggacctgaccacacgcctggagctcttcaccagccgcttcaaggaccggatggtttccatggtcatggacagagagtatgatgtggcagtggaggctgtcagattactgatacttatccttaagaacatggaaggggtgctgacggacgcggattgtgagagcgtctacccagttgtgtatgcctctcatcgaggcctggcctctgccgcaggcgaatttctgtactggaaactcttctaccctgagtgcgagataagaatgatgggtggaagagagcaacgccagagcccaggcgcccagaggactttcttccagcttctgctgtccttctttgtggagagcgagctccatgaccacgctgcttacttagtagacagtctgtgggactgtgcaggggctcggctgaaggactgggagggtctgacaagcctgctgctggagaaggaccagaacctgggtgatgtgcaggagagcacactgatagaaatccttgtgtccagtgcccggcaagcttcagaggggcacccgcctgtgggccgggtcactgggaggaagggcttaacctctaaggagcgcaagacccaagccgatgacagggtgaagttgactgagcacctcatccccctgctgccccagctcctggccaagttctcagctgatgcagagaaggtcactcccctgctccagcttctcagctgctttgacctccacatctactgcactgggcgcttggagaagcacctggagctgttcctgcagcaactccaggaggtggtggtgaagcatgcagagccagcggtgcttgaggctggggcgcatgccctctacctgctctgtaatcccgaattcactttcttcagccgggcggactttgcccgcagccagctagtagatttgctgactgaccgcttccagcaggagcttgaagagctgttacagtcgtccttcctagatgaggatgaggtatataatctggcagccactctgaaacgcctctctgccttctacaacactcatgacctgactcgctgggagctctatgagccatgttgccaactcctgcagaaggctgtggacacaggagaggttcctcaccaggttatcctgccagccttgactcttgtctatttttccattctctggacactaacccacatttctaaatcagatgcttcccagaagcagctgtcgagtttgagggacagaatggtggccttctgtgaactctgccagagttgcctctcagatgtggatactgagatccaggagcaggcttttgtcttattaagtgatctacttctcatctttagccctcagatgattgttgggggccgtgatttccttaggccacttgtcttttttcctgaagctactctccagtctgagctagccagcttcctcatggaccacgtcttcatccagccgggagacctgggcagtggtgattcccaggaggatcatttacagatagagcggctacaccagcggcgccgcctcctagccgggttctgcaagctgttgctttatggggtgctggagatggatgcagcctcagatgttttcaaacactacaacaagttctacaatgactatggtgacattatcaaggaaacattaactagagcaaggcagattgaccgaagtcattgttcccgaatcctgctgctgagcctcaagcagctgtacacagaactgctgcaggagcatgggccccagggcctgaatgagcttcctgccttcatcgagatgagggacctggcccggaggtttgccttgagttttggaccccagcagctgcagaaccgtgacctcgtggtcatgctacacaaggaaggcatccagttctccttgtctgagcttcctccagctggctcctccaatcagcctccaaatctggcattcctggagctcctttcagagttttccccccgactcttccatcaggacaagcagcttttactgtcctatctagaaaagtgcctgcagcatgtctcccaggcacctggccatccctggggcccagtcaccacctactgccactccctcagccctgtggagaacacagcagagaccagccctcaggtcctccccagctccaagaggaggcgcgttgaagggcctgccaagcctaacagagaggacgtctcctcgtcccaggaagaaagtctgcagctgaacagcatcccgcccacgcccaccctcacctccacagctgtgaagagcaggcagcccctgtgggggttgaaagagatggaggaagaagatggctcagagttggattttgcccagggtcagcccgtcgcaggcaccgagaggtcaaggttcttgggtccacaatatttccagactccacacaacccttcaggtcctggcctgggcaaccagctgatgcgactcagccttatggaagaggacgaggaagaagagttagaaatccaggatgagtcaaatgaagaacggcaggatacagacatgcaagcaagtagctactcttccaccagtgagcgcgggctggacctcttagattctacagagctggatattgaggatttctgacaggactctgggcccctccccagctccactccctacctcaagaatgtgaccatttggaaaaggcaaagagaaaaggagcaaaatgaagcattcccccaggcttcagccctgggctctgaggggaaagagttgggcattgtttttctaacctaacctttccctctggggtagagaagccgagagaccctgtcctccctaatgcactgtggcccagtccccttgcctttttcctgttctgtttggagtggagaagggcagcacctctgtgtttaatggaaatagcccatagtctcctggatttttggaacatctttctcagcctattttgtgtcctaatgattcgctcaataaacatgtttgaatcca

SEQ ID NO: 20660 - DNA, 534 bp, Homo sapiens
  misc_feature 1..534: note = ENST00000422690
  source 1..534: mol_type = unassigned DNA
atctttcgcccccggaagggcagcggcgggcgcctgtgtggaaggtggggtggccagagacacccgagggacctgaggtggggaccttccctgaaccctgctcggccagaagtcactcttccaggctctgacagctggatcgccatacctaccctgtggtcctcatcttcctggcctcatagctcctcctctccaagcatgtcttccccgttgcaaagagctgtgggagataccaagagggccttgtctgcatcttctagttcctctgccagtctaccctttgatgacagggactcaaaccatacctcagaggggaatggcgactctttgttagctgatgaagacactgactttgaagacagcttgaatcgcaatgtgaagaagagagcagcaaaacgaccaccgaaaacaacaccggtggcaaaacatccaaagaaagggtcccgagtggtacatcgtcatagccggaaacagtcagagccaccagccaatgatcttttcaatgctgtgaaagccgccaaaagtgacatgcag

SEQ ID NO: 20661 - DNA, 3585 bp, Homo sapiens
  misc_feature 1..3585: note = ENST00000496157
  source 1..3585: mol_type = unassigned DNA
cgcccccggaagggcagcggcgggcgcctgtgtggaaggtggggtggccagagacacccgagggacctgagctggatcgccatacctaccctgtggtcctcatcttcctggcctcatagctcctcctctccaagcatgtcttccccgttgcaaagagctgtgggagataccaagagggccttgtctgcatcttctagttcctctgccagtctaccctttgatgacagggactcaaaccatacctcagaggggaatggcgactctttgttagctgatgaagacactgactttgaagacagcttgaatcgcaatgtgaagaagagagcagcaaaacgaccaccgaaaacaacaccggtggcaaaacatccaaagaaagggtcccgagtggtacatcgtcatagccggaaacagtcagagccaccagccaatgatcttttcaatgctgtgaaagccgccaaaagtgacatgcagtctttggtagatgagtggctggatagctacaagcaagaccaggatgcaggatttctggagcttgttaactttttcatccaatcttgcggatgtaaaggcattgtgacccctgagatgttcaagaagatgtccaactcagagatcatccagcacctaacagagcagtttaatgaggtggaagaagatgaccaggatcctcttacccctcttatttcaaaacacaatgcctattatccccttctttttgattctgtgaaatagggtagcttttagaaggaggaattcagtctcttgggggtaaaagagatctgaatatgcctctcaaattggggagaataccaggaaatgaggtataacagatatttttactggactgttgagttttgacatccaagcccctatgacttcatggacctggtaataactttcccatccttttcatacatccttttgtaggactcgggggactaccctctcatagctccaggtccatcctggaagaagttccagggcagcttctgtgaatttgtgaggacattggtctgtcagtgccagtacagcctcctctatgatggcttccctatggacgacctcatctccctgctcactggcctctcagactcacaagtccgcgccttccgtcacactagcaccctggctgctatgaaactgatgacctccctggtaaaagttgccctccaactgagtgtgcaccaagataacaatcagcgtcagtatgaggctgaaagaaacaaggggccagggcagagggcacctgagcggctggagagcctgttggagaaacgcaaagagctccaagagcatcaagaggagattgaggggatgatgaatgccctcttcaggggtgtctttgttcatcggtacagggatgtccttcctgagatccgtgctatctgcattgaggaaattgggtgttggatgcaaagctacagcacgtctttcctcaccgacagctatttaaaatatattggttggactctgcatgataagcaccgagaagtccgcctgaagtgtgtgaaggccctgaaagggctgtacggtaaccgggacctgaccacacgcctggagctcttcaccagccgcttcaaggaccggatggtttccatggtcatggacagagagtatgatgtggcagtggaggctgtcagattactgatacttatccttaagaacatggaaggggtgctgacggacgcggattgtgagagcgtctacccagttgtgtatgcctctcatcgaggcctggcctctgccgcaggcgaatttctgtactggaaactcttctaccctgagtgcgagataagaatgatgggtggaagagagcaacgccagagcccaggcgcccagaggactttcttccagcttctgctgtccttctttgtggagagcgagctccatgaccacgctgcttacttagtagacagtctgtgggactgtgcaggggctcggctgaaggactgggagggtctgacaagcctgctgctggagaaggaccagaacctgggtgatgtgcaggagagcacactgatagaaatccttgtgtccagtgcccggcaagcttcagaggggcacccgcctgtgggccgggtcactgggaggaagggcttaacctctaaggagcgcaagacccaagccgatgacagggtgaagttgactgagcacctcatccccctgctgccccagctcctggccaagttctcagctgatgcagagaaggtcactcccctgctccagcttctcagctgctttgacctccacatctactgcactgggcgcttggagaagcacctggagctgttcctgcagcaactccaggaggtggtggtgaagcatgcagagccagcggtgcttgaggctggggcgcatgccctctacctgctctgtaatcccgaattcactttcttcagccgggcggactttgcccgcagccagctagtagatttgctgactgaccgcttccagcaggagcttgaagagctgttacagtcgtccttcctagatgaggatgaggtatataatctggcagccactctgaaacgcctctctgccttctacaacactcatgacctgactcgctgggagctctatgagccatgttgccaactcctgcagaaggctgtggacacaggagaggttcctcaccaggttatcctgccagccttgactcttgtctatttttccattctctggacactaacccactccctcagccctgtggagaacacagcagagaccagccctcaggtcctccccagctccaagaggaggcgcgttgaagggcctgccaagcctaacagagaggacgtctcctcgtcccaggaagaaagtctgcagctgaacagcatcccgcccacgcccaccctcacctccacagctgtgaagagcaggcagcccctgtgggggttgaaagagatggaggaagaagatggctcagagttggattttgcccagggcagtcagcccgtcgcaggcaccgagaggtcaaggttcttgggtccacaatatttccagactccacacaacccttcaggtcctggcctgggcaaccagctgatgcgactcagccttatggaagaggacgaggaagaagagttagaaatccaggatgagtcaaatgaagaacggcaggatacagacatgcaagcaagtagctactcttccaccagtgagcgcgggctggacctcttagattctacagagctggatattgaggatttctgacaggactctgggcccctccccagctccactccctacctcaagaatgtgaccatttggaaaaggcaaagagaaaaggagcaaaatgaagcattcccccaggcttcagccctgggctctgaggggaaagagttgggcattgtttttctaacctaacctttccctctggggtagagaagccgagagaccctgtcctccctaatgcactgtggcccagtccccttgcctttttcctgttctgtttggagtggagaagggcagcacctctgtgtttaatggaaatagcccatagtctcctggatttttggaacatctttctcagcctattttgtgtcctaatgattcgctcaataaacatgtttgaatccacacgtt

SEQ ID NO: 20662 - DNA, 699 bp, Homo sapiens
  misc_feature 1..699: note = ENST00000439782
  source 1..699: mol_type = unassigned DNA
gcccccggaagggcagcggcgggcgcctgtgtggaaggtggggtggccagagacacccgagggacctgagctggatcgccatacctaccctgtggtcctcatcttcctggcctcatagctcctcctctccaagcatgtcttccccgttgcaaagagctgtgggagataccaagagggccttgtctgcatcttctagttcctctgccagtctaccctttgatgacagggactcaaaccatacctcagaggggaatggcgactctttgttagctgatgaagacactgactttgaagacagcttgaatcgcaatgtgaagaagagagcagcaaaacgaccaccgaaaacaacaccggtggcaaaacatccaaagaaagggtcccgagtggtacatcgtcatagccggaaacagtcagagccaccagccaatgatcttttcaatgctgtgaaagccgccaaaagtgacatgcaggactcgggggactaccctctcatagctccaggtccatcctggaagaagttccagggcagcttctgtgaatttgtgaggacattggtctgtcagtgccagtacagcctcctctatgatggcttccctatggacgacctcatctccctgctcactggcctctcagactcacaagtccgcgccttccgtcacactagcaccctggctgctatgaaactgatgacctccctgg

SEQ ID NO: 20663 - DNA, 472 bp, Homo sapiens
  misc_feature 1..472: note = ENST00000482546
  source 1..472: mol_type = unassigned DNA
cccccggaagggcagcggcgggcgcctgtgtggaaggtggggtggccagagacacccgagggacctgagctggatcgccatacctaccctgtggtcctcatcttcctggcctcatagctcctcctctccaagcatgtcttccccgttgcaaagagctgtgggagataccaagagggccttgtctgcatcttctagttcctctgccagtctaccctttgatgacagggactcaaaccatacctcagaggggtaagtagatgttgcattgtgtggccacttcctgtgtccctggcagccttccccctcgttttcccacattgatgataatatgcgtgggactgtgtgaaaacaccagaagtgctatactcgttcagcacagtgacaccctccctccagctccaggtgttttttttggcggtcctagatgttgtagacatcaaaatagtagtacatcctgttttttttttttttt

SEQ ID NO: 20664 - DNA, 535 bp, Homo sapiens
  misc_feature 1..535: note = ENST00000459699
  source 1..535: mol_type = unassigned DNA
aaagttataaacttgaattgataagacatgtggtttatgtttcaagggggtgaaatttaactctagatacatattactctcccatttatggatgaatgatagatgacttcctgagccatgattatctttctctacaaagagcagtgatctcgctacctgctaagaatggcgactctttgttagctgatgaagacactgactttgaagacagcttgaatcgcaatgtgaagaagagagcagcaaaacgaccaccgaaaacaacaccggtggcaaaacatccaaagaaagggtcccgagtggtacatcgtcatagccggaaacagtcagagccaccagccaatgatcttttcaatgctgtgaaagccgccaaaagtgacatgcagctatgaaactgatgacctccctggtaaaagttgccctccaactgagtgtgcaccaagataacaatcagcgtcagtatgaggctgaaagaaacaaggggccagggcagagggcacctgagcggctggagagcctgttggagaaacgcaaagag

SEQ ID NO: 20665 - DNA, 3031 bp, Homo sapiens
  misc_feature 1..3031: note = ENST00000491498
  source 1..3031: mol_type = unassigned DNA
ggataaggtagagagagacatacccaggagatgaaatgactcaaaacctgagcaccgagaagtccgcctgaagtgtgtgaaggccctgaaagggctgtacggtaaccgggacctgaccacacgcctggagctcttcaccagccgcttcaaggaccggatggtttccatggtcatggacagagagtatgatgtggcagtggaggctgtcagattactgatacttatccttaagaacatggaaggggtgctgacggacgcggattgtgagagcgtctacccagttgtgtatgcctctcatcgaggcctggcctctgccgcaggcgaatttctgtactggaaactcttctaccctgagtgcgagataagaatgatgggtggaagagagcaacgccagagcccaggcgcccagaggactttcttccagcttctgctgtccttctttgtggagagcgagctccatgaccacgctgcttacttagtagacagtctgtgggactgtgcaggggctcggctgaaggactgggagggtctgacaagcctgctgctggagaaggaccagaacctgggtgatgtgcaggagagcacactgatagaaatccttgtgtccagtgcccggcaagcttcagaggggcacccgcctgtgggccgggtcactgggaggaagggcttaacctctaaggagcgcaagacccaagccgatgacagggtgaagttgactgagcacctcatccccctgctgccccagctcctggccaagttctcagctgatgcagagaaggtcactcccctgctccagcttctcagctgctttgacctccacatctactgcactgggcgcttggagaagcacctggagctgttcctgcagcaactccaggaggtggtggtgaagcatgcagagccagcggtgcttgaggctggggcgcatgccctctacctgctctgtaatcccgaattcactttcttcagccgggcggactttgcccgcagccagctagtagatttgctgactgaccgcttccagcaggagcttgaagagctgttacagtcgtccttcctagatgaggatgaggtatataatctggcagccactctgaaacgcctctctgccttctacaacactcatgacctgactcgctgggagctctatgagccatgttgccaactcctgcagaaggctgtggacacaggagaggttcctcaccaggttatcctgccagccttgactcttgtctatttttccattctctggacactaacccacatttctaaatcagatgcttcccagaagcagctgtcgagtttgagggacagaatggtggccttctgtgaactctgccagagttgcctctcagatgtggatactgagatccaggagcaggcttttgtcttattaagtgatctacttctcatctttagccctcagatgattgttgggggccgtgatttccttaggccacttgtcttttttcctgaagctactctccagtctgagctagccagcttcctcatggaccacgtcttcatccagccgggagacctgggcagtggtgattcccaggaggatcatttacagatagagcggctacaccagcggcgccgcctcctagccgggttctgcaagctgttgctttatggggtgctggagatggatgcagcctcagatgttttcaaacactacaacaagttctacaatgactatggtgacattatcaaggaaacattaactagagcaaggcagattgaccgaagtcattgttcccgaatcctgctgctgagcctcaagcagctgtacacagaactgctgcaggagcatgggccccagggcctgaatgagcttcctgccttcatcgagatgagggacctggcccggaggtttgccttgagttttggaccccagcagctgcagaaccgtgacctcgtggtcatgctacacaaggaaggcatccagttctccttgtctgagcttcctccagctggctcctccaatcagcctccaaatctggcattcctggagctcctttcagagttttccccccgactcttccatcaggacaagcagcttttactgtcctatctagaaaagtgcctgcagcatgtctcccaggcacctggccatccctggggcccagtcaccacctactgccactccctcagccctgtggagaacacagcagagaccagccctcaggtcctccccagctccaagaggaggcgcgttgaagggcctgccaagcctaacagagaggacgtctcctcgtcccaggaagaaagtctgcagctgaacagcatcccgcccacgcccaccctcacctccacagctgtgaagagcaggcagcccctgtgggggttgaaagagatggaggaagaagatggctcagagttggattttgcccagggtcagcccgtcgcaggcaccgagaggtcaaggttcttgggtccacaatatttccagactccacacaacccttcaggtcctggcctgggcaaccagctgatgcgactcagccttatggaagaggacgaggaagaagagttagaaatccaggatgagtcaaatgaagaacggcaggatacagacatgcaagcaagtagctactcttccaccagtgagcgcgggctggacctcttagattctacagagctggatattgaggatttctgacaggactctgggcccctccccagctccactccctacctcaagaatgtgaccatttggaaaaggcaaagagaaaaggagcaaaatgaagcattcccccaggcttcagccctgggctctgaggggaaagagttgggcattgtttttctaacctaacctttccctctggggtagagaagccgagagaccctgtcctccctaatgcactgtggcccagtccccttgcctttttcctgttctgtttggagtggagaagggcagcacctctgtgtttaatggaaatagcccatagtctcctggatttttggaacatctttctcagcctattttgtgtcctaatgattcgctcaataaacatgtttgaatcca

SEQ ID NO: 20666 - DNA, 3121 bp, Homo sapiens
  misc_feature 1..3121: note = ENST00000440830
  source 1..3121: mol_type = unassigned DNA
gaaatgactcaaaacctgaggtacggggagagagactttcccatggaagagagttattgatggatggtaatgcaggtgctaaggggcagccaaaggatccttctcatcatgagtactgctgtgatccttttgttttttaacaccgagaagtccgcctgaagtgtgtgaaggccctgaaagggctgtacggtaaccgggacctgaccacacgcctggagctcttcaccagccgcttcaaggaccggatggtttccatggtcatggacagagagtatgatgtggcagtggaggctgtcagattactgatacttatccttaagaacatggaaggggtgctgacggacgcggattgtgagagcgtctacccagttgtgtatgcctctcatcgaggcctggcctctgccgcaggcgaatttctgtactggaaactcttctaccctgagtgcgagataagaatgatgggtggaagagagcaacgccagagcccaggcgcccagaggactttcttccagcttctgctgtccttctttgtggagagcgagctccatgaccacgctgcttacttagtagacagtctgtgggactgtgcaggggctcggctgaaggactgggagggtctgacaagcctgctgctggagaaggaccagaacctgggtgatgtgcaggagagcacactgatagaaatccttgtgtccagtgcccggcaagcttcagaggggcacccgcctgtgggccgggtcactgggaggaagggcttaacctctaaggagcgcaagacccaagccgatgacagggtgaagttgactgagcacctcatccccctgctgccccagctcctggccaagttctcagctgatgcagagaaggtcactcccctgctccagcttctcagctgctttgacctccacatctactgcactgggcgcttggagaagcacctggagctgttcctgcagcaactccaggaggtggtggtgaagcatgcagagccagcggtgcttgaggctggggcgcatgccctctacctgctctgtaatcccgaattcactttcttcagccgggcggactttgcccgcagccagctagtagatttgctgactgaccgcttccagcaggagcttgaagagctgttacagtcgtccttcctagatgaggatgaggtatataatctggcagccactctgaaacgcctctctgccttctacaacactcatgacctgactcgctgggagctctatgagccatgttgccaactcctgcagaaggctgtggacacaggagaggttcctcaccaggttatcctgccagccttgactcttgtctatttttccattctctggacactaacccacatttctaaatcagatgcttcccagaagcagctgtcgagtttgagggacagaatggtggccttctgtgaactctgccagagttgcctctcagatgtggatactgagatccaggagcaggcttttgtcttattaagtgatctacttctcatctttagccctcagatgattgttgggggccgtgatttccttaggccacttgtcttttttcctgaagctactctccagtctgagctagccagcttcctcatggaccacgtcttcatccagccgggagacctgggcagtggtgattcccaggaggatcatttacagatagagcggctacaccagcggcgccgcctcctagccgggttctgcaagctgttgctttatggggtgctggagatggatgcagcctcagatgttttcaaacactacaacaagttctacaatgactatggtgacattatcaaggaaacattaactagagcaaggcagattgaccgaagtcattgttcccgaatcctgctgctgagcctcaagcagctgtacacagaactgctgcaggagcatgggccccagggcctgaatgagcttcctgccttcatcgagatgagggacctggcccggaggtttgccttgagttttggaccccagcagctgcagaaccgtgacctcgtggtcatgctacacaaggaaggcatccagttctccttgtctgagcttcctccagctggctcctccaatcagcctccaaatctggcattcctggagctcctttcagagttttccccccgactcttccatcaggacaagcagcttttactgtcctatctagaaaagtgcctgcagcatgtctcccaggcacctggccatccctggggcccagtcaccacctactgccactccctcagccctgtggagaacacagcagagaccagccctcaggtcctccccagctccaagaggaggcgcgttgaagggcctgccaagcctaacagagaggacgtctcctcgtcccaggaagaaagtctgcagctgaacagcatcccgcccacgcccaccctcacctccacagctgtgaagagcaggcagcccctgtgggggttgaaagagatggaggaagaagatggctcagagttggattttgcccagggtcagcccgtcgcaggcaccgagaggtcaaggttcttgggtccacaatatttccagactccacacaacccttcaggtcctggcctgggcaaccagctgatgcgactcagccttatggaagaggacgaggaagaagagttagaaatccaggatgagtcaaatgaagaacggcaggatacagacatgcaagcaagtagctactcttccaccagtgagcgcgggctggacctcttagattctacagagctggatattgaggatttctgacaggactctgggcccctccccagctccactccctacctcaagaatgtgaccatttggaaaaggcaaagagaaaaggagcaaaatgaagcattcccccaggcttcagccctgggctctgaggggaaagagttgggcattgtttttctaacctaacctttccctctggggtagagaagccgagagaccctgtcctccctaatgcactgtggcccagtccccttgcctttttcctgttctgtttggagtggagaagggcagcacctctgtgtttaatggaaatagcccatagtctcctggatttttggaacatctttctcagcctattttgtgtcctaatgattcgctcaataaacatgtttgaatccaca

SEQ ID NO: 20667 - DNA, 719 bp, Homo sapiens
  misc_feature 1..719: note = ENST00000477469
  source 1..719: mol_type = unassigned DNA
gtgaaggccctgaaagggctgtacggtaaccgggacctgaccacacgcctggagctcttcaccagccgcttcaaggaccggatggtttccatggtcatggacagagagtatgatgtggcagtggaggctgtcagattactgatacttatccttaagaacatggaaggggtgctgacggacgcggattgtgagagcgtctacccagttgtgtatgcctctcatcgaggcctggcctctgccgcaggcgaatttctgtactggaaactcttctaccctgagtgcgagataagaatgatgggtggaagagagcaacgccagagcccaggcgcccagaggactttcttccagcttctgctgtccttctttgtggagagcgagctccatgaccacgctgcttacttagtagacagtctgtgggactgtgcaggggctcggctgaaggactgggagggtctgacaagcctgctgctggagaaggaccagagtacgtgtcacacggagccagggacagggaccttccaccccctagggtgaaactgggagggattgcttgcttcacttgtacaaggcagcaacggtggcatcgggtggggggagcttggagttggaaggtggctaatctttgattctatgtttttgatcctcctggcactccagacctgggtgatgtgcaggagagcacactgatagaaatccttgtgtccagtgcccggcaagct

SEQ ID NO: 20668 - DNA, 583 bp, Homo sapiens
  misc_feature 1..583: note = ENST00000476057
  source 1..583: mol_type = unassigned DNA
cttctaggcagataaggtcatggggaggaggactgcacacaccccctgcaccagtgtttctttacacctcccccacccccaagtgactctcattccagggcttaacctctaaggagcgcaagacccaagccgatgacagggtgaagttgactgagcacctcatccccctgctgccccagctcctggccaaggtaccgctgcccctccactctgcatcacaccaagagaagtgaaaggaaatggcctctgtgggggtgggagtaggaattagcaatgtgtcagcttgtaaggaggcctccctgtcaatcatcacagttctcagctgatgcagagaaggtcactcccctgctccagcttctcagctgctttgacctccacatctactgcactgggcgcttggagaagcacctggagctgttcctgcagcaactccaggaggtggtggtgaagcatgcagagccagcggtgcttgaggctggggcgcatgccctctacctgctctgtaatcccgaattcactttcttcagccgggcggactttgcccgcagccagctagtagatttgctgactgaccgcttccagc

SEQ ID NO: 20669 - DNA, 780 bp, Homo sapiens
  misc_feature 1..780: note = ENST00000479359
  source 1..780: mol_type = unassigned DNA
agataaggtcatggggaggaggactgcacacaccccctgcaccagtgtttctttacacctcccccacccccaagtgactctcattccagggcttaacctctaaggagcgcaagacccaagccgatgacagggtgaagttgactgagcacctcatccccctgctgccccagctcctggccaagttctcagctgatgcagagaaggtcactcccctgctccagcttctcagctgctttgacctccacatctactgcactgggcgcttggagaagcacctggagctgttcctgcagcaactccaggaggtggtggtgaagcatgcagagccagcggtgcttgaggctggggcgcatgccctctacctgctctgtaatcccgaattcactttcttcagccgggcggactttgcccgcagccagctagtagatttgctgactgaccgcttccagcaggagcttgaagagctgttacagtcgtccttcctagatgaggatgaggtatataatctggcagccactctgaaacgcctctctgccttctacaacactcatgacctgactcgctgggagctctatgagccatgttgccaactcctgcagaaggctgtggacacaggagaggttcctcaccaggttatcctgccagccttgactcttgtctatttttccattctctggacactaacccacatttctaaatcagatgcttcccagaagcagctgtcgagtttgagggacagaatggtggccttctgtgaactctgccagagttgcctctcag

SEQ ID NO: 20670 - DNA, 920 bp, Homo sapiens
  misc_feature 1..920: note = ENST00000412190
  source 1..920: mol_type = unassigned DNA
ggccatccctggggcccagtcaccacctactgccactccctcagccctgtggagaacacagcagagaccagccctcaggtcctccccagctccaagaggaggcgcgttgaagggcctgccaagcctaacagagaggacgtctcctcgtcccaggaagaaagtctgcagctgaacagcatcccgcccacgcccaccctcacctccacagctgtgaagagcaggcagcccctgtgggggttgaaagagatggaggaagaagatggctcagagttggattttgcccagggcagtcagcccgtcgcaggcaccgagaggtcaaggttcttgggtccacaatatttccagactccacacaacccttcaggtcctggcctgggcaaccagctgatgcgactcagccttatggaagaggacgaggaagaagagttagaaatccaggatgagtcaaatgaagaacggcaggatacagacatgcaagcaagtagctactcttccaccagtgagcgcgggctggacctcttagattctacagagctggatattgaggatttctgacaggactctgggcccctccccagctccactccctacctcaagaatgtgaccatttggaaaaggcaaagagaaaaggagcaaaatgaagcattcccccaggcttcagccctgggctctgaggggaaagagttgggcattgtttttctaacctaacctttccctctggggtagagaagccgagagaccctgtcctccctaatgcactgtggcccagtccccttgcctttttcctgttctgtttggagtggagaagggcagcacctctgtgtttaatggaaatagcccatagtctcctggatttttggaacatctttctcagcctattttgtgtcctaatgattcgctcaataaacatgtttgaatcc

SEQ ID NO: 20671 - DNA, 3056 bp, Homo sapiens
  misc_feature 1..3056: note = ENST00000451963
  source 1..3056: mol_type = unassigned DNA
cccagctccaagaggaggcgcgttgaagggcctgccaagcctaacagagaggacgtctcctcgtcccaggaagaaagtctgcagctgaacagcatcccgcccacgcccaccctcacctccacagctgtgaagagcaggcagcccctgtgggggttgaaagagatggaggaagaagatggctcagagttggattttgcccagggcagtcagcccgtcgcaggcaccgagaggtcaaggttcttgggtccacaatatttccagactccacacaacccttcaggtcctggcctgggcaaccagctgatgcgactcagccttatggaagaggacgaggaagaagagttagaaatccaggatgagtcaaatgaagaacggcaggatacagacatgcaagcaagtagctactcttccaccagtgagcgcgggctggacctcttagattctacagagctggatattgagattactgagagtcttccgttactaggtaagtcaccgcatccttataactccaggtgacactgactggggtttatgggatgaaagaggagtgtgtgcttggatgatggggtgtgatagtgaaggggtgaaaggtttcttctcacacatagacatcgtgaggtcttccttgagctctttagagccttccctcgggataggatgaaatactgagatcctagaaaggattcacaaaacgtgtcactcatcagcgcagattcaccgattcacccctagatgtgtgtgggatttggatggcagagagaaacaggcactgaagatttttggtcaggacagggcagagaaataagaagagttgaaaattcaccaaaggatagataaacccagggcgtttagagaaaacctgtagtgtgcaaaggagcccagaatcctggggcaacttggagggaaatatacttaatttgattcactaagttaggcccagtgaagggattgggtggcataggtagaagccgaaaaataaagtatcttgtattgctggagtagcctctgtttctgaggtcacatccaaacttagcgaggcagcttaacctggtgagagacatgggttcaactcctggcttctgcactgctagggcagaggactgctgtttgctgacacaatcttggtgcgttggaagtgaaagggaagaggcactggtggctgtgctttgggcccgagcagccagaagccagttgccatcacctatgacgaggagacagcgcctggggcagagcccagtatggggtgcgttcagggtagatcaggaggtatgagtgggtagtgggcgagccaggctgggggttgtgggggaggcctgcattgcaggtgtaagcgtgggacccacatcagattggtagtgggtcatgcatgctgggctggctctcaggtcctccctgctggcttcccactcccaggggctttctcctccgattccttagctgggtgaggggcgggacagagccctttcttagggaagcccggcaccccttgctgtccagggaaggggagtccttctagcccctgacagcttctctgcccctcccctggcctccccaggcctagccagggctgggttctcacccacctgtgccgccctgccttgttacctggaagcacagccttggggactgagcaggccctcactgtcactttaagaagggaatcagccactttgtgctcaccacctctggggaaggtgtgagaggagagaaggaagtggctgtttggctgctgacaacatgaagacttcctgcgatgagaacagaggcacaggtgccggccctgcagcccccagaacctggactggagggggccatggggcaccggaccctggtcctgccctgggtgctgctgaccttgtgtgtcactgcggggaccccggaggtgtgggttcaagttcggatggaggccaccgagctctcgtccttcaccatccgttgtgggttcctggggtctggctccatctccctggtgactgtgagctgggggggccccaacggtgctggggggaccacgctggctgtgttgcacccagaacgtggcatccggcaatgggcccctgctcgccaggcccgctgggaaacccagagcagcatctctctcatcctggaaggctctggggccagcagcccctgcgccaacaccaccttctgctgcaagtttgcgtccttccctgagggctcctgggaggcctgtgggagcctcccgcccagctcagacccaggtggggccggggcgaggggtccaggagggcagggaggggctcgggaactggccacccatctgattcttgtctccgtgcccagggctctctgccccgccgactcctgcccccattctgcgggcagacctggccgggatcttgggggtctcaggagtcctcctctttggctgtgtctacctccttcatctgctgcgccgacataagcaccgccctgcccctaggctccagccgtcccgcaccagcccccaggcaccgagagcacgagcatgggcaccaagccaggcctcccaggctgctcttcacgtcccttatgccactatcaacaccagctgccgcccagctactttggacacagctcacccccatggggggccgtcctggtgggcgtcactccccacccacgctgcacaccggccccagggccctgccgcctgggcctccacacccatccctgcacgtggcagctttgtctctgttgagaatggactctacgctcaggcaggggagaggcctcctcacactggtcccggcctcactcttttccctgaccctcgggggcccagggccatggaaggacccttaggagttcgatgagagagaccatgaggccactgggctttccccctcccaggcctcctgggtgtcacccccttactttaattcttgggcctccaataagtgtcccataggtgtctggccaggcccacctgctgcggatgtggtctctgtgtgtgcgtgtgtgggcacaggtgtgagtgtgtgagtgacagttaccccatttcagtcatttcctgctgcaactaagtcagcaacacagtttctctgatgtcg

SEQ ID NO: 20672 - DNA, 666 bp, Homo sapiens
  misc_feature 1..666: note = ENST00000492674
  source 1..666: mol_type = unassigned DNA
acttcctgtcagcacaatcgggaaactactatgctgtacttactgctccccacttcccccaccccgggtgtctgagaaactctcaggggtcctcaaagaacagtttgaaaagccagtctctttgcccctacatcagactcagccttatggaagaggacgaggaagaagagttagaaatccaggatgagtcaaatgaagaacggcaggatacagacatgcaagcaagtagctactcttccaccagtgagcgcgggctggacctcttagattctacagagctggatattgaggatttctgacaggactctgggcccctccccagctccactccctacctcaagaatgtgaccatttggaaaaggcaaagagaaaaggagcaaaatgaagcattcccccaggcttcagccctgggctctgaggggaaagagttgggcattgtttttctaacctaacctttccctctggggtagagaagccgagagaccctgtcctccctaatgcactgtggcccagtccccttgcctttttcctgttctgtttggagtggagaagggcagcacctctgtgtttaatggaaatagcccatagtctcctggatttttggaacatctttctcagcctattttgtgtcctaatgattcgctcaataaacatgtttgaatccac

SEQ ID NO: 20673 - DNA, 4203 bp, Homo sapiens
  misc_feature 1..4203: note = ENST00000620100
  source 1..4203: mol_type = unassigned DNA
agcccacgtgagagggcaggacgcctgagagcttgaggccacacgaggctgtggagcggcgtgactcaaacgtggcgcgcatcagctcgcacacttccaaacctcgcgatagctactggccctgggcgagccgttgggattgcgcttgcgcacagcgtgtcttgtacgttcccgcgcttttctggaatctttcgcccccggaagggcagcggcgggcgcctgtgtggaaggtggggtggccagagacacccgagggacctgagctggatcgccatacctaccctgtggtcctcatcttcctggcctcatagctcctcctctccaagcatgtcttccccgttgcaaagagctgtgggagataccaagagggccttgtctgcatcttctagttcctctgccagtctaccctttgatgacagggactcaaaccatacctcagaggggaatggcgactctttgttagctgatgaagacactgactttgaagacagcttgaatcgcaatgtgaagaagagagcagcaaaacgaccaccgaaaacaacaccggtggcaaaacatccaaagaaagggtcccgagtggtacatcgtcatagccggaaacagtcagagccaccagccaatgatcttttcaatgctgtgaaagccgccaaaagtgacatgcaggactcgggggactaccctctcatagctccaggtccatcctggaagaagttccagggcagcttctgtgaatttgtgaggacattggtctgtcagtgccagtacagcctcctctatgatggcttccctatggacgacctcatctccctgctcactggcctctcagactcacaagtccgcgccttccgtcacactagcaccctggctgctatgaaactgatgacctccctggtaaaagttgccctccaactgagtgtgcaccaagataacaatcagcgtcagtatgaggctgaaagaaacaaggggccagggcagagggcacctgagcggctggagagcctgttggagaaacgcaaagagctccaagagcatcaagaggagattgaggggatgatgaatgccctcttcaggggtgtctttgttcatcggtacagggatgtccttcctgagatccgtgctatctgcattgaggaaattgggtgttggatgcaaagctacagcacgtctttcctcaccgacagctatttaaaatatattggttggactctgcatgataagcaccgagaagtccgcctgaagtgtgtgaaggccctgaaagggctgtacggtaaccgggacctgaccacacgcctggagctcttcaccagccgcttcaaggaccggatggtttccatggtcatggacagagagtatgatgtggcagtggaggctgtcagattactgatacttatccttaagaacatggaaggggtgctgacggacgcggattgtgagagcgtctacccagttgtgtatgcctctcatcgaggcctggcctctgccgcaggcgaatttctgtactggaaactcttctaccctgagtgcgagataagaatgatgggtggaagagagcaacgccagagcccaggcgcccagaggactttcttccagcttctgctgtccttctttgtggagagcgagctccatgaccacgctgcttacttagtagacagtctgtgggactgtgcaggggctcggctgaaggactgggagggtctgacaagcctgctgctggagaaggaccagaacctgggtgatgtgcaggagagcacactgatagaaatccttgtgtccagtgcccggcaagcttcagaggggcacccgcctgtgggccgggtcactgggaggaagggcttaacctctaaggagcgcaagacccaagccgatgacagggtgaagttgactgagcacctcatccccctgctgccccagctcctggccaagttctcagctgatgcagagaaggtcactcccctgctccagcttctcagctgctttgacctccacatctactgcactgggcgcttggagaagcacctggagctgttcctgcagcaactccaggaggtggtggtgaagcatgcagagccagcggtgcttgaggctggggcgcatgccctctacctgctctgtaatcccgaattcactttcttcagccgggcggactttgcccgcagccagctagtagatttgctgactgaccgcttccagcaggagcttgaagagctgttacagtcgtccttcctagatgaggatgaggtatataatctggcagccactctgaaacgcctctctgccttctacaacactcatgacctgactcgctgggagctctatgagccatgttgccaactcctgcagaaggctgtggacacaggagaggttcctcaccaggttatcctgccagccttgactcttgtctatttttccattctctggacactaacccacatttctaaatcagatgcttcccagaagcagctgtcgagtttgagggacagaatggtggccttctgtgaactctgccagagttgcctctcagatgtggatactgagatccaggagcaggcttttgtcttattaagtgatctacttctcatctttagccctcagatgattgttgggggccgtgatttccttaggccacttgtcttttttcctgaagctactctccagtctgagctagccagcttcctcatggaccacgtcttcatccagccgggagacctgggcagtggtgattcccaggaggatcatttacagatagagcggctacaccagcggcgccgcctcctagccgggttctgcaagctgttgctttatggggtgctggagatggatgcagcctcagatgttttcaaacactacaacaagttctacaatgactatggtgacattatcaaggaaacattaactagagcaaggcagattgaccgaagtcattgttcccgaatcctgctgctgagcctcaagcagctgtacacagaactgctgcaggagcatgggccccagggcctgaatgagcttcctgccttcatcgagatgagggacctggcccggaggtttgccttgagttttggaccccagcagctgcagaaccgtgacctcgtggtcatgctacacaaggaaggcatccagttctccttgtctgagcttcctccagctggctcctccaatcagcctccaaatctggcattcctggagctcctttcagagttttccccccgactcttccatcaggacaagcagcttttactgtcctatctagaaaagtgcctgcagcatgtctcccaggcacctggccatccctggggcccagtcaccacctactgccactccctcagccctgtggagaacacagcagagaccagccctcaggtcctccccagctccaagaggaggcgcgttgaagggcctgccaagcctaacagagaggacgtctcctcgtcccaggaagaaagtctgcagctgaacagcatcccgcccacgcccaccctcacctccacagctgtgaagagcaggcagcccctgtgggggttgaaagagatggaggaagaagatggctcagagttggattttgcccagggtcagcccgtcgcaggcaccgagaggtcaaggttcttgggtccacaatatttccagactccacacaacccttcaggtcctggcctgggcaaccagctgatgcgactcagccttatggaagaggacgaggaagaagagttagaaatccaggatgagtcaaatgaagaacggcaggatacagacatgcaagcaagtagctactcttccaccagtgagcgcgggctggacctcttagattctacagagctggatattgaggatttctgacaggactctgggcccctccccagctccactccctacctcaagaatgtgaccatttggaaaaggcaaagagaaaaggagcaaaatgaagcattcccccaggcttcagccctgggctctgaggggaaagagttgggcattgtttttctaacctaacctttccctctggggtagagaagccgagagaccctgtcctccctaatgcactgtggcccagtccccttgcctttttcctgttctgtttggagtggagaagggcagcacctctgtgtttaatggaaatagcccatagtctcctggatttttggaacatctttctcagcctattttgtgtcctaatgattcgctcaataaacatgtttgaatccacacgtt

SEQ ID NO: 20674 - DNA, 4380 bp, Homo sapiens
  misc_feature 1..4380: note = ENST00000615138
  source 1..4380: mol_type = unassigned DNA
agcccacgtgagagggcaggacgcctgagagcttgaggccacacgaggctgtggagcggcgtgactcaaacgtggcgcgcatcagctcgcacacttccaaacctcgcgatagctactggccctgggcgagccgttgggattgcgcttgcgcacagcgtgtcttgtacgttcccgcgcttttctggaatctttcgcccccggaagggcagcggcgggcgcctgtgtggaaggtggggtggccagagacacccgagggacctgagctggatcgccatacctaccctgtggtcctcatcttcctggcctcatagctcctcctctccaagcatgtcttccccgttgcaaagagctgtgggagataccaagagggccttgtctgcatcttctagttcctctgccagtctaccctttgatgacagggactcaaaccatacctcagaggggaatggcgactctttgttagctgatgaagacactgactttgaagacagcttgaatcgcaatgtgaagaagagagcagcaaaacgaccaccgaaaacaacaccggtggcaaaacatccaaagaaagggtcccgagtggtacatcgtcatagccggaaacagtcagagccaccagccaatgatcttttcaatgctgtgaaagccgccaaaagtgacatgcagtctttggtagatgagtggctggatagctacaagcaagaccaggatgcaggatttctggagcttgttaactttttcatccaatcttgcggatgtaaaggcattgtgacccctgagatgttcaagaagatgtccaactcagagatcatccagcacctaacagagcagtttaatgaggactcgggggactaccctctcatagctccaggtccatcctggaagaagttccagggcagcttctgtgaatttgtgaggacattggtctgtcagtgccagtacagcctcctctatgatggcttccctatggacgacctcatctccctgctcactggcctctcagactcacaagtccgcgccttccgtcacactagcaccctggctgctatgaaactgatgacctccctggtaaaagttgccctccaactgagtgtgcaccaagataacaatcagcgtcagtatgaggctgaaagaaacaaggggccagggcagagggcacctgagcggctggagagcctgttggagaaacgcaaagagctccaagagcatcaagaggagattgaggggatgatgaatgccctcttcaggggtgtctttgttcatcggtacagggatgtccttcctgagatccgtgctatctgcattgaggaaattgggtgttggatgcaaagctacagcacgtctttcctcaccgacagctatttaaaatatattggttggactctgcatgataagcaccgagaagtccgcctgaagtgtgtgaaggccctgaaagggctgtacggtaaccgggacctgaccacacgcctggagctcttcaccagccgcttcaaggaccggatggtttccatggtcatggacagagagtatgatgtggcagtggaggctgtcagattactgatacttatccttaagaacatggaaggggtgctgacggacgcggattgtgagagcgtctacccagttgtgtatgcctctcatcgaggcctggcctctgccgcaggcgaatttctgtactggaaactcttctaccctgagtgcgagataagaatgatgggtggaagagagcaacgccagagcccaggcgcccagaggactttcttccagcttctgctgtccttctttgtggagagcgagctccatgaccacgctgcttacttagtagacagtctgtgggactgtgcaggggctcggctgaaggactgggagggtctgacaagcctgctgctggagaaggaccagaacctgggtgatgtgcaggagagcacactgatagaaatccttgtgtccagtgcccggcaagcttcagaggggcacccgcctgtgggccgggtcactgggaggaagggcttaacctctaaggagcgcaagacccaagccgatgacagggtgaagttgactgagcacctcatccccctgctgccccagctcctggccaagttctcagctgatgcagagaaggtcactcccctgctccagcttctcagctgctttgacctccacatctactgcactgggcgcttggagaagcacctggagctgttcctgcagcaactccaggaggtggtggtgaagcatgcagagccagcggtgcttgaggctggggcgcatgccctctacctgctctgtaatcccgaattcactttcttcagccgggcggactttgcccgcagccagctagtagatttgctgactgaccgcttccagcaggagcttgaagagctgttacagtcgtccttcctagatgaggatgaggtatataatctggcagccactctgaaacgcctctctgccttctacaacactcatgacctgactcgctgggagctctatgagccatgttgccaactcctgcagaaggctgtggacacaggagaggttcctcaccaggttatcctgccagccttgactcttgtctatttttccattctctggacactaacccacatttctaaatcagatgcttcccagaagcagctgtcgagtttgagggacagaatggtggccttctgtgaactctgccagagttgcctctcagatgtggatactgagatccaggagcaggcttttgtcttattaagtgatctacttctcatctttagccctcagatgattgttgggggccgtgatttccttaggccacttgtcttttttcctgaagctactctccagtctgagctagccagcttcctcatggaccacgtcttcatccagccgggagacctgggcagtggtgattcccaggaggatcatttacagatagagcggctacaccagcggcgccgcctcctagccgggttctgcaagctgttgctttatggggtgctggagatggatgcagcctcagatgttttcaaacactacaacaagttctacaatgactatggtgacattatcaaggaaacattaactagagcaaggcagattgaccgaagtcattgttcccgaatcctgctgctgagcctcaagcagctgtacacagaactgctgcaggagcatgggccccagggcctgaatgagcttcctgccttcatcgagatgagggacctggcccggaggtttgccttgagttttggaccccagcagctgcagaaccgtgacctcgtggtcatgctacacaaggaaggcatccagttctccttgtctgagcttcctccagctggctcctccaatcagcctccaaatctggcattcctggagctcctttcagagttttccccccgactcttccatcaggacaagcagcttttactgtcctatctagaaaagtgcctgcagcatgtctcccaggcacctggccatccctggggcccagtcaccacctactgccactccctcagccctgtggagaacacagcagagaccagccctcaggtcctccccagctccaagaggaggcgcgttgaagggcctgccaagcctaacagagaggacgtctcctcgtcccaggaagaaagtctgcagctgaacagcatcccgcccacgcccaccctcacctccacagctgtgaagagcaggcagcccctgtgggggttgaaagagatggaggaagaagatggctcagagttggattttgcccagggcagtcagcccgtcgcaggcaccgagaggtcaaggttcttgggtccacaatatttccagactccacacaacccttcaggtcctggcctgggcaaccagctgatgcgactcagccttatggaagaggacgaggaagaagagttagaaatccaggatgagtcaaatgaagaacggcaggatacagacatgcaagcaagtagctactcttccaccagtgagcgcgggctggacctcttagattctacagagctggatattgaggatttctgacaggactctgggcccctccccagctccactccctacctcaagaatgtgaccatttggaaaaggcaaagagaaaaggagcaaaatgaagcattcccccaggcttcagccctgggctctgaggggaaagagttgggcattgtttttctaacctaacctttccctctggggtagagaagccgagagaccctgtcctccctaatgcactgtggcccagtccccttgcctttttcctgttctgtttggagtggagaagggcagcacctctgtgtttaatggaaatagcccatagtctcctggatttttggaacatctttctcagcctattttgtgtcctaatgattcgctcaataaacatgtttgaatccacacgtt

SEQ ID NO: 20675 - DNA, 2532 bp, Homo sapiens
  misc_feature 1..2532: note = ENST00000371926
  source 1..2532: mol_type = unassigned DNA
taacatccaggagatattctaatacttcttattttccaagtacacacaaattgggggtagggggaagggctaagatgcttaatagtgggcgtagccagttgtggataaatatcaaaaagggaatcctaacatgaagtataagtgggattttcaccaaaaccctatccttccccagactccagtgacagtttaacggtcagctgcatcaaggcttgtgtactgtgcagtcttaaaaggcaccactcctgtccatctcggtgaaattgatggtggagcaaaagggagtttaggtggttccggtctggggagaagacgtgcagggtttcagatgcgaaagtcgcacccaaccgcttcactcgggctctaggccatccgcaggggccctgcttccttccacctgcgagctttttctgcagaatgcgggaagccgccgccgccgccacagaggagggggcggaggcagaggcggaggcggcacccaggggccggggcaggggaggccgggaccatcgcagtgacaatttattttcctgcagcagcggcagcagggacggttgctgcaggttcggggtcggccggcctgcgcgtgggcttgcgaggacgctgttcgtcccctgcgctggggtgtccgacagcgaggaggagaacgacgcacggagcccgcgcgactggaaccagcaaagctccatctgtcggcagaggagaagggggaggaggcacggccgaggcaaacgagcggacgcctcgtcgccgggtgccggtatcaccccgctgcaacgccttccagcaaaagccaccgcggcccgggttgcagcagccggacggatgccaaggccacacggcagccacgggggcagccgtcgcagtcgccgtcccacacgggctgcggacaccaagggttgctaatgaagtgattgagaagaaacagtgaacatcctcatttcacagataagacaacatggatcagccttttactgtgaattctctgaaaaagttagctgctatgcctgaccatacagatgtttccctaagcccagaagagcgagtccgtgccctaagcaagcttggttgtaatatcaccatcagtgaagacatcactccacgacgttactttaggtctggagtagagatggagaggatggcgtctgtgtatttggaagaaggaaatttggaaaatgcctttgttctttataataaatttataaccttatttgtagaaaagcttcctaaccatcgagattaccagcaatgtgcagtacctgaaaagcaggatattatgaagaaactgaaggagattgcattcccaaggacagatgaattgaaaaacgaccttttaaagaaatataacgtagaataccaagaatatttgcaaagcaaaaacaaatataaagctgaaattctcaaaaaattggagcatcagagattgatagaggcagaaaggaagcggattgctcagatgcgccagcagcagctagaatcggagcagtttctgtttttcgaagatcaactcaagaagcaagagttagcccgaggtcaaatgcgaagtcagcaaacctcagggctgtcagagcagattgatgggagcgctttgtcctgcttttccacacaccagaacaattccttgctgaatgtatttgcagatcaacctaataaaagtgatgcaaccaattatgctagccactctcctcctgtaaacagggccttaacgccagctgctactctaagtgctgttcagaatttagtggttgaaggactgcgatgtgtagttttgccagaagatctttgccacaaatttctgcaactggcagaatctaatacagtgagaggaatagaaacctgtggaatactctgtggaaaactgacacataatgaatttactattacccatgtaattgtgccaaagcagtctgcgggaccagactattgtgacatggagaatgtagaggaattattcaatgttcaggatcaacatgatctcctcactctaggatggatccatacacatcccactcaaactgcatttttatccagcgttgatcttcacactcactgttcctatcaactcatgttgccagaggccattgccattgtttgctcaccaaagcataaagacactggcatcttcaggctcaccaatgctggcatgcttgaggtttctgcttgtaaaaaaaagggctttcatccacacaccaaggagcccaggctgttcagtatatgcaaacatgtgttggtaaaagacataaaaataattgtgttggatctgaggtgatatgttctgaatgtaagcaccgtcaacatcagacacctactcatggacatgtggttgccggattttcttaagatgtttccagaaatgactgatattttatatttatacattttagatgacaaagcttgatatttattgctgttgcacattttaaagttttctttttgggttgctctgtgtcaagagaggttacatggtgttaaatcggtacctgataatgtacccaaatactatggccagataataaattgtgctgcaaacaa

SEQ ID NO: 20676 - DNA, 4184 bp, Homo sapiens
  misc_feature 1..4184: note = ENST00000371927
  source 1..4184: mol_type = unassigned DNA
taacatccaggagatattctaatacttcttattttccaagtacacacaaattgggggtagggggaagggctaagatgcttaatagtgggcgtagccagttgtggataaatatcaaaaagggaatcctaacatgaagtataagtgggattttcaccaaaaccctatccttccccagactccagtgacagtttaacggtcagctgcatcaaggcttgtgtactgtgcagtcttaaaaggcaccactcctgtccatctcggtgaaattgatggtggagcaaaagggagtttaggtggttccggtctggggagaagacgtgcagggtttcagatgcgaaagtcgcacccaaccgcttcactcgggctctaggccatccgcaggggccctgcttccttccacctgcgagctttttctgcagaatgcgggaagccgccgccgccgccacagaggagggggcggaggcagaggcggaggcggcacccaggggccggggcaggggaggccgggaccatcgcagtgacaatttattttcctgcagcagcggcagcagggacggttgctgcaggttcggggtcggccggcctgcgcgtgggcttgcgaggacgctgttcgtcccctgcgctggggtgtccgacagcgaggaggagaacgacgcacggagcccgcgcgactggaaccagcaaagctccatctgtcggcagaggagaagggggaggaggcacggccgaggcaaacgagcggacgcctcgtcgccgggtgccggtatcaccccgctgcaacgccttccagcaaaagccaccgcggcccgggttgcagcagccggacggatgccaaggccacacggcagccacgggggcagccgtcgcagtcgccgtcccacacgggctgcggacaccaagggttgctaatgaagtgattgagaagaaacagtgaacatcctcatttcacagataagacaacatggatcagccttttactgtgaattctctgaaaaagttagctgctatgcctgaccatacagatgtttccctaagcccagaagagcgagtccgtgccctaagcaagcttggttgtaatatcaccatcagtgaagacatcactccacgacgttactttaggtctggagtagagatggagaggatggcgtctgtgtatttggaagaaggaaatttggaaaatgcctttgttctttataataaatttataaccttatttgtagaaaagcttcctaaccatcgagattaccagcaatgtgcagtacctgaaaagcaggatattatgaagaaactgaaggagattgcattcccaaggacagatgaattgaaaaacgaccttttaaagaaatataacgtagaataccaagaatatttgcaaagcaaaaacaaatataaagctgaaattctcaaaaaattggagcatcagagattgatagaggcagaaaggaagcggattgctcagatgcgccagcagcagctagaatcggagcagtttctgtttttcgaagatcaactcaagaagcaagagttagcccgaggtcaaatgcgaagtcagcaaacctcagggctgtcagagcagattgatgggagcgctttgtcctgcttttccacacaccagaacaattccttgctgaatgtatttgcagatcaacctaataaaagtgatgcaaccaattatgctagccactctcctcctgtaaacagggccttaacgccagctgctactctaagtgctgttcagaatttagtggttgaaggactgcgatgtgtagttttgccagaagatctttgccacaaatttctgcaactggcagaatctaatacagtgagaggaatagaaacctgtggaatactctgtggaaaactgacacataatgaatttactattacccatgtaattgtgccaaagcagtctgcgggaccagactattgtgacatggagaatgtagaggaattattcaatgttcaggatcaacatgatctcctcactctaggatggatccatacacatcccactcaaactgcatttttatccagcgttgatcttcacactcactgttcctatcaactcatgttgccagaggccattgccattgtttgctcaccaaagcataaagacactggcatcttcaggctcaccaatgctggcatgcttgaggtttctgcttgtaaaaaaaagggctttcatccacacaccaaggagcccaggctgttcagtattcagaaattcctttctgggataatttctggcactgctttggagatggagcccctgaaaattggctatggaccaaatggattcccactcttggggatctctaggtcatcatcaccatctgaacagctctgagagagacaagaagtggaatggagaaggtgattaggtaatccaagaattgccaggcgaacaattgtgaaaatctttcatagagttcccgatgaaaacaactctttcttgttagccattatctctgcctttcctttctaaagaaaaacacgtcatttcatcttgattatcagtttctcaagtactcatggatgtgaggccaggtaccctgtcaccttggctctgtttgggatgcaatgttgtgtttgtcaccacttcccattccccaaaagcatctttaacatagaccattcattcttcagattcaaaatgcttaagctgaactaacctcaaagggccctcattaatttacagacatttgaataacacccatattcatttctgctactgaaccaaagccttttccaaaaaaatcatctagcaaactgtttttgccaggccaaatattaacaggtatatatatttgcatacataaatatttacctctatgtcttgtgtgtttttgttatgagacagagtctcactctgtcgcccaggctggagtgcagtggcacagtctcagctcactgcaacctccacctcccaggttcaagcgattctcatgcctcagcctcccgagtagcgaggactacaggcgtgcaccaccacgcccagctaatttttgtatttttagtagagatggggttttaccctgttggccagggtggtctcgaattcctgacctctgatgatctacccgcctggacctctcaaagtgctgggattacagacatgagccactgtgccctgcctctgttttgtgtatttacataaatacatgtctccagagctttaaattcttcttaaattttaaaactagaactaaaccagacattgagaggacccagaaatataccctgactaacgtgggtggaatttcatttggcttgactctttggtgaaaaaaaaaaaaatcaggctctcaaggactcaatttggtgaaccaatgccaaatagaaaaatgttcttgacattttccccaaaatagatgtctaaagattttgcacttcaaattggtactttatgtattaaaagtgatattgaaactaaattcctacccaattagttgaaaaatatgaaaaaagcaattgctagagaatgcaatttattaaatgttggtggtcttttaaaaaatgaattcctcttgtagccagtgagatcagttatttatttatttattttaatagtaacaaggtctcactatattgtccaggctgatcttgaactcctggcctcaagctgtcctcccatctcagcttcccaaagtgctgagattataggcatgagccaccatgcctggctagttaatggttattaagtaatacaaacatttctgtgaattccaccagatcattgactttggcatagttcacttaagactttgtttgataaaataaatctctttcactctaattaggaagcatttttgggatcctgattaatgctctaatattgtggggccaaaaaatatgtggaacgtggccctgcagttagatgagctgagatcactatagtactatatagcgctctaaatcctaaatgctagatcactgtaatactgtacagatcagccacttgctggcttgtgactctgggccatttacttcacctctcaaaaggcatatttaaagtgaggaaaataataagtttattttggaaattcagttagatgatgcaaattgtttactgtaatttctagcatgtagttcgtgctccatgcatttaactgttattacaggttgtattagtatcacattaaattacccactgaagtgaaagtgaaaccagaatgctgtcaacgatt

SEQ ID NO: 20677 - DNA, 619 bp, Homo sapiens
  misc_feature 1..619: note = ENST00000461650
  source 1..619: mol_type = unassigned DNA
gcaggggaggccgggaccatcgcagtgacaatttattttcctgcagcagcggcagcagggacggttgctgcaggttcggggtcggccggcctgcgcgtgggcttgcgaggacgctgttcgtcccctgcgctggggtgtccgacagcgaggaggagaacgacgcacggagcccgcgcgactggaaccagcaaagctccatctgtcggcagaggagaagggggaggaggcacggccgaggcaaacgagcggacgcctcgtcgccgggtgccggtatcaccccgctgcaacgccttccagcaaaagccaccgcggcccgggttgcagcagccggacggatgccaaggccacacggcagccacgggggcagccgtcgcagtcgccgtcccacacgggctgcggacaccaagggttgctagacccttcccagctgtaagaatttacagctacaatccaagaaatgagattgcattttacaagaaaagaaaactgatgattcttgcccaaaacatgagaagtagaaggaatgtgagagaaaataatgtagattccgtccaggaagtgctaggtgctttcctggcccaaggatgtgaccttctcttggattttcctgattattatg

SEQ ID NO: 20678 - DNA, 450 bp, Homo sapiens
  misc_feature 1..450: note = ENST00000468698
  source 1..450: mol_type = unassigned DNA
actggttcttgggaatttcaagaagaaacttgttttcttatcctcacctataaagacccttcccagctgtaagaatttacagctacaatccaagaaatgagattgcattttacaagaaaagaaaactgatgattcttgcccaaaacatgagaagtagaaggaatgtgagagaaaataatgtagattccgtccaggaagtgctaggtgctttcctggtgggtacatttacaaattagggacattttaattaatctactggatttgtgattctgtctgctactatcttctttttcttgaccttatgaaagatttatagatggcttcaactgaaactacaggaaatgactcatggttatccctgaagatattagagccagatttccattccttagggctgatgcatagcagctctttgataaatatttgctaaataaatgacaaattttagaa

SEQ ID NO: 20679 - DNA, 2208 bp, Homo sapiens
  misc_feature 1..2208: note = ENST00000371924
  source 1..2208: mol_type = unassigned DNA
ctcttcatctttgtcatgtgattcaacatattcatgggaataatattccatgacctttgctgtcttctattggttagaagccaactacaggtcttaaacacactcaagtggagaggattacacaaacctacagatatcaaggggcaggaatcacagagctatcttagaattctgcctgttatagttctaaggttgagtttaaatccagactggctctaagtttaacagtccatgcttctaatcagtattatcttctttattcctttgaagaaagcaaacctactttataaccttgcatagagttctaagtaaggtatcccgcagcagattcatactgggtgtcagtcaaatgtgaattattttcacaccttcacttttaaagatcagcttcaggaaactataaccacttgcagttttgtattttcaggaagagatttccaacagtctctctaaacactcaggttatataggttatttcaatttgttcctgtttgtctgaggcagagataaccctggggtttgggatttcaaacttgggtctcaaaaaataactttagttctgcttcttgtttttgaaacagatgaagtgattgagaagaaacagtgaacatcctcatttcacagataagacaacatggatcagccttttactgtgaattctctgaaaaagttagctgctatgcctgaccatacagatgtttccctaagcccagaagagcgagtccgtgccctaagcaagcttggttgtaatatcaccatcagtgaagacatcactccacgacgttactttaggtctggagtagagatggagaggatggcgtctgtgtatttggaagaaggaaatttggaaaatgcctttgttctttataataaatttataaccttatttgtagaaaagcttcctaaccatcgagattaccagcaatgtgcagtacctgaaaagcaggatattatgaagaaactgaaggagattgcattcccaaggacagatgaattgaaaaacgaccttttaaagaaatataacgtagaataccaagaatatttgcaaagcaaaaacaaatataaagctgaaattctcaaaaaattggagcatcagagattgatagaggcagaaaggaagcggattgctcagatgcgccagcagcagctagaatcggagcagtttctgtttttcgaagatcaactcaagaagcaagagttagcccgaggtcaaatgcgaagtcagcaaacctcagggctgtcagagcagattgatgggagcgctttgtcctgcttttccacacaccagaacaattccttgctgaatgtatttgcagatcaacctaataaaagtgatgcaaccaattatgctagccactctcctcctgtaaacagggccttaacgccagctgctactctaagtgctgttcagaatttagtggttgaaggactgcgatgtgtagttttgccagaagatctttgccacaaatttctgcaactggcagaatctaatacagtgagaggaatagaaacctgtggaatactctgtggaaaactgacacataatgaatttactattacccatgtaattgtgccaaagcagtctgcgggaccagactattgtgacatggagaatgtagaggaattattcaatgttcaggatcaacatgatctcctcactctaggatggatccatacacatcccactcaaactgcatttttatccagcgttgatcttcacactcactgttcctatcaactcatgttgccagaggccattgccattgtttgctcaccaaagcataaagacactggcatcttcaggctcaccaatgctggcatgcttgaggtttctgcttgtaaaaaaaagggctttcatccacacaccaaggagcccaggctgttcagtatatgcaaacatgtgttggtaaaagacataaaaataattgtgttggatctgaggtgatatgttctgaatgtaagcaccgtcaacatcagacacctactcatggacatgtggttgccggattttcttaagatgtttccagaaatgactgatattttatatttatacattttagatgacaaagcttgatatttattgctgttgcacattttaaagttttctttttgggttgctctgtgtcaagagaggttacatggtgttaaatcggtacctgataatgtacccaaatactatggccagataataaattgtgctgcaaacaa

SEQ ID NO: 20680 - DNA, 1899 bp, Homo sapiens
  misc_feature 1..1899: note = ENST00000371922
  source 1..1899: mol_type = unassigned DNA
atattatctgacctaataagcctggatattttgttagaactggagagcttgggactcctcctttttagcaaaactctgggttagtggtgacagagaaggttggaacacattttaataaccattttttagtgattccttcttatccataaatttccagcagagtatgagttctagagtcaaatgcgaaaggttctagggcagcactgttcaatagaactcctgtgatgatggaagtgttctgtttggcactttccaatatggtatccactagccacatgtggcttctgggtacttaaatgtgactgactagtgtccctgaggtactgaatttctaattttgtttaattttaatcaagttcaaataaccacatgtggctagtggccactatattagaagtgcagtaggggtgagatattttgtttcatatggtcttgttggtctgactgagcaaacaaccttgacgttgattttccagtatttaaaagcattagggaatgaagggatcctgattgtcatggcctgtctctggtaaaatatcagtggatttagaactgctatgttaatcagatcaaggggcttttgccctgatgttatgtatttctctcactgttccatgagtgtccctgtgggcatatcacagtatctagcattttctctgtctgcttgaagactgaaaatgtctaattccagttcaatgtttctccttggaaactaaccttctcttctggctgccacactttttagaacaaatataaagctgaaattctcaaaaaattggagcatcagagattgatagaggcagaaaggaagcggattgctcagatgcgccagcagcagctagaatcggagcagtttctgtttttcgaagatcaactcaagaagcaagagttagcccgaggtcaaatgcgaagtcagcaaacctcagggctgtcagagcagattgatgggagcgctttgtcctgcttttccacacaccagaacaattccttgctgaatgtatttgcagatcaacctaataaaagtgatgcaaccaattatgctagccactctcctcctgtaaacagggccttaacgccagctgctactctaagtgctgttcagaatttagtggttgaaggactgcgatgtgtagttttgccagaagatctttgccacaaatttctgcaactggcagaatctaatacagtgagaggaatagaaacctgtggaatactctgtggaaaactgacacataatgaatttactattacccatgtaattgtgccaaagcagtctgcgggaccagactattgtgacatggagaatgtagaggaattattcaatgttcaggatcaacatgatctcctcactctaggatggatccatacacatcccactcaaactgcatttttatccagcgttgatcttcacactcactgttcctatcaactcatgttgccagaggccattgccattgtttgctcaccaaagcataaagacactggcatcttcaggctcaccaatgctggcatgcttgaggtttctgcttgtaaaaaaaagggctttcatccacacaccaaggagcccaggctgttcagtatatgcaaacatgtgttggtaaaagacataaaaataattgtgttggatctgaggtgatatgttctgaatgtaagcaccgtcaacatcagacacctactcatggacatgtggttgccggattttcttaagatgtttccagaaatgactgatattttatatttatacattttagatgacaaagcttgatatttattgctgttgcacattttaaagttttctttttgggttgctctgtgtcaagagaggttacatggtgttaaatcggtacctgataatgtacccaaatactatggccagataataaattgtgctgcaaacaa

SEQ ID NO: 20681 - DNA, 5917 bp, Homo sapiens
  misc_feature 1..5917: note = ENST00000336934
  source 1..5917: mol_type = unassigned DNA
aaaaatcgctgggtctgttgagctgtcctgggctgggtgccttgctctttgactgagactggagacagacggcaacagccacaggcagactgaggtggcaataggaaatctgccgagatgttcagtcaggtgcccaggaccccagcctcaggctgctactacctaaattccatgacacctgagggccaggagatgtacttgcgatttgatcagactacaagacgctctccttacaggatgagccggattctagcacgccatcagctagtgactaaaattcaacaagaaattgaggcaaaagaagcatgtgactggctccgtgctgccgggttcccgcaatacgctcagttatatgaggattcacaatttcccatcaacattgtggctgtcaagaatgatcatgattttcttgaaaaggaccttgtagaacctctttgcagacgactaaatacgttgaacaagtgtgcctcaatgaaacttgatgtgaacttccaaaggaaaaagggtgacgactccgatgaggaagatctttgtatcagcaacaaatggactttccaaagaaccagtcgcaggtggtctcgtgtggacgacctctacacgctgctccctcgaggagacagaaatgggtcaccgggaggcacggggatgaggaacacgaccagcagtgagagcgtcctcacagacctgagcgagcctgaggtctgctccattcacagcgaaagcagtggaggcagcgacagtcgcagccagccgggccagtgctgtacagacaacccggtcatgctggatgccccactcgtcagcagcagcctcccacagccccccagagatgtcctcaaccaccccttccaccccaagaatgagaagcccacgagggctagggccaaatcatttttgaaacgcatggaaacactccgagggaagggagcccacgggaggcataaggggtctgggcggacaggtggcctggtgatcagtgggcccatgttgcagcaggagccagagtcctttaaggctatgcagtgcatccaaataccaaatggagatctccagaattcgccgccacctgcctgcagaaaagggctcccatgctctggcaagtcgagtggcgagagcagcccgtcggagcacagcagcagcggggtgagcacgccctgcctgaaggaacgcaagtgccacgaggccaacaagcgcgggggcatgtacttggaggacctagatgtgctggcggggacagcactgccggatgcaggggaccaaagccgtatgcatgaatttcactcccaagagaatttggtggtgcatattcccaaggatcacaaaccaggaacattccccaaggcactttctattgaaagcctctctcccacagatagtagcaatggggttaattggaggaccggtagcatctccctgggcagagagcaggtccctggtgccagggagccccggctcatggcgtcctgccacagagccagccgagtcagtatctatgacaatgtccctggctcccatctgtatgccagcacaggagatcttttggacttggagaaagatgaccttttccctcacttggatgacattctgcagcatgtcaatgggctccaagaggtagtcgatgactggtccaaagatgtcttgcctgaactgcaaactcatgatacattggttggggaacctggcttatccacctttccatctcctaatcagatcaccttagattttgaaggtaactctgtctcagaaggtcggacgacacccagtgatgtggaaagagatgtaacatctcttaatgaatctgagcctcctggggtcagagacaggagggattctggtgtaggggcctctctgaccaggccaaacaggcgactccgatggaacagtttccagctgtcgcaccagccccggccggccccagcatcgccccacatcagcagccagacggccagccagctgagcctgctccagcgcttctcactgctccgcctcacggccatcatggagaagcactccatgtccaacaagcacggctggacatggtcagttccaaagttcatgaagaggatgaaagttcccgactacaaagacaaggctgtctttggcgttcctctcatagtccacgtccaaagaacgggacagcccctgcctcaaagtattcagcaagcactgagatatctacgcagcaactgcctcgatcaggtgggtctttttcgcaaatcaggagtgaagtctcgaatccatgcccttcgccaaatgaatgaaaacttccctgagaacgtcaactatgaagaccagtctgcttatgatgtggcggatatggtgaaacagttcttccgggacctccctgagcctcttttcaccaacaagctcagtgagacctttctccatatctatcagtatgtctccaaagagcagcggctgcaggccgtgcaggctgccatcctgctactggccgatgagaacagggaggtcctgcagacgctcttgtgtttcctgaacgacgtcgtcaacttggtggaagagaatcagatgacgcccatgaacctggcagtgtgtctggccccctccctctttcatcttaatttattgaagaaagaaagctctccacgagtcatacagaagaaatatgccactgggaagccagatcaaaaggacctcaacgagaatctggcagcagctcaggggctagcgcacatgatcatggaatgcgacagactttttgaggttccacacgagttggtggcccagtctcgtaactcgtatgtggaggctgagatccacgtgccaaccctggaagaattggggacacagctggaggagagtggggcaactttccacacttacctgaaccatctcatccagggcctccagaaagaagccaaggagaagttcaaaggatgggtcacgtgctccagcacggacaatacagatcttgctttcaaaaaggtgggcgacgggaacccgctgaagctgtggaaggcttctgtggaggtggaagcacccccctcagtggtcctgaaccgcgtgctgagagagcgccacctgtgggacgaggactttgtgcagtggaaggttgtggaaactctagacaggcaaacagagatctaccagtatgtgctgaacagcatggctccccatccttccagagactttgtggttctcaggacctggaaaactgatttgcccaaaggaatgtgtaccctggtgtccctctccgtggagcatgaggaagcccagctcctgggtggtgtgcgagcagtggtgatggactcgcagtacttgatagaaccgtgtggctctggcaagtcaagactgactcacatctgcaggatagacctgaaaggtcactccccagaatggtacagcaaaggctttggacatctgtgtgcagcagaagttgccaggattagaaactctttccagcccctcattgctgagggcccagaaactaaaatctgagttttgcccagtgtgacatcaaactcagggaagaggaagctaaagtgacgagtgtggcagagagtgtgcatgtgagaaagcgagagaaagaggaactgaaggacgcggttaatgcctaaaaatggaaacgttaagaagttggaatgttggagatgcaagaatttccaagaactttcttagccttcctggagatggctacatccctactaatataattttaaaatgagaactttatatatattacttaaaattaaatggactattccttgtgcattgcctaatttgctatttaaaggcttctaagaagcgtatacctaactgtaaataaatgtatgtatagcatatgtacatatgtgtgtatatctccatctttactgtatatatgtaaaataccaattttatatagaattgtgtgttttgaaaatgacggtgtctgactcagtgagtcccttcctcacacagttctttccaagtggctctgggccccatctctccactgtcctgtaagctgtgcagaacctgctgctaacaccaaggtgtgaacatgccctgatgcctaaccaaagatgagttaaccaaaggaaaataacattaaaggagacttatgtgttaacgctttgtttctgctattcaaaaactgagagtggagatctgggataaagcaaggaaataataattactcctccttaaagcaaatgggggggtgagaagtcattaccaaatttaaagctagatgaggagttgccactgggcccagtaagatggaatttcagtgagatatggaccaccggagtcagcgagagtgactgaaacagaagcgatacctctcgctcccatgcccatcactacagaccccaagtcaagatgaatatcatagcctttacttcttcacagccaaagggagcccctgtgttgtctcaagtttttataaatacatttcataatgttattaaatgtcattctatttgaccagtggcctatttggtcacagttaattggtgttttcttattgcactgaattcaactccagacaccatacaaagggagatgatggccattccgttcaaatcctagatcgttacagcttcagggaattcatattttgttatgtgtaggatactcttaaaatgtaattcattaaacttttacaatctgaaagacagggtttttaactaacatgagaccaaaactatgttctttgattagttttagatagtataatcgggtttattaattcttctgtgtttcttcactagccagtccaagctacctatgcatttgacccaaccttatttattattgtacagatgaagcgaattgactccctttagccaactgctaatggatcgaatgtgctttttattgtaattcaacagctatagagagaaagataacttattgtgtgtttgatttcagggagagagattttctttggtcatccataatagagattgataagatttagcaactggtgttggagaaaaaaagaaaagcaaatgagtgttttcaggtttttttgcattatatgcatttatgtaatgtttctgttatcagcaatgtgcaattattttattgagaggaataaaaaagctttctatgagtttggtatggtgcgaggaaaatcttacagtttgaattatgacctagaaatttttcattcccatatctacctaagaaggaagcagtaaatccataatttaccttttgggcaatgctttgtgagcaaaacaaagtcacttctgccataacatcttgaatttaaccatatatgccagattactttatatgcatcaacaagatcaccagtgaagtttaatctagctaaacactggtcctgctcctgagatgggatcctatgtgtttggaaaacgtgataggcacacgaggatgagtggctttgtatcgcccagagaggtgcttgtccagatttcacatgcacatgaattgcctggggatcttgtgaaactgcagactctgctccaagtaatctgggctgggcctgagattctgcatttctaaggagtctcagggatgcctatgctgctggcctaaaaccacactcagaaacgaggacctagaagatccctaaaacagaataagaacaaatgtgattgtatttctgattctccctctcttcgaattatctgacttttttgtttttgtgcacatagtaatcatatcaccgctgcataacaacacagtgcatctttttaaaacaaggaaaagggaaaaaaaggagaaaaaacgatgcatcaagcttgtttgtcaaataccacagtattttattcattgttatcttgccaatggaaataaagtatgatattgcatttaaatattatatttatacctcatgtatatttttacctcaattgttgatatcaatcatcaattgtaaataaataattgccaaggcaaataaatttatatatattaaatatttcctattttctataaaata

SEQ ID NO: 20682 - DNA, 5798 bp, Homo sapiens
  misc_feature 1..5798: note = ENST00000255486
  source 1..5798: mol_type = unassigned DNA
cggaaacatgagagaggactatcatctgctccttgctctgaatttctttgaacctccatgctggaaccctcctcagttctccatgcaaacgttaaccaggcccctttgtggtgcttggtgctgcgctggtgcagagaatgcaaagacactgtctgtggtgggaaacagaaaagcagagtgaaccacacattccagcgccgggaaattgaggcaaaagaagcatgtgactggctccgtgctgccgggttcccgcaatacgctcagttatatgaggattcacaatttcccatcaacattgtggctgtcaagaatgatcatgattttcttgaaaaggaccttgtagaacctctttgcagacgactaaatacgttgaacaagtgtgcctcaatgaaacttgatgtgaacttccaaaggaaaaagggtgacgactccgatgaggaagatctttgtatcagcaacaaatggactttccaaagaaccagtcgcaggtggtctcgtgtggacgacctctacacgctgctccctcgaggagacagaaatgggtcaccgggaggcacggggatgaggaacacgaccagcagtgagagcgtcctcacagacctgagcgagcctgaggtctgctccattcacagcgaaagcagtggaggcagcgacagtcgcagccagccgggccagtgctgtacagacaacccggtcatgctggatgccccactcgtcagcagcagcctcccacagccccccagagatgtcctcaaccaccccttccaccccaagaatgagaagcccacgagggctagggccaaatcatttttgaaacgcatggaaacactccgagggaagggagcccacgggaggcataaggggtctgggcggacaggtggcctggtgatcagtgggcccatgttgcagcaggagccagagtcctttaaggctatgcagtgcatccaaataccaaatggagatctccagaattcgccgccacctgcctgcagaaaagggctcccatgctctggcaagtcgagtggcgagagcagcccgtcggagcacagcagcagcggggtgagcacgccctgcctgaaggaacgcaagtgccacgaggccaacaagcgcgggggcatgtacttggaggacctagatgtgctggcggggacagcactgccggatgcaggggaccaaagccgtatgcatgaatttcactcccaagagaatttggtggtgcatattcccaaggatcacaaaccaggaacattccccaaggcactttctattgaaagcctctctcccacagatagtagcaatggggttaattggaggaccggtagcatctccctgggcagagagcaggtccctggtgccagggagccccggctcatggcgtcctgccacagagccagccgagtcagtatctatgacaatgtccctggctcccatctgtatgccagcacaggagatcttttggacttggagaaagatgaccttttccctcacttggatgacattctgcagcatgtcaatgggctccaagaggtagtcgatgactggtccaaagatgtcttgcctgaactgcaaactcatgatacattggttggggaacctggcttatccacctttccatctcctaatcagatcaccttagattttgaaggtaactctgtctcagaaggtcggacgacacccagtgatgtggaaagagatgtaacatctcttaatgaatctgagcctcctggggtcagagacaggagggattctggtgtaggggcctctctgaccaggccaaacaggcgactccgatggaacagtttccagctgtcgcaccagccccggccggccccagcatcgccccacatcagcagccagacggccagccagctgagcctgctccagcgcttctcactgctccgcctcacggccatcatggagaagcactccatgtccaacaagcacggctggacatggtcagttccaaagttcatgaagaggatgaaagttcccgactacaaagacaaggctgtctttggcgttcctctcatagtccacgtccaaagaacgggacagcccctgcctcaaagtattcagcaagcactgagatatctacgcagcaactgcctcgatcaggtgggtctttttcgcaaatcaggagtgaagtctcgaatccatgcccttcgccaaatgaatgaaaacttccctgagaacgtcaactatgaagaccagtctgcttatgatgtggcggatatggtgaaacagttcttccgggacctccctgagcctcttttcaccaacaagctcagtgagacctttctccatatctatcagtatgtctccaaagagcagcggctgcaggccgtgcaggctgccatcctgctactggccgatgagaacagggaggtcctgcagacgctcttgtgtttcctgaacgacgtcgtcaacttggtggaagagaatcagatgacgcccatgaacctggcagtgtgtctggccccctccctctttcatcttaatttattgaagaaagaaagctctccacgagtcatacagaagaaatatgccactgggaagccagatcaaaaggacctcaacgagaatctggcagcagctcaggggctagcgcacatgatcatggaatgcgacagactttttgaggttccacacgagttggtggcccagtctcgtaactcgtatgtggaggctgagatccacgtgccaaccctggaagaattggggacacagctggaggagagtggggcaactttccacacttacctgaaccatctcatccagggcctccagaaagaagccaaggagaagttcaaaggatgggtcacgtgctccagcacggacaatacagatcttgctttcaaaaaggtgggcgacgggaacccgctgaagctgtggaaggcttctgtggaggtggaagcacccccctcagtggtcctgaaccgcgtgctgagagagcgccacctgtgggacgaggactttgtgcagtggaaggttgtggaaactctagacaggcaaacagagatctaccagtatgtgctgaacagcatggctccccatccttccagagactttgtggttctcaggacctggaaaactgatttgcccaaaggaatgtgtaccctggtgtccctctccgtggagcatgaggaagcccagctcctgggtggtgtgcgagcagtggtgatggactcgcagtacttgatagaaccgtgtggctctggcaagtcaagactgactcacatctgcaggatagacctgaaaggtcactccccagaatggtacagcaaaggctttggacatctgtgtgcagcagaagttgccaggattagaaactctttccagcccctcattgctgagggcccagaaactaaaatctgagttttgcccagtgtgacatcaaactcagggaagaggaagctaaagtgacgagtgtggcagagagtgtgcatgtgagaaagcgagagaaagaggaactgaaggacgcggttaatgcctaaaaatggaaacgttaagaagttggaatgttggagatgcaagaatttccaagaactttcttagccttcctggagatggctacatccctactaatataattttaaaatgagaactttatatatattacttaaaattaaatggactattccttgtgcattgcctaatttgctatttaaaggcttctaagaagcgtatacctaactgtaaataaatgtatgtatagcatatgtacatatgtgtgtatatctccatctttactgtatatatgtaaaataccaattttatatagaattgtgtgttttgaaaatgacggtgtctgactcagtgagtcccttcctcacacagttctttccaagtggctctgggccccatctctccactgtcctgtaagctgtgcagaacctgctgctaacaccaaggtgtgaacatgccctgatgcctaaccaaagatgagttaaccaaaggaaaataacattaaaggagacttatgtgttaacgctttgtttctgctattcaaaaactgagagtggagatctgggataaagcaaggaaataataattactcctccttaaagcaaatgggggggtgagaagtcattaccaaatttaaagctagatgaggagttgccactgggcccagtaagatggaatttcagtgagatatggaccaccggagtcagcgagagtgactgaaacagaagcgatacctctcgctcccatgcccatcactacagaccccaagtcaagatgaatatcatagcctttacttcttcacagccaaagggagcccctgtgttgtctcaagtttttataaatacatttcataatgttattaaatgtcattctatttgaccagtggcctatttggtcacagttaattggtgttttcttattgcactgaattcaactccagacaccatacaaagggagatgatggccattccgttcaaatcctagatcgttacagcttcagggaattcatattttgttatgtgtaggatactcttaaaatgtaattcattaaacttttacaatctgaaagacagggtttttaactaacatgagaccaaaactatgttctttgattagttttagatagtataatcgggtttattaattcttctgtgtttcttcactagccagtccaagctacctatgcatttgacccaaccttatttattattgtacagatgaagcgaattgactccctttagccaactgctaatggatcgaatgtgctttttattgtaattcaacagctatagagagaaagataacttattgtgtgtttgatttcagggagagagattttctttggtcatccataatagagattgataagatttagcaactggtgttggagaaaaaaagaaaagcaaatgagtgttttcaggtttttttgcattatatgcatttatgtaatgtttctgttatcagcaatgtgcaattattttattgagaggaataaaaaagctttctatgagtttggtatggtgcgaggaaaatcttacagtttgaattatgacctagaaatttttcattcccatatctacctaagaaggaagcagtaaatccataatttaccttttgggcaatgctttgtgagcaaaacaaagtcacttctgccataacatcttgaatttaaccatatatgccagattactttatatgcatcaacaagatcaccagtgaagtttaatctagctaaacactggtcctgctcctgagatgggatcctatgtgtttggaaaacgtgataggcacacgaggatgagtggctttgtatcgcccagagaggtgcttgtccagatttcacatgcacatgaattgcctggggatcttgtgaaactgcagactctgctccaagtaatctgggctgggcctgagattctgcatttctaaggagtctcagggatgcctatgctgctggcctaaaaccacactcagaaacgaggacctagaagatccctaaaacagaataagaacaaatgtgattgtatttctgattctccctctcttcgaattatctgacttttttgtttttgtgcacatagtaatcatatcaccgctgcataacaacacagtgcatctttttaaaacaaggaaaagggaaaaaaaggagaaaaaacgatgcatcaagcttgtttgtcaaataccacagtattttattcattgttatcttgccaatggaaataaagtatgatattgcatttaaatattatatttatacctcatgtatatttttacctcaattgttgatatcaatcatcaattgtaaataaataattgccaaggcaaataaattt

SEQ ID NO: 20683 - DNA, 5784 bp, Homo sapiens
  misc_feature 1..5784: note = ENST00000399365
  source 1..5784: mol_type = unassigned DNA
ctcacagacaacagccaagcacagaggaaatattagctggcagagataacgaagagaaaacactcggtgacagatgcaccatctgtcagtttctgaggagcagttttcaagaaagctgaaaatgaattgaagaagagaggggttttgtttgaaaggtacagcacagcctaaggacaattttaaacaaaaaattgaggcaaaagaagcatgtgactggctccgtgctgccgggttcccgcaatacgctcagttatatgaggattcacaatttcccatcaacattgtggctgtcaagaatgatcatgattttcttgaaaaggaccttgtagaacctctttgcagacgactaaatacgttgaacaagtgtgcctcaatgaaacttgatgtgaacttccaaaggaaaaagggtgacgactccgatgaggaagatctttgtatcagcaacaaatggactttccaaagaaccagtcgcaggtggtctcgtgtggacgacctctacacgctgctccctcgaggagacagaaatgggtcaccgggaggcacggggatgaggaacacgaccagcagtgagagcgtcctcacagacctgagcgagcctgaggtctgctccattcacagcgaaagcagtggaggcagcgacagtcgcagccagccgggccagtgctgtacagacaacccggtcatgctggatgccccactcgtcagcagcagcctcccacagccccccagagatgtcctcaaccaccccttccaccccaagaatgagaagcccacgagggctagggccaaatcatttttgaaacgcatggaaacactccgagggaagggagcccacgggaggcataaggggtctgggcggacaggtggcctggtgatcagtgggcccatgttgcagcaggagccagagtcctttaaggctatgcagtgcatccaaataccaaatggagatctccagaattcgccgccacctgcctgcagaaaagggctcccatgctctggcaagtcgagtggcgagagcagcccgtcggagcacagcagcagcggggtgagcacgccctgcctgaaggaacgcaagtgccacgaggccaacaagcgcgggggcatgtacttggaggacctagatgtgctggcggggacagcactgccggatgcaggggaccaaagccgtatgcatgaatttcactcccaagagaatttggtggtgcatattcccaaggatcacaaaccaggaacattccccaaggcactttctattgaaagcctctctcccacagatagtagcaatggggttaattggaggaccggtagcatctccctgggcagagagcaggtccctggtgccagggagccccggctcatggcgtcctgccacagagccagccgagtcagtatctatgacaatgtccctggctcccatctgtatgccagcacaggagatcttttggacttggagaaagatgaccttttccctcacttggatgacattctgcagcatgtcaatgggctccaagaggtagtcgatgactggtccaaagatgtcttgcctgaactgcaaactcatgatacattggttggggaacctggcttatccacctttccatctcctaatcagatcaccttagattttgaaggtaactctgtctcagaaggtcggacgacacccagtgatgtggaaagagatgtaacatctcttaatgaatctgagcctcctggggtcagagacaggagggattctggtgtaggggcctctctgaccaggccaaacaggcgactccgatggaacagtttccagctgtcgcaccagccccggccggccccagcatcgccccacatcagcagccagacggccagccagctgagcctgctccagcgcttctcactgctccgcctcacggccatcatggagaagcactccatgtccaacaagcacggctggacatggtcagttccaaagttcatgaagaggatgaaagttcccgactacaaagacaaggctgtctttggcgttcctctcatagtccacgtccaaagaacgggacagcccctgcctcaaagtattcagcaagcactgagatatctacgcagcaactgcctcgatcaggtgggtctttttcgcaaatcaggagtgaagtctcgaatccatgcccttcgccaaatgaatgaaaacttccctgagaacgtcaactatgaagaccagtctgcttatgatgtggcggatatggtgaaacagttcttccgggacctccctgagcctcttttcaccaacaagctcagtgagacctttctccatatctatcagtatgtctccaaagagcagcggctgcaggccgtgcaggctgccatcctgctactggccgatgagaacagggaggtcctgcagacgctcttgtgtttcctgaacgacgtcgtcaacttggtggaagagaatcagatgacgcccatgaacctggcagtgtgtctggccccctccctctttcatcttaatttattgaagaaagaaagctctccacgagtcatacagaagaaatatgccactgggaagccagatcaaaaggacctcaacgagaatctggcagcagctcaggggctagcgcacatgatcatggaatgcgacagactttttgaggttccacacgagttggtggcccagtctcgtaactcgtatgtggaggctgagatccacgtgccaaccctggaagaattggggacacagctggaggagagtggggcaactttccacacttacctgaaccatctcatccagggcctccagaaagaagccaaggagaagttcaaaggatgggtcacgtgctccagcacggacaatacagatcttgctttcaaaaaggtgggcgacgggaacccgctgaagctgtggaaggcttctgtggaggtggaagcacccccctcagtggtcctgaaccgcgtgctgagagagcgccacctgtgggacgaggactttgtgcagtggaaggttgtggaaactctagacaggcaaacagagatctaccagtatgtgctgaacagcatggctccccatccttccagagactttgtggttctcaggacctggaaaactgatttgcccaaaggaatgtgtaccctggtgtccctctccgtggagcatgaggaagcccagctcctgggtggtgtgcgagcagtggtgatggactcgcagtacttgatagaaccgtgtggctctggcaagtcaagactgactcacatctgcaggatagacctgaaaggtcactccccagaatggtacagcaaaggctttggacatctgtgtgcagcagaagttgccaggattagaaactctttccagcccctcattgctgagggcccagaaactaaaatctgagttttgcccagtgtgacatcaaactcagggaagaggaagctaaagtgacgagtgtggcagagagtgtgcatgtgagaaagcgagagaaagaggaactgaaggacgcggttaatgcctaaaaatggaaacgttaagaagttggaatgttggagatgcaagaatttccaagaactttcttagccttcctggagatggctacatccctactaatataattttaaaatgagaactttatatatattacttaaaattaaatggactattccttgtgcattgcctaatttgctatttaaaggcttctaagaagcgtatacctaactgtaaataaatgtatgtatagcatatgtacatatgtgtgtatatctccatctttactgtatatatgtaaaataccaattttatatagaattgtgtgttttgaaaatgacggtgtctgactcagtgagtcccttcctcacacagttctttccaagtggctctgggccccatctctccactgtcctgtaagctgtgcagaacctgctgctaacaccaaggtgtgaacatgccctgatgcctaaccaaagatgagttaaccaaaggaaaataacattaaaggagacttatgtgttaacgctttgtttctgctattcaaaaactgagagtggagatctgggataaagcaaggaaataataattactcctccttaaagcaaatgggggggtgagaagtcattaccaaatttaaagctagatgaggagttgccactgggcccagtaagatggaatttcagtgagatatggaccaccggagtcagcgagagtgactgaaacagaagcgatacctctcgctcccatgcccatcactacagaccccaagtcaagatgaatatcatagcctttacttcttcacagccaaagggagcccctgtgttgtctcaagtttttataaatacatttcataatgttattaaatgtcattctatttgaccagtggcctatttggtcacagttaattggtgttttcttattgcactgaattcaactccagacaccatacaaagggagatgatggccattccgttcaaatcctagatcgttacagcttcagggaattcatattttgttatgtgtaggatactcttaaaatgtaattcattaaacttttacaatctgaaagacagggtttttaactaacatgagaccaaaactatgttctttgattagttttagatagtataatcgggtttattaattcttctgtgtttcttcactagccagtccaagctacctatgcatttgacccaaccttatttattattgtacagatgaagcgaattgactccctttagccaactgctaatggatcgaatgtgctttttattgtaattcaacagctatagagagaaagataacttattgtgtgtttgatttcagggagagagattttctttggtcatccataatagagattgataagatttagcaactggtgttggagaaaaaaagaaaagcaaatgagtgttttcaggtttttttgcattatatgcatttatgtaatgtttctgttatcagcaatgtgcaattattttattgagaggaataaaaaagctttctatgagtttggtatggtgcgaggaaaatcttacagtttgaattatgacctagaaatttttcattcccatatctacctaagaaggaagcagtaaatccataatttaccttttgggcaatgctttgtgagcaaaacaaagtcacttctgccataacatcttgaatttaaccatatatgccagattactttatatgcatcaacaagatcaccagtgaagtttaatctagctaaacactggtcctgctcctgagatgggatcctatgtgtttggaaaacgtgataggcacacgaggatgagtggctttgtatcgcccagagaggtgcttgtccagatttcacatgcacatgaattgcctggggatcttgtgaaactgcagactctgctccaagtaatctgggctgggcctgagattctgcatttctaaggagtctcagggatgcctatgctgctggcctaaaaccacactcagaaacgaggacctagaagatccctaaaacagaataagaacaaatgtgattgtatttctgattctccctctcttcgaattatctgacttttttgtttttgtgcacatagtaatcatatcaccgctgcataacaacacagtgcatctttttaaaacaaggaaaagggaaaaaaaggagaaaaaacgatgcatcaagcttgtttgtcaaataccacagtattttattcattgttatcttgccaatggaaataaagtatgatattgcatttaaatattatatttatacctcatgtatatttttacctcaattgttgatatcaatcatcaattgtaaataaataattgccaaggcaaataaattt

SEQ ID NO: 20684 - DNA, 582 bp, Homo sapiens
  misc_feature 1..582: note = ENST00000491333
  source 1..582: mol_type = unassigned DNA
ccctttctaaaccctgcttggccatcgagagcgtgggatccaaagttcaattgcaagggttgggactcagctctgcctcccatgagctgcgaggcctcagcaattactgacttctttgtgcctttcctgctgttctggttgtttttgttgatgatgactctgggtgcgtgttcacacgaggaatgtggagcttacacagtgcttcccagctggctctttctatgtctgctcctccaatgacctggcatccacttttcctcagatgtctccaaagagcagcggctgcaggccgtgcaggctgccatcctgctactggccgatgagaacagggaggtcctgcagacgctcttgtgtttcctgaacgacgtcgtcaacttggtggaagagaatcagatgacgcccatgaacctggcagtgtgtctggccccctccctctttcatcttaatttattgaagaaagaaagctctccacgagtcatacagaagaaatatgccactgggaagccagatcaaaaggacctcaacgagaatctggcagcagctcaggggctagcgcacatgatcatggaatgcgacagactt

SEQ ID NO: 20685 - DNA, 2037 bp, Homo sapiens
  misc_feature 1..2037: note = ENST00000567873
  source 1..2037: mol_type = unassigned DNA
aataacctagcgcggcgtttctggtggccaggcatcccggtcctcgcgcgtggcgcagcctcccagcgccggaccgacccatgtcgcgcccgcattgggtcccgggaccccggcgggagtgccgcgtccgtcctttccagtcgccgggagtctgagtcgcgggccacgcgggagtggcggtggagagcccgccggtcgttatgaggacggatctaaaatgaccagcaaacggaaaccttgccaaacgcagctcaggagatccatcagtgagcagttgcgggactccacggccagagcctgggatctgctgtggaagaacgtccgggagaggcggctggcagaaattgaggcaaaagaagcatgtgactggctccgtgctgccgggttcccgcaatacgctcagttatatgaggattcacaatttcccatcaacattgtggctgtcaagaatgatcatgattttcttgaaaaggaccttgtagaacctctttgcagacgactaaatacgttgaacaagtgtgcctcaatgaaacttgatgtgaacttccaaaggaaaaagggtgacgactccgatgaggaagatctttgtatcagcaacaaatggactttccaaagaaccagtcgcaggtggtctcgtgtggacgacctctacacgctgctccctcgaggagacagaaatgggtcaccgggaggcacggggatgaggaacacgaccagcagtgagagcgtcctcacagacctgagcgagcctgaggtctgctccattcacagcgaaagcagtggaggcagcgacagtcgcagccagccgggccagtgctgtacagacaacccggtcatgctggatgccccactcgtcagcagcagcctcccacagccccccagagatgtcctcaaccaccccttccaccccaagaatgagaagcccacgagggctagggccaaatcatttttgaaacgcatggaaacactccgagggaagggagcccacgggaggcataaggggtctgggcggacaggtggcctggtgatcagtgggcccatgttgcagcaggagccagagtcctttaaggctatgcagtgcatccaaataccaaatggagatctccagaattcgccgccacctgcctgcagaaaagggctcccatgctctggcaagtcgagtggcgagagcagcccgtcggagcacagcagcagcggggtgagcacgccctgcctgaaggaacgcaagtgccacgaggccaacaagcgcgggggcatgtacttggaggacctagatgtgctggcggggacagcactgccggatgcaggggaccaaagccgtatgcatgaatttcactcccaagagaatttggtggtgcatattcccaaggatcacaaaccaggaacattccccaaggcactttctattgaaagcctctctcccacagatagtagcaatggggttaattggaggaccggtagcatctccctgggcagagagcaggtccctggtgccagggagccccggctcatggcgtcctgccacagagccagccgagtcagtatctatgacaatgtccctggctcccatctgtatgccagcacaggagatcttttggacttggagaaagatgaccttttccctcacttggatgacattctgcagcatgtcaatgggctccaagaggtagtcgatgactggtccaaagatgtcttgcctgaactgcaaactcatgatacattggttggggaacctggcttatccacctttccatctcctaatcagatcaccttagattttgaaggtaactctgtctcagaaggtcggacgacacccagtgatgtggaaagagatgtaacatctcttaatgaatctgagcctcctggggtcagagacaggagggattctggtgtaggggcctctctgaccaggccaaacaggcgactccgatggaacagtttccagctgtcgcaccagccccggccggccccagcatcgccccacatcagcagccagacggccagccagctgagcctgctccagcgcttctcactgct

SEQ ID NO: 20686 - DNA, 939 bp, Homo sapiens
  misc_feature 1..939: note = ENST00000487412
  source 1..939: mol_type = unassigned DNA
aaaaatcgctgggtctgttgagctgtcctgggctgggtgccttgctctttgactgagactggagacagacggcaacagccacaggcagactgaggtggcaataggaaatctgccgagatgttcagtcaggtgcccaggaccccagcctcaggctgctactacctaaattccatgacacctgagggccaggagatgtacttgcgatttgatcagactacaagacgctctccttacaggatgagccggattctagcacgccatcagctagtgactaaaattcaacaagaaattgaggcaaaagaagcatgtgactggctccgtgctgccgggttcccgcaatacgctcagttatatgaggattcacaatttcccatcaacattgtggctgtcaagaatgatcatgattttcttgaaaaggaccttgtagaacctctttgcagacgactaaatacgttgaacaagtgtgcctcaatgaaacttgatgtgaacttccaaaggaaaaagaagagaaaagggaccctttaaggattcgagatgaccttccctgcctctgtaagagtcaggtggaggagtattctcgagcttagctgcacgcctcactggaagactaacaacccagccaagagcatttcaggagacaggacaccagcacttctgccgcctgcagctcgggctctccactcccgcggcattcccagcggcccattcctgcttccaaacaggcaggcccggccacgtagctccagttaacgtctaaatttctatgtgactatggatgcgttgccttttgcagctgtggattcgtgtgggttcctgtttccagtgtaaagatatggccaaattccgtcttttgaaaaaagcccttctttatggaatgtctggttggcatctgtctctgaggaatatataatttcagtgaagaatgttctcatttttaga

SEQ ID NO: 20687 - DNA, 568 bp, Homo sapiens
  misc_feature 1..568: note = ENST00000498019
  source 1..568: mol_type = unassigned DNA
ttgactgagactggagacagacggcaacagccacaggcagactgaggtggcaataggaaatctgccgagatgttcagtcaggtgcccaggaccccagcctcaggctgctactacctaaattccatgacacctgagggccaggagatgtacttgcgatttgatcagactacaagacgctctccttacaggatgagccggattctagcacgccatcagctagtgactaaaattcaacaagaaattgaggcaaaagaagcatgtgactggctccgtgctgccgggttcccgcaatacgctcagttatatgaggattcacaatttcccatcaacattgtggctgtcaagaatgatcatgattttcttgaaaaggaccttgtagaacctctttgcaggtactcaggatgacttttatatgcctaagctttcaggaagaatgtgtaagaagatacaaaatcagggaggagattgaggggaagagagagactttatattcttgttattcacttctctatgtatatttcaggtgtttgtattgcattattaaaaacattagcaatgttttaaaaaa

SEQ ID NO: 20688 - DNA, 524 bp, Homo sapiens
  misc_feature 1..524: note = ENST00000344312
  source 1..524: mol_type = unassigned DNA
gagctgtcctgggctgggtgccttgctctttgactgagactggagacagacggcaacagccacaggcagactgaggtggcaataggaaatctgccgagatgttcagtcaggtgcccaggaccccagcctcaggctgctactacctaaattccatgacacctgagggccaggagatgtacttgcgatttgatcagactacaagacgctctccttacaggatgagccggattctagcacgccatcagctagtgactaaaattcaacaagataggaaagtctactgacctccttccctgaaaatttggatcctcatattagcattccattccacttgctgtacttttagttggaaggtctaaggcagacaaagctgcttaaatatttttatcactgacttcctagaagaaggaggaaaaaatcttggcaagaagaagggaaatcagtcttgcagaatatcttgaagaagcctgcgaaggaattccactgactgtgttcattatctattggtcccaatactgagtgga

SEQ ID NO: 20689 - DNA, 945 bp, Homo sapiens
  misc_feature 1..945: note = ENST00000439831
  source 1..945: mol_type = unassigned DNA
ctagcgcggcgtttctggtggccaggcatcccggtcctcgcgcgtggcgcagcctcccagcgccggaccgacccatgtcgcgcccgcattgggtcccgggaccccggcgggagtgccgcgtccgtcctttccagtcgccgggagtctgagtcgcgggccacgcgggagtggcggtggagagcccgccggtcgttatgaggacggatctaaaatgaccagcaaacggaaaccttgccaaacgcagctcaggagatccatcagtgagcagttgcgggactccacggccagagcctgggatctgctgtggaagaacgtccgggagaggcggctggcaggactatctcttgagctgggcagtgaccaccacatggggcagaagaaagttctagagaagaaggtctgatgcctagaaagaaggaaaggacaccactggtgaagcgggagatttaaccttctttgaactcctcccttttttccttacttgaactgtaaagcaagtggtttgctaggtgttctgcccttaaacccatgcacccacatcctcatcagcctgaaagcattctggggaagatgcccagaatctatagcaccttgagagaaggtcactagcaagctaaattagaagtggagattatggatgattccaacactcaatgttgtaagcatacaatgttcattccacattttctctccaacacagtggccacatttagtgtgcacctaagaaataaacagacttttttggtttggacccagaaataaattgtggtaacccagcagttttgactgttgatgtttaaaaacctgtacatgcactgtagacctcaattaataacaattagtaactttccctgttatcatgctaaattgtatattctacatgatggatggtgttagagaaatttttgtggtctagtaaacttttgttgcttcataacttcagaa

SEQ ID NO: 20690 - DNA, 695 bp, Homo sapiens
  misc_feature 1..695: note = ENST00000488088
  source 1..695: mol_type = unassigned DNA
ggtggccttccaggaggcgggaggcgcccgctgtcgaggcagctgagccccggcaaccgctgctctccgcctctcccctcgcggggccggctcatggagcgcagggaccgggctggctctcgccgagccccgggcctcttttagcctcgtccccagagagggaggagccggtgcccggcacagccccgccggccctagaagctccccacgcgccaccatgcctctgctggacgttttctggtcttgcttcaggaaggtgaagtgaaaagaccaaaacatctacatggagtcaagcccttcacctatctgagccacaacttgctagctgtgttgaccatgagaaagttacttcgcctttctcaaaagaagacatttatgccgccaaaagacacatgaaaaaatgctcatcatcactggccatcagagaaatgcaaatcaaaaccacagtgagataccatctcacaccagttagaatggcgatcattaaaaagtcaggaaacaacatcaggagagggtgtggagaaataggatcacttttacactgttggtgggactgtaaactagttcagccattgtggaagacagtgtggcgattcctcaaggatctagaagtagaaataccatttgacccagccatcccattactgggtatatacccaaaagattataaatcatgctgctaataaagacacatg

SEQ ID NO: 20691 - DNA, 4864 bp, Homo sapiens
  misc_feature 1..4864: note = ENST00000523864
  source 1..4864: mol_type = unassigned DNA
ggccttccaggaggcgggaggcgcccgctgtcgaggcagctgagccccggcaaccgctgctctccgcctctcccctcgcggggccggctcatggagcgcagggaccgggctggctctcgccgagccccgggcctcttttagcctcgtccccagagagggaggagccggtgcccggcacagccccgccggccctagaagctccccacgcgccaccatgcctctgctggacgttttctggtcttgcttcaggaaggtgaagtgcttcccattgctgcaggtgaagaagaacgctgaagccgaggccaaaagagcatgtgagtggcttcaagcaacaggattccctcagtatgtgcagctttttgaaggaggctgatgaccttgaataattgtgcctcgatgaaactggaggttcattttcaaagcaagcagaatgaagactcagaagaggaagagcagtgtaccatcagtagccactgggccttccagcaggaaagtaagtgctggtctcctatggggtcctctgatctgttggccccaccgagccctggcctgccagcgacctcaagctgtgagagcgtcctcaccgagcttagtgccacctctctgccagtcatcaccgtgagcctaccacccgagccagcagacttgcccttgccaggccgtgcccccagctcgagtgaccggcccctcctcagccccacccagggccaggagggtccccaggacaaagccaagaagcgccatcgtaaccgtagcttcctcaagcaccttgaatctctgaggcggaaggaaaagagtggcagccagcaagcagagcccaagcatagtccagccacctcagagaaggtctccaaagcctcatctttccgcagttgtcgtggcttcctctcagctggattttacagggccaagaactgggccgccacctcagccggtggcagtggtgccaatactcggaaggcctgggaggcctggcctgtggcctcgttccggcatcctcagtggacacaccggggtgattgcctggtgcacgttcctggggaccacaaaccaggcacattccctcgctccctgtccattgagagcctgtgtcctgaggatggacaccgcctggcagactggcagccaggtaggcggtggggctgtgaggggcgccggggctcctgtggctcaacgggcagccatgccagcacgtatgacaacttgcctgagctgtacccagctgagcctgtaatggttggggctgaggctgaagatgaagatgatgaggagagtgggggcagctatgctcacctagacgacatcctccagcacgtgtgggggctacagcaacgagtagagctgtggtctcgggccatgtacccagacctggggcctggagatgaggaagaggaggaggccacttcatcagtagaaatagccacagttgaggtcaaatgccaagctgaggctctcagccagatggaggttccggcccatggagagtccccagcctgggcccaggctgaagtccagccagcagtcctggctccggctcaggctccagctgaggctgaaccagtggcacaggaagaggctgaggccccggccccagccccggccccggccccagcccaggacagtgagcaggaggcacattcaggcggggaacccacctttgcctctagcctgtctgtggaagaaggacactccatttctgacactgtggcctcctccagcgaacttgacagtagtgggaactccatgaatgaggctgaggctgcggggcccctggctggactccaggcatcaatgccccgtgaacggcgcgattcaggtgttggggcctcacttaccagaccctgcaggaagctccgttggcatagcttccagaactcccatcgtcccagcctcaactcagagtcgctggagatcaaccggcagtttgcaggccagatcaacctcctgcacaagggctcactgctgcggcttaccgcgttcatggagaagtacactgtgccccacaagcagggctgggtctggtcaatgcccaagttcatgaggaggaacaagaccccagattaccggggacagcacgtatttggggtgccacccctcatccacgtgcagcgcacgggccagccactgccacagagcattcagcaagccatgcgctacttgcgcagccagtgcctggaccaagtaggcatcttccgcaagtctggggtcaagtccaggatccagaacctgcgtcaaatgaatgagacctcgcctgacaatgtctgctacgagggccagtcagcctacgacgtggctgacctgctaaagcagtatttccgggacctgcctgagcccatcttcaccagcaagctcaccaccactttcctccagatctaccagctcctccccaaggatcagtggttggcagcagcacaagccgccaccttgctgctccccgatgagaaccgagaggtgctacagaccctgctctacttcttaagtgacattgcctctgccgaggaaaaccagatgacagcaggcaacctggcagtgtgcctggcgccctccatcttccacctcaatgtctctaagaaggatagcccctctcccaggatcaagagcaaacgcagcctcattggcaggccaggccctagggacctgagtgacaacatggcagccacccagggcctgtcgcacatgatcagtgactgcaagaaacttttccaggtgccccaggacatggtgctgcagctgtgcagctcctacagcgcagctgagctcagccctcccggcccagccctggctgagctgcgtcaggcccaagctgcaggggtaagcctgagcctctacatggaagagaatatccaggacctgctgcgtgatgctgctgagcgcttcaagggctggatgagcgtgccagggccccagcacacggagctggcttgcaggaaggcaccggatgggcaccccctgcggctatggaaggcatccacagaggtggcagcccccccagctgtggtgctgcatcgtgttctccgggagcgggccctctgggatgaggatctgctgcgggcccaggtgctggaagccctgatgccgggtgtggagctgtaccactatgtcaccgacagcatggcaccccatccctgccgcgactttgtggtgcttcggatgtggcgctctgacctgcctcgtgggggttgcctgcttgtctcccagtccctggatccggaacaacctgtgccagagtcgggtgtgcgagccctcatgctcacatcccagtacctcatggagccttgcggcttgggccgctctcggctcacacacatctgccgggctgacctcaggggccgttctcctgactggtacaacaaagtctttggacacctgtgtgccatggaagtggcaaagatccgggactccttccccaccctgcaggcagcgggccctgagacaaagctgtgagccttgggctggtcccagggtggcaccacccaggccccctgggcaccaagggagcgagggggaataagagcagggcagccccctgggtgccgctgtcaggagcagagccaggcccaggtggctccagctgcctgtcctgtcccctttcctaaagctcctctgcacatagaggggagaaaaagagaatttaggcaactccactcccccttcacccccaaccctgtattctactctcccgaaaagagaagagaatcgcatgagtagcaagactgctgccaccagccacctgcttgtgaggccgccacttggcatgaagcctccacagctccccgcctgcaggggcaaagaggtcgacagcaatgtgtgatcccagctctctgccagactgagagggcaagccgtcttgtttgctgcaaggatgcttttgaggttggacaggaggttctggtcctgcctttggggccaacgctggctctgaagtgtctttttcagaggaattggactggagtgaatgggcacaggggtggagcgcagggcagccccagtcaccacgagctgtttcatttgtgtaaatacgatgctgaattttatgaggctgagttaagagtgggcactgacgggcccctaatatgtgacatgacgatttggcatagatagggatgtgagagtggagtaccttcctttctcaagtctcgagatgccagtgaaaccagtattccctgacttgggtttcacactttatcgaccaccccatggggtcctgtgtagcctttggccacgcactgacactgcccaggccaagcaaaagcagagtgtggttaagagacaagggtctatgtcatcatcccttttgcttatggtagtgggctaacataacagcccctttctcaagcagagacctggcccctgggccagccagatggaagggcctatcttagccagctggagcttaagccaaacctgttctgtcccactggccagccatctttgctcacatggaaattcaaatgccattcaaaggccactggtgctttatttttctatctgctgagtaaactgaaatgagatgggtcccaaccaccactgtaattttcaagcctattttatttgtacctgtaaatactgtacagctaatatatatatatatatatatatatgtgtgtgtgtgtgtgtgtgtatatgtgtttatagagatacacacacatatatatgtgtgtatatatatacacatacatatatatacacacacgcatttgcacagacacacacatatatcaattctcatgagtgtattataatctctggtgggggcaagtgtctggaaggcctgaggggcacttcagatgagaatggagaggtagggagccaggtgcagcaggatccctcaaatcaataaagcattaccagagatgcactttaa

SEQ ID NO: 20692 - DNA, 4841 bp, Homo sapiens
  misc_feature 1..4841: note = ENST00000374599
  source 1..4841: mol_type = unassigned DNA
agggaccgggctggctctcgccgagccccgggcctcttttagcctcgtccccagagagggaggagccggtgcccggcacagccccgccggccctagaagctccccacgcgccaccatgcctctgctggacgttttctggtcttgcttcaggaaggtgaagtgcttcccattgctgcaggtgaagaagaacgctgaagccgaggccaaaagagcatgtgagtggcttcaagcaacaggattccctcagtatgtgcagctttttgaagaaggttcgtttcccctggatattggctctgtgaagaaaaaccacggttttctggacgaggactctttgggggccctgtgtaggaggctgatgaccttgaataattgtgcctcgatgaaactggaggttcattttcaaagcaagcagaatgaagactcagaagaggaagagcagtgtaccatcagtagccactgggccttccagcaggaaagtaagtgctggtctcctatggggtcctctgatctgttggccccaccgagccctggcctgccagcgacctcaagctgtgagagcgtcctcaccgagcttagtgccacctctctgccagtcatcaccgtgagcctaccacccgagccagcagacttgcccttgccaggccgtgcccccagctcgagtgaccggcccctcctcagccccacccagggccaggagggtccccaggacaaagccaagaagcgccatcgtaaccgtagcttcctcaagcaccttgaatctctgaggcggaaggaaaagagtggcagccagcaagcagagcccaagcatagtccagccacctcagagaaggtctccaaagcctcatctttccgcagttgtcgtggcttcctctcagctggattttacagggccaagaactgggccgccacctcagccggtggcagtggtgccaatactcggaaggcctgggaggcctggcctgtggcctcgttccggcatcctcagtggacacaccggggtgattgcctggtgcacgttcctggggaccacaaaccaggcacattccctcgctccctgtccattgagagcctgtgtcctgaggatggacaccgcctggcagactggcagccaggtaggcggtggggctgtgaggggcgccggggctcctgtggctcaacgggcagccatgccagcacgtatgacaacttgcctgagctgtacccagctgagcctgtaatggttggggctgaggctgaagatgaagatgatgaggagagtgggggcagctatgctcacctagacgacatcctccagcacgtgtgggggctacagcaacgagtagagctgtggtctcgggccatgtacccagacctggggcctggagatgaggaagaggaggaggccacttcatcagtagaaatagccacagttgaggtcaaatgccaagctgaggctctcagccagatggaggttccggcccatggagagtccccagcctgggcccaggctgaagtccagccagcagtcctggctccggctcaggctccagctgaggctgaaccagtggcacaggaagaggctgaggccccggccccagccccggccccggccccagcccaggacagtgagcaggaggcacattcaggcggggaacccacctttgcctctagcctgtctgtggaagaaggacactccatttctgacactgtggcctcctccagcgaacttgacagtagtgggaactccatgaatgaggctgaggctgcggggcccctggctggactccaggcatcaatgccccgtgaacggcgcgattcaggtgttggggcctcacttaccagaccctgcaggaagctccgttggcatagcttccagaactcccatcgtcccagcctcaactcagagtcgctggagatcaaccggcagtttgcaggccagatcaacctcctgcacaagggctcactgctgcggcttaccgcgttcatggagaagtacactgtgccccacaagcagggctgggtctggtcaatgcccaagttcatgaggaggaacaagaccccagattaccggggacagcacgtatttggggtgccacccctcatccacgtgcagcgcacgggccagccactgccacagagcattcagcaagccatgcgctacttgcgcagccagtgcctggaccaagtaggcatcttccgcaagtctggggtcaagtccaggatccagaacctgcgtcaaatgaatgagacctcgcctgacaatgtctgctacgagggccagtcagcctacgacgtggctgacctgctaaagcagtatttccgggacctgcctgagcccatcttcaccagcaagctcaccaccactttcctccagatctaccagctcctccccaaggatcagtggttggcagcagcacaagccgccaccttgctgctccccgatgagaaccgagaggtgctacagaccctgctctacttcttaagtgacattgcctctgccgaggaaaaccagatgacagcaggcaacctggcagtgtgcctggcgccctccatcttccacctcaatgtctctaagaaggatagcccctctcccaggatcaagagcaaacgcagcctcattggcaggccaggccctagggacctgagtgacaacatggcagccacccagggcctgtcgcacatgatcagtgactgcaagaaacttttccaggtgccccaggacatggtgctgcagctgtgcagctcctacagcgcagctgagctcagccctcccggcccagccctggctgagctgcgtcaggcccaagctgcaggggtaagcctgagcctctacatggaagagaatatccaggacctgctgcgtgatgctgctgagcgcttcaagggctggatgagcgtgccagggccccagcacacggagctggcttgcaggaaggcaccggatgggcaccccctgcggctatggaaggcatccacagaggtggcagcccccccagctgtggtgctgcatcgtgttctccgggagcgggccctctgggatgaggatctgctgcgggcccaggtgctggaagccctgatgccgggtgtggagctgtaccactatgtcaccgacagcatggcaccccatccctgccgcgactttgtggtgcttcggatgtggcgctctgacctgcctcgtgggggttgcctgcttgtctcccagtccctggatccggaacaacctgtgccagagtcgggtgtgcgagccctcatgctcacatcccagtacctcatggagccttgcggcttgggccgctctcggctcacacacatctgccgggctgacctcaggggccgttctcctgactggtacaacaaagtctttggacacctgtgtgccatggaagtggcaaagatccgggactccttccccaccctgcaggcagcgggccctgagacaaagctgtgagccttgggctggtcccagggtggcaccacccaggccccctgggcaccaagggagcgagggggaataagagcagggcagccccctgggtgccgctgtcaggagcagagccaggcccaggtggctccagctgcctgtcctgtcccctttcctaaagctcctctgcacatagaggggagaaaaagagaatttaggcaactccactcccccttcacccccaaccctgtattctactctcccgaaaagagaagagaatcgcatgagtagcaagactgctgccaccagccacctgcttgtgaggccgccacttggcatgaagcctccacagctccccgcctgcaggggcaaagaggtcgacagcaatgtgtgatcccagctctctgccagactgagagggcaagccgtcttgtttgctgcaaggatgcttttgaggttggacaggaggttctggtcctgcctttggggccaacgctggctctgaagtgtctttttcagaggaattggactggagtgaatgggcacaggggtggagcgcagggcagccccagtcaccacgagctgtttcatttgtgtaaatacgatgctgaattttatgaggctgagttaagagtgggcactgacgggcccctaatatgtgacatgacgatttggcatagatagggatgtgagagtggagtaccttcctttctcaagtctcgagatgccagtgaaaccagtattccctgacttgggtttcacactttatcgaccaccccatggggtcctgtgtagcctttggccacgcactgacactgcccaggccaagcaaaagcagagtgtggttaagagacaagggtctatgtcatcatcccttttgcttatggtagtgggctaacataacagcccctttctcaagcagagacctggcccctgggccagccagatggaagggcctatcttagccagctggagcttaagccaaacctgttctgtcccactggccagccatctttgctcacatggaaattcaaatgccattcaaaggccactggtgctttatttttctatctgctgagtaaactgaaatgagatgggtcccaaccaccactgtaattttcaagcctattttatttgtacctgtaaatactgtacagctaatatatatatatatatatatatatgtgtgtgtgtgtgtgtgtgtatatgtgtttatagagatacacacacatatatatgtgtgtatatatatacacatacatatatatacacacacgcatttgcacagacacacacatatatcaattctcatgagtgtattataatctctggtgggggcaagtgtctggaaggcctgaggggcacttcagatgagaatggagaggtagggagccaggtgcagcaggatccctcaaatcaataaagcattaccagagatgca

SEQ ID NO: 20693 - DNA, 4820 bp, Homo sapiens
  misc_feature 1..4820: note = ENST00000374597
  source 1..4820: mol_type = unassigned DNA
ctcgggttgacaacggctaagcagccgcggcagctgctcttctggctggcaccgtcacccctgcccgaccccaggccccgcgtgtgtcccggacggagcagtccctcctgggctcgcctcctgcccgctcgctctgtgtcagcgcccgaacccaaaggggtggacgcggcctccagaagccgaggccaaaagagcatgtgagtggcttcaagcaacaggattccctcagtatgtgcagctttttgaagaaggttcgtttcccctggatattggctctgtgaagaaaaaccacggttttctggacgaggactctttgggggccctgtgtaggaggctgatgaccttgaataattgtgcctcgatgaaactggaggttcattttcaaagcaagcagaatgaagactcagaagaggaagagcagtgtaccatcagtagccactgggccttccagcaggaaagtaagtgctggtctcctatggggtcctctgatctgttggccccaccgagccctggcctgccagcgacctcaagctgtgagagcgtcctcaccgagcttagtgccacctctctgccagtcatcaccgtgagcctaccacccgagccagcagacttgcccttgccaggccgtgcccccagctcgagtgaccggcccctcctcagccccacccagggccaggagggtccccaggacaaagccaagaagcgccatcgtaaccgtagcttcctcaagcaccttgaatctctgaggcggaaggaaaagagtggcagccagcaagcagagcccaagcatagtccagccacctcagagaaggtctccaaagcctcatctttccgcagttgtcgtggcttcctctcagctggattttacagggccaagaactgggccgccacctcagccggtggcagtggtgccaatactcggaaggcctgggaggcctggcctgtggcctcgttccggcatcctcagtggacacaccggggtgattgcctggtgcacgttcctggggaccacaaaccaggcacattccctcgctccctgtccattgagagcctgtgtcctgaggatggacaccgcctggcagactggcagccaggtaggcggtggggctgtgaggggcgccggggctcctgtggctcaacgggcagccatgccagcacgtatgacaacttgcctgagctgtacccagctgagcctgtaatggttggggctgaggctgaagatgaagatgatgaggagagtgggggcagctatgctcacctagacgacatcctccagcacgtgtgggggctacagcaacgagtagagctgtggtctcgggccatgtacccagacctggggcctggagatgaggaagaggaggaggccacttcatcagtagaaatagccacagttgaggtcaaatgccaagctgaggctctcagccagatggaggttccggcccatggagagtccccagcctgggcccaggctgaagtccagccagcagtcctggctccggctcaggctccagctgaggctgaaccagtggcacaggaagaggctgaggccccggccccagccccggccccggccccagcccaggacagtgagcaggaggcacattcaggcggggaacccacctttgcctctagcctgtctgtggaagaaggacactccatttctgacactgtggcctcctccagcgaacttgacagtagtgggaactccatgaatgaggctgaggctgcggggcccctggctggactccaggcatcaatgccccgtgaacggcgcgattcaggtgttggggcctcacttaccagaccctgcaggaagctccgttggcatagcttccagaactcccatcgtcccagcctcaactcagagtcgctggagatcaaccggcagtttgcaggccagatcaacctcctgcacaagggctcactgctgcggcttaccgcgttcatggagaagtacactgtgccccacaagcagggctgggtctggtcaatgcccaagttcatgaggaggaacaagaccccagattaccggggacagcacgtatttggggtgccacccctcatccacgtgcagcgcacgggccagccactgccacagagcattcagcaagccatgcgctacttgcgcagccagtgcctggaccaagtaggcatcttccgcaagtctggggtcaagtccaggatccagaacctgcgtcaaatgaatgagacctcgcctgacaatgtctgctacgagggccagtcagcctacgacgtggctgacctgctaaagcagtatttccgggacctgcctgagcccatcttcaccagcaagctcaccaccactttcctccagatctaccagctcctccccaaggatcagtggttggcagcagcacaagccgccaccttgctgctccccgatgagaaccgagaggtgctacagaccctgctctacttcttaagtgacattgcctctgccgaggaaaaccagatgacagcaggcaacctggcagtgtgcctggcgccctccatcttccacctcaatgtctctaagaaggatagcccctctcccaggatcaagagcaaacgcagcctcattggcaggccaggccctagggacctgagtgacaacatggcagccacccagggcctgtcgcacatgatcagtgactgcaagaaacttttccaggtgccccaggacatggtgctgcagctgtgcagctcctacagcgcagctgagctcagccctcccggcccagccctggctgagctgcgtcaggcccaagctgcaggggtaagcctgagcctctacatggaagagaatatccaggacctgctgcgtgatgctgctgagcgcttcaagggctggatgagcgtgccagggccccagcacacggagctggcttgcaggaaggcaccggatgggcaccccctgcggctatggaaggcatccacagaggtggcagcccccccagctgtggtgctgcatcgtgttctccgggagcgggccctctgggatgaggatctgctgcgggcccaggtgctggaagccctgatgccgggtgtggagctgtaccactatgtcaccgacagcatggcaccccatccctgccgcgactttgtggtgcttcggatgtggcgctctgacctgcctcgtgggggttgcctgcttgtctcccagtccctggatccggaacaacctgtgccagagtcgggtgtgcgagccctcatgctcacatcccagtacctcatggagccttgcggcttgggccgctctcggctcacacacatctgccgggctgacctcaggggccgttctcctgactggtacaacaaagtctttggacacctgtgtgccatggaagtggcaaagatccgggactccttccccaccctgcaggcagcgggccctgagacaaagctgtgagccttgggctggtcccagggtggcaccacccaggccccctgggcaccaagggagcgagggggaataagagcagggcagccccctgggtgccgctgtcaggagcagagccaggcccaggtggctccagctgcctgtcctgtcccctttcctaaagctcctctgcacatagaggggagaaaaagagaatttaggcaactccactcccccttcacccccaaccctgtattctactctcccgaaaagagaagagaatcgcatgagtagcaagactgctgccaccagccacctgcttgtgaggccgccacttggcatgaagcctccacagctccccgcctgcaggggcaaagaggtcgacagcaatgtgtgatcccagctctctgccagactgagagggcaagccgtcttgtttgctgcaaggatgcttttgaggttggacaggaggttctggtcctgcctttggggccaacgctggctctgaagtgtctttttcagaggaattggactggagtgaatgggcacaggggtggagcgcagggcagccccagtcaccacgagctgtttcatttgtgtaaatacgatgctgaattttatgaggctgagttaagagtgggcactgacgggcccctaatatgtgacatgacgatttggcatagatagggatgtgagagtggagtaccttcctttctcaagtctcgagatgccagtgaaaccagtattccctgacttgggtttcacactttatcgaccaccccatggggtcctgtgtagcctttggccacgcactgacactgcccaggccaagcaaaagcagagtgtggttaagagacaagggtctatgtcatcatcccttttgcttatggtagtgggctaacataacagcccctttctcaagcagagacctggcccctgggccagccagatggaagggcctatcttagccagctggagcttaagccaaacctgttctgtcccactggccagccatctttgctcacatggaaattcaaatgccattcaaaggccactggtgctttatttttctatctgctgagtaaactgaaatgagatgggtcccaaccaccactgtaattttcaagcctattttatttgtacctgtaaatactgtacagctaatatatatatatatatatatatatgtgtgtgtgtgtgtgtgtgtatatgtgtttatagagatacacacacatatatatgtgtgtatatatatacacatacatatatatacacacacgcatttgcacagacacacacatatatcaattctcatgagtgtattataatctctggtgggggcaagtgtctggaaggcctgaggggcacttcagatgagaatggagaggtagggagccaggtgcagcaggatccctcaaatcaataaagcattaccagagat

SEQ ID NO: 20694 - DNA, 4862 bp, Homo sapiens
  misc_feature 1..4862: note = ENST00000252336
  source 1..4862: mol_type = unassigned DNA
ggccttccaggaggcgggaggcgcccgctgtcgaggcagctgagccccggcaaccgctgctctccgcctctcccctcgcggggccggctcatggagcgcagggaccgggctggctctcgccgagccccgggcctcttttagcctcgtccccagagagggaggagccggtgcccggcacagccccgccggccctagaagctccccacgcgccaccatgcctctgctggacgttttctggtcttgcttcaggaaggtgaagtgcttcccattgctgcaggtgaagaagaacgctgaagccgaggccaaaagagcatgtgagtggcttcaagcaacaggattccctcagtatgtgcagctttttgaaggaggctgatgaccttgaataattgtgcctcgatgaaactggaggttcattttcaaagcaagcagaatgaagactcagaagaggaagagcagtgtaccatcagtagccactgggccttccagcaggaaagtaagtgctggtctcctatggggtcctctgatctgttggccccaccgagccctggcctgccagcgacctcaagctgtgagagcgtcctcaccgagcttagtgccacctctctgccagtcatcaccgtgagcctaccacccgagccagcagacttgcccttgccaggccgtgcccccagctcgagtgaccggcccctcctcagccccacccagggccaggagggtccccaggacaaagccaagaagcgccatcgtaaccgtagcttcctcaagcaccttgaatctctgaggcggaaggaaaagagtggcagccagcaagcagagcccaagcatagtccagccacctcagagaaggtctccaaagcctcatctttccgcagttgtcgtggcttcctctcagctggattttacagggccaagaactgggccgccacctcagccggtggcagtggtgccaatactcggaaggcctgggaggcctggcctgtggcctcgttccggcatcctcagtggacacaccggggtgattgcctggtgcacgttcctggggaccacaaaccaggcacattccctcgctccctgtccattgagagcctgtgtcctgaggatggacaccgcctggcagactggcagccaggtaggcggtggggctgtgaggggcgccggggctcctgtggctcaacgggcagccatgccagcacgtatgacaacttgcctgagctgtacccagctgagcctgtaatggttggggctgaggctgaagatgaagatgatgaggagagtgggggcagctatgctcacctagacgacatcctccagcacgtgtgggggctacagcaacgagtagagctgtggtctcgggccatgtacccagacctggggcctggagatgaggaagaggaggaggccacttcatcagtagaaatagccacagttgaggtcaaatgccaagctgaggctctcagccagatggaggttccggcccatggagagtccccagcctgggcccaggctgaagtccagccagcagtcctggctccggctcaggctccagctgaggctgaaccagtggcacaggaagaggctgaggccccggccccagccccggccccggccccagcccaggacagtgagcaggaggcacattcaggcggggaacccacctttgcctctagcctgtctgtggaagaaggacactccatttctgacactgtggcctcctccagcgaacttgacagtagtgggaactccatgaatgaggctgaggctgcggggcccctggctggactccaggcatcaatgccccgtgaacggcgcgattcaggtgttggggcctcacttaccagaccctgcaggaagctccgttggcatagcttccagaactcccatcgtcccagcctcaactcagagtcgctggagatcaaccggcagtttgcaggccagatcaacctcctgcacaagggctcactgctgcggcttaccgcgttcatggagaagtacactgtgccccacaagcagggctgggtctggtcaatgcccaagttcatgaggaggaacaagaccccagattaccggggacagcacgtatttggggtgccacccctcatccacgtgcagcgcacgggccagccactgccacagagcattcagcaagccatgcgctacttgcgcagccagtgcctggaccaagtaggcatcttccgcaagtctggggtcaagtccaggatccagaacctgcgtcaaatgaatgagacctcgcctgacaatgtctgctacgagggccagtcagcctacgacgtggctgacctgctaaagcagtatttccgggacctgcctgagcccatcttcaccagcaagctcaccaccactttcctccagatctaccagctcctccccaaggatcagtggttggcagcagcacaagccgccaccttgctgctccccgatgagaaccgagaggtgctacagaccctgctctacttcttaagtgacattgcctctgccgaggaaaaccagatgacagcaggcaacctggcagtgtgcctggcgccctccatcttccacctcaatgtctctaagaaggatagcccctctcccaggatcaagagcaaacgcagcctcattggcaggccaggccctagggacctgagtgacaacatggcagccacccagggcctgtcgcacatgatcagtgactgcaagaaacttttccaggtgccccaggacatggtgctgcagctgtgcagctcctacagcgcagctgagctcagccctcccggcccagccctggctgagctgcgtcaggcccaagctgcaggggtaagcctgagcctctacatggaagagaatatccaggacctgctgcgtgatgctgctgagcgcttcaagggctggatgagcgtgccagggccccagcacacggagctggcttgcaggaaggcaccggatgggcaccccctgcggctatggaaggcatccacagaggtggcagcccccccagctgtggtgctgcatcgtgttctccgggagcgggccctctgggatgaggatctgctgcgggcccaggtgctggaagccctgatgccgggtgtggagctgtaccactatgtcaccgacagcatggcaccccatccctgccgcgactttgtggtgcttcggatgtggcgctctgacctgcctcgtgggggttgcctgcttgtctcccagtccctggatccggaacaacctgtgccagagtcgggtgtgcgagccctcatgctcacatcccagtacctcatggagccttgcggcttgggccgctctcggctcacacacatctgccgggctgacctcaggggccgttctcctgactggtacaacaaagtctttggacacctgtgtgccatggaagtggcaaagatccgggactccttccccaccctgcaggcagcgggccctgagacaaagctgtgagccttgggctggtcccagggtggcaccacccaggccccctgggcaccaagggagcgagggggaataagagcagggcagccccctgggtgccgctgtcaggagcagagccaggcccaggtggctccagctgcctgtcctgtcccctttcctaaagctcctctgcacatagaggggagaaaaagagaatttaggcaactccactcccccttcacccccaaccctgtattctactctcccgaaaagagaagagaatcgcatgagtagcaagactgctgccaccagccacctgcttgtgaggccgccacttggcatgaagcctccacagctccccgcctgcaggggcaaagaggtcgacagcaatgtgtgatcccagctctctgccagactgagagggcaagccgtcttgtttgctgcaaggatgcttttgaggttggacaggaggttctggtcctgcctttggggccaacgctggctctgaagtgtctttttcagaggaattggactggagtgaatgggcacaggggtggagcgcagggcagccccagtcaccacgagctgtttcatttgtgtaaatacgatgctgaattttatgaggctgagttaagagtgggcactgacgggcccctaatatgtgacatgacgatttggcatagatagggatgtgagagtggagtaccttcctttctcaagtctcgagatgccagtgaaaccagtattccctgacttgggtttcacactttatcgaccaccccatggggtcctgtgtagcctttggccacgcactgacactgcccaggccaagcaaaagcagagtgtggttaagagacaagggtctatgtcatcatcccttttgcttatggtagtgggctaacataacagcccctttctcaagcagagacctggcccctgggccagccagatggaagggcctatcttagccagctggagcttaagccaaacctgttctgtcccactggccagccatctttgctcacatggaaattcaaatgccattcaaaggccactggtgctttatttttctatctgctgagtaaactgaaatgagatgggtcccaaccaccactgtaattttcaagcctattttatttgtacctgtaaatactgtacagctaatatatatatatatatatatatatgtgtgtgtgtgtgtgtgtgtatatgtgtttatagagatacacacacatatatatgtgtgtatatatatacacatacatatatatacacacacgcatttgcacagacacacacatatatcaattctcatgagtgtattataatctctggtgggggcaagtgtctggaaggcctgaggggcacttcagatgagaatggagaggtagggagccaggtgcagcaggatccctcaaatcaataaagcattaccagagatgcacttt

SEQ ID NO: 20695 - DNA, 3278 bp, Homo sapiens
  misc_feature 1..3278: note = ENST00000556539
  source 1..3278: mol_type = unassigned DNA
tagctggcctgcttttagtccaaaggaacaggggttgggggaagttcccagggcttgagaggtcttgaagccaaacaggggttccagggacactagggtgcccactctggcattttctctccttcccttcaattcacagactctggtggagcaacgttcaggtggttcaggaaagggcagcaataaggggccactaggtgtgacagaggaactgcacatcatcagcttcacggtcaaatatacctaccagggtctgaagcaggagctgaaaacggacaccctccctgtggtgattatttccaacatgaaccagctctcaattgcctgggcttcagttctctggttcaatttgctcagcccaaaccttcagaaccagcagttcttctccaacccccccaaggccccctggagcttgctgggccctgctctcagttggcagttctcctcctatgttggccgaggcctcaactcagaccagctgagcatgctgagaaacaagctgttcgggcagaactgtaggactgaggatccattattgtcctgggctgacttcactaagcgagagagccctcctggcaagttaccattctggacatggctggacaaaattctggagttggtacatgaccacctgaaggatctctggaatgatggacgcatcatgggctttgtgagtcggagccaggagcgccggctgctgaagaagaccatgtctggcacctttctactgcgcttcagtgaatcgtcagaagggggcattacctgctcctgggtggagcaccaggatgatgacaaggtgctcatctactctgtgcaaccgtacacgaaggaggtgctgcagtcactcccgctgactgaaatcatccgccattaccagttgctcactgaggagaatatacctgaaaacccactgcgcttcctctatccccgaatcccccgggatgaagcttttgggtgctactaccaggagaaagttaatctccaggaacggaggaaatacctgaaacacaggctcattgtggtctctaatagacaggtggatgaactgcaacaaccgctggagcttaagccagagccagagctggagtcattagagctggaactagggctggtgccagagccagagctcagcctggacttagagccactgctgaaggcagggctggatctggggccagagctagagtctgtgctggagtccactctggagcctgtgatagagcccacactatgcatggtatcacaaacagtgccagagccagaccaaggacctgtatcacagccagtgccagagccagatttgccctgtgatctgagacatttgaacactgagccaatggaaatcttcagaaactgtgtaaagattgaagaaatcatgccgaatggtgacccactgttggctggccagaacaccgtggatgaggtttacgtctcccgccccagccacttctacactgatggacccttgatgccttctgacttctaggaaccacatttcctctgttcttttcatatctcttgcccttcctactcctcatagcatgatattgttctccaaggatgggaatcaggcatgtgtcccttccaagctgtgttaactgttcaaactcaggcctgtgtgactccattggggtgagaggtgaaagcataacatgggtacagaggggacaacaatgaatcagaacagatgctgagccataggtctaaataggatcctggaggctgcctgctgtgctgggaggtataggggtcctgggggcaggccagggcagttgacaggtacttggagggctcagggcagtggcttctttccagtatggaaggatttcaacattttaatagttggttaggctaaactggtgcatactggcattggcccttggtggggagcacagacacaggataggactccatttctttcttccattccttcatgtctaggataacttgctttcttctttcctttactcctggctcaagccctgaatttcttcttttcctgcaggggttgagagctttctgccttagcctaccatgtgaaactctaccctgaagaaagggatggataggaagtagacctctttttcttaccagtctcctcccctactctgcccctaagctggctgtacctgttcctcccccataaaatgatcctgccaatctaatgtgagtgtgaagctttgcacactagtttatgctacctagtctccactttctcaatgcttaggagacagatcactcctggaggctggggatggtaggattgctggggatttttttttttttaaacagggtctcactctgttgcccaggctagagtgcaatggtgcaatcacagctcactgcagcctcaacctcctgggttcaagcaatcctcctacctcagcctcctgggtagctagcaccatggcatgcgccaccatgccctattttttttttttaaagacagggtcttgctatattgcccaggctggtcttgaactgggctcaagtgatcctcacgccttggcctcccaaagtgctgggattataggcatgagccactgtgcttggccaggatttttttttttttttttttgagatggagtttctctcttgttgtccaggctggagtgcaatggtgtgatctcggctcactgcaacctccgccttccgggttcaagtgactctcctgcctcagcctccccagtagctgggattacagatctgcaccaccatgcccagctaattttgtatttttagtagagacggggtttctccatgttggtcaggctggtctcgaactcctgacctcaagtgatctgtccacctcggcctcccagagtgctgggattacaggcgtgagccactgttcccagcaggaatttcttttttatagtattggataaagtttggtgtttttacagaggagaagcaatgggtcttagctctttctctattatgttatcatcctcccttttttgtacaatatgttgtttacctgaaaggaaggtttctattcgttggttgtggacctggacaaagtccaagtctgtggaacttaaaaccttgaaggtctgtcataggactctggacaatctcacaccttagctattcccagggaaccccagggggcaactgacattgctccaagatgttctcctgatgtagcttgagatataaaggaaaggccctgcacaggtggctgtttcttgtctgttatgtcagaggaacagtcctgttcagaaaggggctcttctgagcagaaatggctaataaactttgtgctgatctggaaa

SEQ ID NO: 20696 - DNA, 3259 bp, Homo sapiens
  misc_feature 1..3259: note = ENST00000314128
  source 1..3259: mol_type = unassigned DNA
actgcaaccctaatcagagcccaaatggcgcagtgggaaatgctgcagaatcttgacagcccctttcaggatcagctgcaccagctttactcgcacagcctcctgcctgtggacattcgacagtacttggctgtctggattgaagaccagaactggcaggaagctgcacttgggagtgatgattccaaggctaccatgctattcttccacttcttggatcagctgaactatgagtgtggccgttgcagccaggacccagagtccttgttgctgcagcacaatttgcggaaattctgccgggacattcagcccttttcccaggatcctacccagttggctgagatgatctttaacctccttctggaagaaaaaagaattttgatccaggctcagagggcccaattggaacaaggagagccagttctcgaaacacctgtggagagccagcaacatgagattgaatcccggatcctggatttaagggctatgatggagaagctggtaaaatccatcagccaactgaaagaccagcaggatgtcttctgcttccgatataagatccaggccaaagggaagacaccctctctggacccccatcagaccaaagagcagaagattctgcaggaaactctcaatgaactggacaaaaggagaaaggaggtgctggatgcctccaaagcactgctaggccgattaactaccctaatcgagctactgctgccaaagttggaggagtggaaggcccagcagcaaaaagcctgcatcagagctcccattgaccacgggttggaacagctggagacatggttcacagctggagcaaagctgttgtttcacctgaggcagctgctgaaggagctgaagggactgagttgcctggttagctatcaggatgaccctctgaccaaaggggtggacctacgcaacgcccaggtcacagagttgctacagcgtctgctccacagagcctttgtggtagaaacccagccctgcatgccccaaactccccatcgacccctcatcctcaagactggcagcaagttcaccgtccgaacaaggctgctggtgagactccaggaaggcaatgagtcactgactgtggaagtctccattgacaggaatcctcctcaattacaaggcttccggaagttcaacattctgacttcaaaccagaaaactttgacccccgagaaggggcagagtcagggtttgatttgggactttggttacctgactctggtggagcaacgttcaggtggttcaggaaagggcagcaataaggggccactaggtgtgacagaggaactgcacatcatcagcttcacggtcaaatatacctaccagggtctgaagcaggagctgaaaacggacaccctccctgtggtgattatttccaacatgaaccagctctcaattgcctgggcttcagttctctggttcaatttgctcagcccaaaccttcagaaccagcagttcttctccaacccccccaaggccccctggagcttgctgggccctgctctcagttggcagttctcctcctatgttggccgaggcctcaactcagaccagctgagcatgctgagaaacaagctgttcgggcagaactgtaggactgaggatccattattgtcctgggctgacttcactaagcgagagagccctcctggcaagttaccattctggacatggctggacaaaattctggagttggtacatgaccacctgaaggatctctggaatgatggacgcatcatgggctttgtgagtcggagccaggagcgccggctgctgaagaagaccatgtctggcacctttctactgcgcttcagtgaatcgtcagaagggggcattacctgctcctgggtggagcaccaggatgatgacaaggtgctcatctactctgtgcaaccgtacacgaaggaggtgctgcagtcactcccgctgactgaaatcatccgccattaccagttgctcactgaggagaatatacctgaaaacccactgcgcttcctctatccccgaatcccccgggatgaagcttttgggtgctactaccaggagaaagttaatctccaggaacggaggaaatacctgaaacacaggctcattgtggtctctaatagacaggtggatgaactgcaacaaccgctggagcttaagccagagccagagctggagtcattagagctggaactagggctggtgccagagccagagctcagcctggacttagagccactgctgaaggcagggctggatctggggccagagctagagtctgtgctggagtccactctggagcctgtgatagagcccacactatgcatggtatcacaaacagtgccagagccagaccaaggacctgtatcacagccagtgccagagccagatttgccctgtgatctgagacatttgaacactgagccaatggaaatcttcagaaactgtgtaaagattgaagaaatcatgccgaatggtgacccactgttggctggccagaacaccgtggatgaggtttacgtctcccgccccagccacttctacactgatggacccttgatgccttctgacttctaggaaccacatttcctctgttcttttcatatctcttgcccttcctactcctcatagcatgatattgttctccaaggatgggaatcaggcatgtgtcccttccaagctgtgttaactgttcaaactcaggcctgtgtgactccattggggtgagaggtgaaagcataacatgggtacagaggggacaacaatgaatcagaacagatgctgagccataggtctaaataggatcctggaggctgcctgctgtgctgggaggtataggggtcctgggggcaggccagggcagttgacaggtacttggagggctcagggcagtggcttctttccagtatggaaggatttcaacattttaatagttggttaggctaaactggtgcatactggcattggcccttggtggggagcacagacacaggataggactccatttctttcttccattccttcatgtctaggataacttgctttcttctttcctttactcctggctcaagccctgaatttcttcttttcctgcaggggttgagagctttctgccttagcctaccatgtgaaactctaccctgaagaaagggatggataggaagtagacctctttttcttaccagtctcctcccctactctgcccctaagctggctgtacctgttcctcccccataaaatgatcctgccaatctaa

SEQ ID NO: 20697 - DNA, 3073 bp, Homo sapiens
  misc_feature 1..3073: note = ENST00000557235
  source 1..3073: mol_type = unassigned DNA
agctcatactagggacgggaagtcgcgaccagagccattggagggcgcggggactgcaaccctaatcagagcccaaatggcgcagtgggaaatgctgcagaatcttgacagcccctttcaggatcagctgcaccagctttactcgcacagcctcctgcctgtggacattcgacagtacttggctgtctggattgaagaccagaactggcaggaagctgcacttgggagtgatgattccaaggctaccatgctattcttccacttcttggatcagctgaactatgagtgtggccgttgcagccaggacccagagtccttgttgctgcagcacaatttgcggaaattctgccgggacattcaggatcctacccagttggctgagatgatctttaacctccttctggaagaaaaaagaattttgatccaggctcagagggcccaattggaacaaggagagccagttctcgaaacacctgtggagagccagcaacatgagattgaatcccggatcctggatttaagggctatgatggagaagctggtaaaatccatcagccaactgaaagaccagcaggatgtcttctgcttccgatataagatccaggccaaagggaagacaccctctctggacccccatcagaccaaagagcagaagattctgcaggaaactctcaatgaactggacaaaaggagaaaggaggtgctggatgcctccaaagcactgctaggccgattaactaccctaatcgagctactgctgccaaagttggaggagtggaaggcccagcagcaaaaagcctgcatcagagctcccattgaccacgggttggaacagctggagacatggttcacagctggagcaaagctgttgtttcacctgaggcagctgctgaaggagctgaagggactgagttgcctggttagctatcaggatgaccctctgaccaaaggggtggacctacgcaacgcccaggtcacagagttgctacagcgtctgctccacagagcctttgtggtagaaacccagccctgcatgccccaaactccccatcgacccctcatcctcaagactggcagcaagttcaccgtccgaacaaggctgctggtgagactccaggaaggcaatgagtcactgactgtggaagtctccattgacaggaatcctcctcaattacaaggcttccggaagttcaacattctgacttcaaaccagaaaactttgacccccgagaaggggcagagtcagggtttgatttgggactttggttacctgactctggtggagcaacgttcaggtggttcaggaaagggcagcaataaggggccactaggtgtgacagaggaactgcacatcatcagcttcacggtcaaatatacctaccagggtctgaagcaggagctgaaaacggacaccctccctgtggtgattatttccaacatgaaccagctctcaattgcctgggcttcagttctctggttcaatttgctcagcccaaaccttcagaaccagcagttcttctccaacccccccaaggccccctggagcttgctgggccctgctctcagttggcagttctcctcctatgttggccgaggcctcaactcagaccagctgagcatgctgagaaacaagctgttcgggcagaactgtaggactgaggatccattattgtcctgggctgacttcactaagcgagagagccctcctggcaagttaccattctggacatggctggacaaaattctggagttggtacatgaccacctgaaggatctctggaatgatggacgcatcatgggctttgtgagtcggagccaggagcgccggctgctgaagaagaccatgtctggcacctttctactgcgcttcagtgaatcgtcagaagggggcattacctgctcctgggtggagcaccaggatgatgacaaggtgctcatctactctgtgcaaccgtacacgaaggaggtgctgcagtcactcccgctgactgaaatcatccgccattaccagttgctcactgaggagaatatacctgaaaacccactgcgcttcctctatccccgaatcccccgggatgaagcttttgggtgctactaccaggagaaagttaatctccaggaacggaggaaatacctgaaacacaggctcattgtggtctctaatagacaggtggatgaactgcaacaaccgctggagcttaagccagagccagagctggagtcattagagctggaactagggctggtgccagagccagagctcagcctggacttagagccactgctgaaggcagggctggatctggggccagagctagagtctgtgctggagtccactctggagcctgtgatagagcccacactatgcatggtatcacaaacagtgccagagccagaccaaggacctgtatcacagccagtgccagagccagatttgccctgtgatctgagacatttgaacactgagccaatggaaatcttcagaaactgtgtaaagattgaagaaatcatgccgaatggtgacccactgttggctggccagaacaccgtggatgaggtttacgtctcccgccccagccacttctacactgatggacccttgatgccttctgacttctaggaaccacatttcctctgttcttttcatatctcttgcccttcctactcctcatagcatgatattgttctccaaggatgggaatcaggcatgtgtcccttccaagctgtgttaactgttcaaactcaggcctgtgtgactccattggggtgagaggtgaaagcataacatgggtacagaggggacaacaatgaatcagaacagatgctgagccataggtctaaataggatcctggaggctgcctgctgtgctgggaggtataggggtcctgggggcaggccagggcagttgacaggtacttggagggctcagggcagtggcttctttccagtatggaaggatttcaacattttaatagttggttaggctaaactggtgcatactggcattggcccttggtggggagcacagacacaggataggactccatttctttcttccattccttcatgtct

SEQ ID NO: 20698 - DNA, 536 bp, Homo sapiens
  misc_feature 1..536: note = ENST00000555488
  source 1..536: mol_type = unassigned DNA
atcgtcagaagggggcattacctgctcctgggtggagcaccaggatgatggtcagctgctctgccctgccattcccacagcctctcctttctgcctggctcccctcttgcccctctgcctgcccttggcttccctggctctgaactgaatccctcagctggtttgggactgggcagccagagcagagagctccaaggcccggcctcttccctcaagcccgcctgttcctgcattcactctccagacaaggtgctcatctactctgtgcaaccgtacacgaaggaggtgctgcagtcactcccgctgactgaaatcatccgccattaccagttgctcactgaggagaatatacctgaaaacccactgcgcttcctctatccccgaatcccccgggatgaagcttttgggtgctactaccaggagaaagttaatctccaggaacggaggaaatacctgaaacacaggctcattgtggtctctaatagacaggtggatgaactgcaacaaccgctggagcttaagccagagccagagct

SEQ ID NO: 20699 - DNA, 662 bp, Homo sapiens
  misc_feature 1..662: note = ENST00000557199
  source 1..662: mol_type = unassigned DNA
cttttctctcagcctttccccagccttagtcttttctgtccctctgtcctatctatcccaggacccctggcttccctcatcatctgtctgtggctatctgtcccacagggcagaactgtaggactgaggatccattattgtcctgggctgacttcactaaggtaactccctgaatcctgtggagctgctggatctagcccacattccaaatactggccttcccacgtccctccttccctacaccagaggcaactcctcagcttttgctacctttccattcctcctccagcgagagagccctcctggcaagttaccattctggacatggctggacaaaattctggagttggtacatgaccacctgaaggatctctggaatgatggacgcatcatgggctttgtgagtcggagccaggagcgccggctgctgaagaagaccatgtctggcacctttctactgcgcttcagtgaatcgtcagaagggggcattacctgctcctgggtggagcaccaggatgatggtcagctgctctgccctgccattcccacagcctctcctttctgcctggctcccctcttgcccctctgcctgcccttggcttccctggctctgaactgaatccctcagctggtttgggactgggcagccagagcagagagct

SEQ ID NO: 20700 - DNA, 1548 bp, Homo sapiens
  misc_feature 1..1548: note = ENST00000418572
  source 1..1548: mol_type = unassigned DNA
agctcatactagggacgggaagtcgcgaccagagccattggagggcgcggggactgcaaccctaatcagagcccaaatggcgcagtgggaaatgctgcagaatcttgacagcccctttcaggatcagctgcaccagctttactcgcacagcctcctgcctgtggacattcgacagtacttggctgtctggattgaagaccagaactggcaggaagctgcacttgggagtgatgattccaaggctaccatgctattcttccacttcttggatcagctgaactatgagtgtggccgttgcagccaggacccagagtccttgttgctgcagcacaatttgcggaaattctgccgggacattcaggatcctacccagttggctgagatgatctttaacctccttctggaagaaaaaagaattttgatccaggctcagagggcccaattggaacaaggagagccagttctcgaaacacctgtggagagccagcaacatgagattgaatcccggatcctggatttaagggctatgatggagaagctggtaaaatccatcagccaactgaaagaccagcaggatgtcttctgcttccgatataagatccaggccaaagggaagacaccctctctggacccccatcagaccaaagagcagaagattctgcaggaaactctcaatgaactggacaaaaggagaaaggaggtgctggatgcctccaaagcactgctaggccgattaactaccctaatcgagctactgctgccaaagttggaggagtggaaggcccagcagcaaaaagcctgcatcagagctcccattgaccacgggttggaacagctggagacatggttcacagctggagcaaagctgttgtttcacctgaggcagctgctgaaggagctgaagggactgagttgcctggttagctatcaggatgaccctctgaccaaaggggtggacctacgcaacgcccaggtcacagagttgctacagcgtctgctccacagagcctttgtggtagaaacccagccctgcatgccccaaactccccatcgacccctcatcctcaagactggcagcaagttcaccgtccgaacaaggctgctggtgagactccaggaaggcaatgagtcactgactgtggaagtctccattgacaggaatcctcctcaattacaaggcttccggaagttcaacattctgacttcaaaccagaaaactttgacccccgagaaggggcagagtcagggtttgatttgggactttggttacctgactctggtggagcaacgttcaggtggttcaggaaagggcagcaataaggggccactaggtgtgacagaggaactgcacatcatcagcttcacggtcaaatatacctaccagggtctgaagcaggagctgaaagtgagtgaaaatggagggcaaggagagagaaagcagctttggaagaaggcataagaaggggataaacagaagcctcttgggaaccagcagttcttctccaacccccccaaggccccctggagcttgctgggccctgctctcag

SEQ ID NO: 20701 - DNA, 588 bp, Homo sapiens
  misc_feature 1..588: note = ENST00000555519
  source 1..588: mol_type = unassigned DNA
cagagctcccattgaccacgggttggaacagctggagacatgagcctttgtggtagaaacccagccctgcatgccccaaactccccatcgacccctcatcctcaagactggcagcaagttcaccgtccgaacaaggctgctggtgagactccaggaaggcaatgagtcactgactgtggaagtctccattgacaggaatcctcctcaattacaagggtaggtgcttgacaaggacactgcaaacatctgtacagtgtatgacctgcagaaccacattcggcagccctggtggcacaaacaaggaagagggggatttgggatatggacaaagggagatggcgagatctgaaatgaagtggaacttctgtttttttttttctgctgagtttttagaataattccattccttgtctccatgtatcttcctcctggaacagcttccggaagttcaacattctgacttcaaaccagaaaactttgacccccgagaaggggcagagtcagggtttgatttgggactttggttacctgactctggtggagcaacgttcaggtggttcaggaaagggcagcaataaggggccacta

SEQ ID NO: 20702 - DNA, 717 bp, Homo sapiens
  misc_feature 1..717: note = ENST00000557252
  source 1..717: mol_type = unassigned DNA
ggtagaaacccagccctgcatgccccaaactccccatcgacccctcatcctcaagactggcagcaagttcaccgtccgaacaaggctgctggtgagactccaggaaggcaatgagtcactgactgtggaagtctccattgacaggaatcctcctcaattacaagggtaggtgcttgacaaggacactgcaaacatctgtacagtgtatgacctgcagaaccacattcggcagccctggtggcacaaacaaggaagagggggatttgggatatggacaaagggagatggcgagatctgaaatgaagtggaacttctgtttttttttttctgctgagtttttagaataattccattccttgtctccatgtatcttcctcctggaacagcttccggaagttcaacattctgacttcaaaccagaaaactttgacccccgagaaggggcagagtcagggtttgatttgggactttggttacctggtaagaatagtttgtgacctatgcttttattactatttttatttttttgagacggagtctcactctgtcccccaggctggagtgcagtggtgccatcttggctcacagcaacctccgcctcccgggttcaagcaattcttctgtctcagcctcctgagtagctgagactataggcacacaccaccatgcccggctaatttttgtatttttagtagagatagggtttcaccatattgg

SEQ ID NO: 20703 - DNA, 1454 bp, Homo sapiens
  misc_feature 1..1454: note = ENST00000556140
  source 1..1454: mol_type = unassigned DNA
tctagtacccgagctcatactagggacgggaagtcgcgaccagagccattggagggcgcggggactgcaaccctaatcagagcccaaatggcgcagtgggaaatgctgcagaatcttgacagcccctttcaggatcagctgcaccagctttactcgcacagcctcctgcctgtggacattcgacagtacttggctgtctggattgaagaccagaactggcaggaagctgcacttgggagtgatgattccaaggctaccatgctattcttccacttcttggatcagctgaactatgagtgtggccgttgcagccaggacccagagtccttgttgctgcagcacaatttgcggaaattctgccgggacattcagcccttttcccaggatcctacccagttggctgagatgatctttaacctccttctggaagaaaaaagaattttgatccaggctcagagggcccaattggaacaaggagagccagttctcgaaacacctgtggagagccagcaacatgagattgaatcccggatcctggatttaagggctatgatggagaagctggtaaaatccatcagccaactgaaagaccagcaggatgtcttctgcttccgatataagatccaggccaaaggtaggaagcacattgaggggctggagaaagataagtgcctgctgagaagccggagctggaagtgaacaggagaaagctccgatgagcagtagtcactgtcagacacaccccactgactacagtcctgctgccgtgcaaagctggaagtgctttgtggaggctgagctggaggtgcagctgagagacagtaaatgttgaggaaatgcatggaaaactaacagtgttttatttgagggggtgtctggtccaagcatgaccattcagaatttgcctgagggtcccacaggtgcctgtgctttgcttggtttccctttcttcctccacaaaattcctccttcctgactctgactgagaccccagtcaggaaggagaggaaagaacccctggactgactcctgttcccaccatccagggaagacaccctctctggacccccatcagaccaaagagcagaagattctgcaggaaactctcaatgaactggacaaaaggagaaaggaggtgctggatgcctccaaagcactgctaggccgattaactaccctaatcgagctactgctgccaaagttggaggagtggaaggcccagcagcaaaaagcctgcatcagagctcccattgaccacgggttggaacagctggagacatggttcacagctggagcaaagctgttgtttcacctgaggcagctgctgaaggagctgaagggactgagttgcctggttagctatcaggatgaccctctgaccaaaggggtggacctacgcaacgcccaggtcacagagttgctacagcgtctgctccacagagcctttgtggtag

SEQ ID NO: 20704 - DNA, 539 bp, Homo sapiens
  misc_feature 1..539: note = ENST00000557156
  source 1..539: mol_type = unassigned DNA
accatccagggaagacaccctctctggacccccatcagaccaaagagcagaagattctgcaggaaactctcaatgaactggacaaaaggagaaaggaggtgctggatgcctccaaagcactgctaggccgattaactaccctaatcgagctactgctgccaaagttggaggagtggaaggcccagcagcaaaaagcctgcatcagagctcccattgaccacgggttggaacagctggagacatggtgagaggtaccaccccaaccctcgtcctcgccatgcgctgtgatttgttcacagctggagcaaagctgttgtttcacctgaggcagctgctgaaggagctgaagggactgagttgcctggttagctatcaggatgaccctctgaccaaaggggtggacctacgcaacgcccaggtcacagagttgctacagcgtctgctccacaggtctagaggccaggcaggaaccctgggggaaagaaggaacaagggaagccattcttacagatactgagctatatattctctccacacct

SEQ ID NO: 20705 - DNA, 1063 bp, Homo sapiens
  misc_feature 1..1063: note = ENST00000557417
  source 1..1063: mol_type = unassigned DNA
gtaggcggggcgcgaggttctagtacccgagctcatactagggacgggaagtcgcgaccagagccattggagggcgcggggactgcaaccctaatcagagcccaaatggcgcagtgggaaatgctgcagaatcttgacagcccctttcaggatcagctgaactatgagtgtggccgttgcagccaggacccagagtccttgttgctgcagcacaatttgcggaaattctgccgggacattcagcccttttcccaggatcctacccagttggctgagatgatctttaacctccttctggaagaaaaaagaattttgatccaggctcagagggcccaattggaacaaggagagccagttctcgaaacacctgtggagagccagcaacatgagattgaatcccggatcctggatttaagggctatgatggagaagctggtaaaatccatcagccaactgaaagaccagcaggatgtcttctgcttccgatataagatccaggccaaaggtaggaagcacattgaggggctggagaaagataagtgcctgctgagaagccggagctggaagtgaacaggagaaagctccgatgagcagtagtcactgtcagacacaccccactgactacagtcctgctgccgtgcaaagctggaagtgctttgtggaggctgagctggaggtgcagctgagagacagtaaatgttgaggaaatgcatggaaaactaacagtgttttatttgagggggtgtctggtccaagcatgaccattcagaatttgcctgagggtcccacaggtgcctgtgctttgcttggtttccctttcttcctccacaaaattcctccttcctgactctgactgagaccccagtcaggaaggagaggaaagaacccctggactgactcctgttcccaccatccagggaagacaccctctctggacccccatcagaccaaagagcagaagattctgcaggaaactctcaatgaactggacaaaaggagaaaggaggtgctggatgcctccaaagcactgctaggccgattaactaccctaatcgagctactg

SEQ ID NO: 20706 - DNA, 603 bp, Homo sapiens
  misc_feature 1..603: note = ENST00000555646
  source 1..603: mol_type = unassigned DNA
aagtcgcgaccagagccattggagggcgcggggactgcaaccctaatcagagcccaaatggcgcagtgggaaatgctgcagaatcttgacagcccctttcaggatcagctgcaccagctttactcgcacagcctcctgcctgtggacattcgacagtacttggctgtctggattgaagaccagaactggaagctgcacttgggagtgatgattccaaggctaccatgctattcttccacttcttggatcagctgaactatgagtgtggccgttgcagccaggacccagagtccttgttgctgcagcacaatttgcggaaattctgccgggacattcagcccttttcccaggatcctacccagttggctgagatgatctttaacctccttctggaagaaaaaagaattttgatccaggctcagagggcccaattggaacaaggagagccagttctcgaaacacctgtggagagccagcaacatgagattgaatcccggatcctggatttaagggctatgatggagaagctggtaaaatccatcagccaactgaaagaccagcaggatgtcttctgcttccgatataagatccaggccaaaggta

SEQ ID NO: 20707 - DNA, 4301 bp, Homo sapiens
  misc_feature 1..4301: note = ENST00000345506
  source 1..4301: mol_type = unassigned DNA
agacaggatattcactgctgtggcaaggcctgtagagagtttcgaagttaggaggactcaagacggtccctccctggacttttctgaaggggctcaaaagatgacacgcgccagagctggaaggcgtcgccaattggtccacttttccctcctccctttttgcggatgagaaaactgaggcccaggtttgggatttccagagcccgggatttcccggcaacgcccgacaaccacattcccccggctattctgacccgccccggttccgggacgctccctgggagccgccgccgagggcctgctgggactcccgggggaccccgccgtcggggcagcccccacgcccggcgccgcccgccgggaacggccgccgctgttgcgcacttgcaggggagccggcgactgagggcgaggcagggagggagcaagcggggctgggagggctgctggcgcgggctcgcgcgctgtgtatggtctatcgcaggcagctgacctttgaggaggaaatcgctgctctccgctccttcctgtagtaacagccgccgctgccgccgccgccaggaaccccggccgggagcgagagccgcggggcgcagagccggcccggctgccggacggtgcggccccaccaggtgaacggccatggcgggctggatccaggcccagcagctgcagggagacgcgctgcgccagatgcaggtgctgtacggccagcacttccccatcgaggtccggcactacttggcccagtggattgagagccagccatgggatgccattgacttggacaatccccaggacagagcccaagccacccagctcctggagggcctggtgcaggagctgcagaagaaggcggagcaccaggtgggggaagatgggtttttactgaagatcaagctggggcactacgccacgcagctccagaaaacatatgaccgctgccccctggagctggtccgctgcatccggcacattctgtacaatgaacagaggctggtccgagaagccaacaattgcagctctccggctgggatcctggttgacgccatgtcccagaagcaccttcagatcaaccagacatttgaggagctgcgactggtcacgcaggacacagagaatgagctgaagaaactgcagcagactcaggagtacttcatcatccagtaccaggagagcctgaggatccaagctcagtttgcccagctggcccagctgagcccccaggagcgtctgagccgggagacggccctccagcagaagcaggtgtctctggaggcctggttgcagcgtgaggcacagacactgcagcagtaccgcgtggagctggccgagaagcaccagaagaccctgcagctgctgcggaagcagcagaccatcatcctggatgacgagctgatccagtggaagcggcggcagcagctggccgggaacggcgggccccccgagggcagcctggacgtgctacagtcctggtgtgagaagttggccgagatcatctggcagaaccggcagcagatccgcagggctgagcacctctgccagcagctgcccatccccggcccagtggaggagatgctggccgaggtcaacgccaccatcacggacattatctcagccctggtgaccagcacattcatcattgagaagcagcctcctcaggtcctgaagacccagaccaagtttgcagccaccgtacgcctgctggtgggcgggaagctgaacgtgcacatgaatcccccccaggtgaaggccaccatcatcagtgagcagcaggccaagtctctgcttaaaaatgagaacacccgcaacgagtgcagtggtgagatcctgaacaactgctgcgtgatggagtaccaccaagccacgggcaccctcagtgcccacttcaggaacatgtcactgaagaggatcaagcgtgctgaccggcggggtgcagagtccgtgacagaggagaagttcacagtcctgtttgagtctcagttcagtgttggcagcaatgagcttgtgttccaggtgaagactctgtccctacctgtggttgtcatcgtccacggcagccaggaccacaatgccacggctactgtgctgtgggacaatgcctttgctgagccgggcagggtgccatttgccgtgcctgacaaagtgctgtggccgcagctgtgtgaggcgctcaacatgaaattcaaggccgaagtgcagagcaaccggggcctgaccaaggagaacctcgtgttcctggcgcagaaactgttcaacaacagcagcagccacctggaggactacagtggcctgtccgtgtcctggtcccagttcaacagggagaacttgccgggctggaactacaccttctggcagtggtttgacggggtgatggaggtgttgaagaagcaccacaagccccactggaatgatggggccatcctaggttttgtgaataagcaacaggcccacgacctgctcatcaacaagcccgacgggaccttcttgttgcgctttagtgactcagaaatcgggggcatcaccatcgcctggaagtttgactccccggaacgcaacctgtggaacctgaaaccattcaccacgcgggatttctccatcaggtccctggctgaccggctgggggacctgagctatctcatctatgtgtttcctgaccgccccaaggatgaggtcttctccaagtactacactcctgtgctggctaaagctgttgatggatatgtgaaaccacagatcaagcaagtggtccctgagtttgtgaatgcatctgcagatgctgggggcagcagcgccacgtacatggaccaggccccctccccagctgtgtgcccccaggctccctataacatgtacccacagaaccctgaccatgtactcgatcaggatggagaattcgacctggatgagaccatggatgtggccaggcacgtggaggaactcttacgccgaccaatggacagtcttgactcccgcctctcgccccctgccggtcttttcacctctgccagaggctccctctcatgaatgtttgaatcccacgcttctctttggaaacaatatgcaatgtgaagcggtcgtgttgtgagtttagtaaggctgtgtacactgacacctttgcaggcatgcatgtgcttgtgtgtgtgtgtgtgtgtgtgtccttgtgcatgagctacgcctgcctcccctgtgcagtcctgggatgtggctgcagcagcggtggcctcttttcagatcatggcatccaagagtgcgccgagtctgtctctgtcatggtagagaccgagcctctgtcactgcaggcactcaatgcagccagacctattcctcctgggcccctcatctgctcagcagctatttgaatgagatgattcagaaggggaggggagacaggtaacgtctgtaagctgaagtttcactccggagtgagaagctttgccctcctaagagagagagacagagagacagagagagagaaagagagagtgtgtgggtctatgtaaatgcatctgtcctcatgtgttgatgtaaccgattcatctctcagaagggaggctggggttcattttcgagtagtattttatactttagtgaacgtggactccagactctctgtgaaccctatgagagcgcgtctgggcccggccatgtccttagcacaggggggccgccggtttgagtgagggtttctgagctgctctgaattagtccttgcttggctgcttggccttgggcttcattcaagtctatgatgctgttgcccacgtttcccgggatatatattctctcccctccgttgggccccagccttctttgcttgcctctctgtttgtaaccttgtcgacaaagaggtagaaaagattgggtctaggatatggtgggtggacaggggccccgggacttggagggttggtcctcttgcctcctggaaaaaacaaaaacaaaaaactgcagtgaaagacaagctgcaaatcagccatgtgctgcgtgcctgtggaatctggagtgaggggtaaaagctgatctggtttgactccgctggaggtggggcctggagcaggccttgcgctgttgcgtaactggctgtgttctggtgaggccttgctcccaaccccacacgctcctccctctgaggctgtaggactcgcagtcaggggcagctgaccatggaagattgagagcccaaggtttaaacttctctgaagggaggtggggatgagaagaggggtttttttgtactttgtacaaagaccacacatttgtgtaaacagtgttttggaataaaatatttttttcataaa

SEQ ID NO: 20708 - DNA, 3318 bp, Homo sapiens
  misc_feature 1..3318: note = ENST00000590949
  source 1..3318: mol_type = unassigned DNA
agatggccggagtaaaagaaggagggaggtgctgcggtggtgggggtgatcttggcttcactagaatccccagttcttcccctctctacagttttgtctctgaggtcacaaaacctgtggcccccaagacacacatgcgcacacacgcgcgtgcacacacacaccccacacatttattttttaatctaggggctcaaaagatgacacgcgccagagctggaaggcgtcgccaattggtccacttttccctcctccctttttgcggatgagaaaactgaggcccaggtttgggatttccagagcccgggatttcccggcaacgcccgacaaccacattcccccggctattctgacccgccccggttccgggacgctccctgggagccgccgccgagggcctgctgggactcccgggggaccccgccgtcggggcagcccccacgcccggcgccgcccgccgggaacggccgccgctgttgcgcacttgcaggggagccggcgactgagggcgaggcagggagggagcaagcggggctgggagggctgctggcgcgggctcgcgcgctgtgtatggtctatcgcaggcagctgacctttgaggaggaaatcgctgctctccgctccttcctgtagtaacagccgccgctgccgccgccgccaggaaccccggccgggagcgagagccgcggggcgcagagccggcccggctgccggacggtgcggccccaccaggtgaacggccatggcgggctggatccaggcccagcagctgcagggagacgcgctgcgccagatgcaggtgctgtacggccagcacttccccatcgaggtccggcactacttggcccagtggattgagagccagccatgggatgccattgacttggacaatccccaggacagagcccaagccacccagctcctggagggcctggtgcaggagctgcagaagaaggcggagcaccaggtgggggaagatgggtttttactgaagatcaagctggggcactacgccacgcagctccagaaaacatatgaccgctgccccctggagctggtccgctgcatccggcacattctgtacaatgaacagaggctggtccgagaagccaacaattgcagctctccggctgggatcctggttgacgccatgtcccagaagcaccttcagatcaaccagacatttgaggagctgcgactggtcacgcaggacacagagaatgagctgaagaaactgcagcagactcaggagtacttcatcatccagtaccaggagagcctgaggatccaagctcagtttgcccagctggcccagctgagcccccaggagcgtctgagccgggagacggccctccagcagaagcaggtgtctctggaggcctggttgcagcgtgaggcacagacactgcagcagtaccgcgtggagctggccgagaagcaccagaagaccctgcagctgctgcggaagcagcagaccatcatcctggatgacgagctgatccagtggaagcggcggcagcagctggccgggaacggcgggccccccgagggcagcctggacgtgctacagtcctggtgtgagaagttggccgagatcatctggcagaaccggcagcagatccgcagggctgagcacctctgccagcagctgcccatccccggcccagtggaggagatgctggccgaggtcaacgccaccatcacggacattatctcagccctggtgaccagcacattcatcattgagaagcagcctcctcaggtcctgaagacccagaccaagtttgcagccaccgtacgcctgctggtgggcgggaagctgaacgtgcacatgaatcccccccaggtgaaggccaccatcatcagtgagcagcaggccaagtctctgcttaaaaatgagaacacccgcaacgagtgcagtggtgagatcctgaacaactgctgcgtgatggagtaccaccaagccacgggcaccctcagtgcccacttcaggaacatgtcactgaagaggatcaagcgtgctgaccggcggggtgcagagtccgtgacagaggagaagttcacagtcctgtttgagtctcagttcagtgttggcagcaatgagcttgtgttccaggtgaagactctgtccctacctgtggttgtcatcgtccacggcagccaggaccacaatgccacggctactgtgctgtgggacaatgcctttgctgagccgggcagggtgccatttgccgtgcctgacaaagtgctgtggccgcagctgtgtgaggcgctcaacatgaaattcaaggccgaagtgcagagcaaccggggcctgaccaaggagaacctcgtgttcctggcgcagaaactgttcaacaacagcagcagccacctggaggactacagtggcctgtccgtgtcctggtcccagttcaacagggagaacttgccgggctggaactacaccttctggcagtggtttgacggggtgatggaggtgttgaagaagcaccacaagccccactggaatgatggggccatcctaggttttgtgaataagcaacaggcccacgacctgctcatcaacaagcccgacgggaccttcttgttgcgctttagtgactcagaaatcgggggcatcaccatcgcctggaagtttgactccccggaacgcaacctgtggaacctgaaaccattcaccacgcgggatttctccatcaggtccctggctgaccggctgggggacctgagctatctcatctatgtgtttcctgaccgccccaaggatgaggtcttctccaagtactacactcctgtgctggctaaagctgttgatggatatgtgaaaccacagatcaagcaagtggtccctgagtttgtgaatgcatctgcagatgctgggggcagcagcgccacgtacatggaccaggccccctccccagctgtgtgcccccaggctccctataacatgtacccacagaaccctgaccatgtactcgatcaggatggagaattcgacctggatgagaccatggatgtggccaggcacgtggaggaactcttacgccgaccaatggacagtcttgactcccgcctctcgccccctgccggtcttttcacctctgccagaggctccctctcatgaatgtttgaatcccacgcttctctttggaaacaatatgcaatgtgaagcggtcgtgttgtgagtttagtaaggctgtgtacactgacacctttgcaggcatgcatgtgcttgtgtgtgtgtgtgtgtgtgtgtccttgtgcatgagctacgcctgcctcccctgtgcagtcctgggatgtggctgcagcagc

SEQ ID NO: 20709 - DNA, 3086 bp, Homo sapiens
  misc_feature 1..3086: note = ENST00000546010
  source 1..3086: mol_type = unassigned DNA
gccagagctggaaggcgtcgccaattggtccacttttccctcctccctttttgcggatgagaaaactgaggcccaggtttgggatttccagagcccgggatttcccggcaacgcccgacaaccacattcccccggctattctgacccgccccggttccgggacgctccctgggagccgccgccgagggcctgctgggactcccgggggaccccgccgtcggggcagcccccacgcccggcgccgcccgccgggaacggccgccgctgttgcgcacttgcaggggagccggcgactgagggcgaggcagggagggagcaagcggggctgggagggctgctggcgcgggctcgcgcgctgtgtatggtctatcgcaggcagctgacctttgaggaggaaatcgctgctctccgctccttcctgtagtaacagccgccgctgccgccgccgccaggaaccccggccgggagcgagagccgcggggcgcagagccggcccggctgccggacggtgcggccccaccaggtgaacggccatggcgggctggatccaggcccagcagctgcagggagacgcgctgcgccagatgcaggtgctgtacggccagcacttccccatcgaggtccggcactacttggcccagtggattgagagccagccatgggatgccattgacttggacaatccccaggacagagcccaagccacccagctcctggagggcctggtgcaggagctgcagaagaaggcggagcaccaggtgggggaagatgggtttttactgaagatcaagctggggcactacgccacgcagctccagtgcagctctccggctgggatcctggttgacgccatgtcccagaagcaccttcagatcaaccagacatttgaggagctgcgactggtcacgcaggacacagagaatgagctgaagaaactgcagcagactcaggagtacttcatcatccagtaccaggagagcctgaggatccaagctcagtttgcccagctggcccagctgagcccccaggagcgtctgagccgggagacggccctccagcagaagcaggtgtctctggaggcctggttgcagcgtgaggcacagacactgcagcagtaccgcgtggagctggccgagaagcaccagaagaccctgcagctgctgcggaagcagcagaccatcatcctggatgacgagctgatccagtggaagcggcggcagcagctggccgggaacggcgggccccccgagggcagcctggacgtgctacagtcctggtgtgagaagttggccgagatcatctggcagaaccggcagcagatccgcagggctgagcacctctgccagcagctgcccatccccggcccagtggaggagatgctggccgaggtcaacgccaccatcacggacattatctcagccctggtgaccagcacattcatcattgagaagcagcctcctcaggtcctgaagacccagaccaagtttgcagccaccgtacgcctgctggtgggcgggaagctgaacgtgcacatgaatcccccccaggtgaaggccaccatcatcagtgagcagcaggccaagtctctgcttaaaaatgagaacacccgcaacgagtgcagtggtgagatcctgaacaactgctgcgtgatggagtaccaccaagccacgggcaccctcagtgcccacttcaggaacatgtcactgaagaggatcaagcgtgctgaccggcggggtgcagagtccgtgacagaggagaagttcacagtcctgtttgagtctcagttcagtgttggcagcaatgagcttgtgttccaggtgaagactctgtccctacctgtggttgtcatcgtccacggcagccaggaccacaatgccacggctactgtgctgtgggacaatgcctttgctgagccgggcagggtgccatttgccgtgcctgacaaagtgctgtggccgcagctgtgtgaggcgctcaacatgaaattcaaggccgaagtgcagagcaaccggggcctgaccaaggagaacctcgtgttcctggcgcagaaactgttcaacaacagcagcagccacctggaggactacagtggcctgtccgtgtcctggtcccagttcaacagggagaacttgccgggctggaactacaccttctggcagtggtttgacggggtgatggaggtgttgaagaagcaccacaagccccactggaatgatggggccatcctaggttttgtgaataagcaacaggcccacgacctgctcatcaacaagcccgacgggaccttcttgttgcgctttagtgactcagaaatcgggggcatcaccatcgcctggaagtttgactccccggaacgcaacctgtggaacctgaaaccattcaccacgcgggatttctccatcaggtccctggctgaccggctgggggacctgagctatctcatctatgtgtttcctgaccgccccaaggatgaggtcttctccaagtactacactcctgtgctggctaaagctgttgatggatatgtgaaaccacagatcaagcaagtggtccctgagtttgtgaatgcatctgcagatgctgggggcagcagcgccacgtacatggaccaggccccctccccagctgtgtgcccccaggctccctataacatgtacccacagaaccctgaccatgtactcgatcaggatggagaattcgacctggatgagaccatggatgtggccaggcacgtggaggaactcttacgccgaccaatggacagtcttgactcccgcctctcgccccctgccggtcttttcacctctgccagaggctccctctcatgaatgtttgaatcccacgcttctctttggaaacaatatgcaatgtgaagcggtcgtgttgtgagtttagtaaggctgtgtacactgacacctttgcaggcatgcatgtgcttgtgtgtgtgtgtgtgtgtgtgtccttgtgcatgagctacgcctgcctcccctgtgcagtcctgggatgtggctgcagcagcggtggcctcttttcagatcatggcatccaagagtgcgccgagtctgtctctgtcatggtagagaccg

SEQ ID NO: 20710 - DNA, 835 bp, Homo sapiens
  misc_feature 1..835: note = ENST00000590726
  source 1..835: mol_type = unassigned DNA
ggaaatcgctgctctccgctccttcctgtagtaacagccgccgctgccgccgccgccaggaaccccggccgggagcgagagccgcggggcgcagagccggcccggctgccggacggtgcggccccaccagggatgccattgacttggacaatccccaggacagagcccaagccacccagctcctggagggcctggtgcaggagctgcagaagaaggcggagcaccaggtgggggaagatgggtttttactgaagatcaagctggggcactacgccacgcagctccagaaaacatatgaccgctgccccctggagctggtccgctgcatccggcacattctgtacaatgaacagaggctggtccgagaagccaacaattgcagctctccggctgggatcctggttgacgccatgtcccagaagcaccttcagatcaaccagacatttgaggagctgcgactggtcacgcaggacacagagaatgagctgaagaaactgcagcagactcaggagtacttcatcatccagtaccaggagagcctgaggatccaagctcagtttgcccagctggcccagctgagcccccaggagcgtctgagccgggagacggccctccagcagaagcaggtgtctctggaggcctggttgcagcgtgaggcacagacactgcagcagtaccgcgtggagctggccgagaagcaccagaagaccctgcagctgctgcggaagcagcagaccatcatcctggatgacgagctgatccagtggaagcggcggcagcagctggccgggaacggcgggccccccgagggcagcctggacgtgctacagtcctg

SEQ ID NO: 20711 - DNA, 562 bp, Homo sapiens
  misc_feature 1..562: note = ENST00000469124
  source 1..562: mol_type = unassigned DNA
ccttcctgtagtaacagccgccgctgccgccgccgccaggaaccccggccgggagcgagagccgcggggcgcagagccggcccggctgccggacggtgcggccccaccaggtgaacggccatggcgggctggatccaggcccagcagctgcagggagacgcgctgcgccagatgcaggtgctgtacggccagcacttccccatcgaggtccggcactacttggcccagtggattgagagccagccatgggatgccattgacttggacaatccccaggacagagcccaagccacccagctcctggagggcctggtgcaggagctgcagaagaaggcggagcaccaggtgggggaagatgggtttttactgaagatcaagctggggcactacgccacgcagctccaggtgggtgtaggctctgggccacctacggggaggaagcatcatcttgttccagcatcagaacccctgggttttttcctggcctggccactgactcaccatgtgaccacgaacttattgggaacttttcttcgatttcccccaccccctctttctaaat

SEQ ID NO: 20712 - DNA, 515 bp, Homo sapiens
  misc_feature 1..515: note = ENST00000444283
  source 1..515: mol_type = unassigned DNA
aacagccgccgctgccgccgccgccaggaaccccggccgggagcgagagccgcggggcgcagagccggcccggctgccggacggtgcggccccaccagaggagagcgcttcagcgctcggctcgccctaggtgaacggccatggcgggctggatccaggcccagcagctgcagggagacgcgctgcgccagatgcaggtgctgtacggccagcacttccccatcgaggtccggcactacttggcccagtggattgagagccagccatgggatgccattgacttggacaatccccaggacagagcccaagccacccagctcctggagggcctggtgcaggagctgcagaagaaggcggagcaccaggtgggggaagatgggtttttactgaagatcaagctggggcactacgccacgcagctccagaaaacatatgaccgctgccccctggagctggtccgctgcatccggcacattctgtacaatgaacagaggctggtccgagaagccaacaat

SEQ ID NO: 20713 - DNA, 3629 bp, Homo sapiens
  misc_feature 1..3629: note = ENST00000588868
  source 1..3629: mol_type = unassigned DNA
gcgagagccgcggggcgcagagccggcccggctgccggacggtgcggccccaccaggtgaacggccatggcgggctggatccaggcccagcagctgcagggagacgcgctgcgccagatgcaggtgctgtacggccagcacttccccatcgaggtccggcactacttggcccagtggattgagagccagccatgggatgccattgacttggacaatccccaggacagagcccaagccacccagctcctggagggcctggtgcaggagctgcagaagaaggcggagcaccaggtgggggaagatgggtttttactgaagatcaagctggggcactacgccacgcagctccagaaaacatatgaccgctgccccctggagctggtccgctgcatccggcacattctgtacaatgaacagaggctggtccgagaagccaacaattgcagctctccggctgggatcctggttgacgccatgtcccagaagcaccttcagatcaaccagacatttgaggagctgcgactggtcacgcaggacacagagaatgagctgaagaaactgcagcagactcaggagtacttcatcatccagtaccaggagagcctgaggatccaagctcagtttgcccagctggcccagctgagcccccaggagcgtctgagccgggagacggccctccagcagaagcaggtgtctctggaggcctggttgcagcgtgaggcacagacactgcagcagtaccgcgtggagctggccgagaagcaccagaagaccctgcagctgctgcggaagcagcagaccatcatcctggatgacgagctgatccagtggaagcggcggcagcagctggccgggaacggcgggccccccgagggcagcctggacgtgctacagtcctggtgtgagaagttggccgagatcatctggcagaaccggcagcagatccgcagggctgagcacctctgccagcagctgcccatccccggcccagtggaggagatgctggccgaggtcaacgccaccatcacggacattatctcagccctggtgaccagcacattcatcattgagaagcagcctcctcaggtcctgaagacccagaccaagtttgcagccaccgtacgcctgctggtgggcgggaagctgaacgtgcacatgaatcccccccaggtgaaggccaccatcatcagtgagcagcaggccaagtctctgcttaaaaatgagaacacccgcaacgagtgcagtggtgagatcctgaacaactgctgcgtgatggagtaccaccaagccacgggcaccctcagtgcccacttcaggaacatgtcactgaagaggatcaagcgtgctgaccggcggggtgcagagtccgtgacagaggagaagttcacagtcctgtttgagtctcagttcagtgttggcagcaatgagcttgtgttccaggtgaagggcagggtgccatttgccgtgcctgacaaagtgctgtggccgcagctgtgtgaggcgctcaacatgaaattcaaggccgaagtgcagagcaaccggggcctgaccaaggagaacctcgtgttcctggcgcagaaactgttcaacaacagcagcagccacctggaggactacagtggcctgtccgtgtcctggtcccagttcaacagggagaacttgccgggctggaactacaccttctggcagtggtttgacggggtgatggaggtgttgaagaagcaccacaagccccactggaatgatggggccatcctaggttttgtgaataagcaacaggcccacgacctgctcatcaacaagcccgacgggaccttcttgttgcgctttagtgactcagaaatcgggggcatcaccatcgcctggaagtttgactccccggaacgcaacctgtggaacctgaaaccattcaccacgcgggatttctccatcaggtccctggctgaccggctgggggacctgagctatctcatctatgtgtttcctgaccgccccaaggatgaggtcttctccaagtactacactcctgtgctggctaaagctgttgatggatatgtgaaaccacagatcaagcaagtggtccctgagtttgtgaatgcatctgcagatgctgggggcagcagcgccacgtacatggaccaggccccctccccagctgtgtgcccccaggctccctataacatgtacccacagaaccctgaccatgtactcgatcaggatggagaattcgacctggatgagaccatggatgtggccaggcacgtggaggaactcttacgccgaccaatggacagtcttgactcccgcctctcgccccctgccggtcttttcacctctgccagaggctccctctcatgaatgtttgaatcccacgcttctctttggaaacaatatgcaatgtgaagcggtcgtgttgtgagtttagtaaggctgtgtacactgacacctttgcaggcatgcatgtgcttgtgtgtgtgtgtgtgtgtgtgtccttgtgcatgagctacgcctgcctcccctgtgcagtcctgggatgtggctgcagcagcggtggcctcttttcagatcatggcatccaagagtgcgccgagtctgtctctgtcatggtagagaccgagcctctgtcactgcaggcactcaatgcagccagacctattcctcctgggcccctcatctgctcagcagctatttgaatgagatgattcagaaggggaggggagacaggtaacgtctgtaagctgaagtttcactccggagtgagaagctttgccctcctaagagagagagacagagagacagagagagagaaagagagagtgtgtgggtctatgtaaatgcatctgtcctcatgtgttgatgtaaccgattcatctctcagaagggaggctggggttcattttcgagtagtattttatactttagtgaacgtggactccagactctctgtgaaccctatgagagcgcgtctgggcccggccatgtccttagcacaggggggccgccggtttgagtgagggtttctgagctgctctgaattagtccttgcttggctgcttggccttgggcttcattcaagtctatgatgctgttgcccacgtttcccgggatatatattctctcccctccgttgggccccagccttctttgcttgcctctctgtttgtaaccttgtcgacaaagaggtagaaaagattgggtctaggatatggtgggtggacaggggccccgggacttggagggttggtcctcttgcctcctggaaaaaacaaaaacaaaaaactgcagtgaaagacaagctgcaaatcagccatgtgctgcgtgcctgtggaatctggagtgaggggtaaaagctgatctggtttgactccgctggaggtggggcctggagcaggccttgcgctgttgcgtaactggctgtgttctggtgaggccttgctcccaaccccacacgctcctccctctgaggctgtaggactcgcagtcaggggcagctgaccatggaagattgagagcccaaggtttaaacttctctgaagggaggtggggatgagaagaggggtttttttgtactttgtacaaagaccacacatttgtgtaaacagtgttttggaataaaatatttttttcat

SEQ ID NO: 20714 - DNA, 550 bp, Homo sapiens
  misc_feature 1..550: note = ENST00000478897
  source 1..550: mol_type = unassigned DNA
ccttgttggaggggatgggcggccctccactcctcaccatctctgttcccgcacaggaaagctatctgtgggaggggaggggcctggcctggccgcggtccagggataggtaggcatggcaaggccaggggcaggcccggttccttggcctctgcagaggagagcgcttcagcgctcggctcgccctaggtgaacggccatggcgggctggatccaggcccagcagctgcagggagacgcgctgcgccagatgcaggtgctgtacggccagcacttccccatcgaggtccggcactacttggcccagtggattgagagccagccatgggatgccattgacttggacaatccccaggacagagcccaagccacccagctcctggagggcctggtgcaggagctgcagaagaaggcggagcaccaggtgggggaagatgggtttttactgaagatcaagctggggcactacgccacgcagctccagaaaacatatgaccgctgccccctggagctggtccgctgcatccggcacattctgtacaatgaacag

SEQ ID NO: 20715 - DNA, 553 bp, Homo sapiens
  misc_feature 1..553: note = ENST00000479417
  source 1..553: mol_type = unassigned DNA
gaagtcagtaacccagaaagacgccaagaaacactcttaggggatacggggcaggggctgctggcagggctgacctgagcgaagaccccagcccgaggtgtggacaggaccatgctcctggcctggggcccatgtggagctgggacccccctctcctttgcagcgagtgcagtggtgagatcctgaacaactgctgcgtgatggagtaccaccaagccacgggcaccctcagtgcccacttcaggaacatgtcactgaagaggatcaagcgtgctgaccggcggggtgcagagtccgtgacagaggagaagttcacagtcctgtttgagtctcagttcagtgttggcagcaatgagcttgtgttccaggtgaagactctgtccctacctgtggttgtcatcgtccacggcagccaggaccacaatgccacggctactgtgctgtgggacaatgcctttgctgagccgggcagggtgccatttgccgtgcctgacaaagtgctgtggccgcagctgtgtgaggcgctcaacatgaaattcaaggccgaagtgca

SEQ ID NO: 20716 - DNA, 893 bp, Homo sapiens
  misc_feature 1..893: note = ENST00000468096
  source 1..893: mol_type = unassigned DNA
gcatttgtgtcacctttctggatctgtctcagtctcctctgtctctaggtgtctgtgtatcttgtgtgtgtgtgaatatttccaactccctcaatctaccttttcccctctcttgtctccctctcagggcagggtgccatttgccgtgcctgacaaagtgctgtggccgcagctgtgtgaggcgctcaacatgaaattcaaggccgaagtgcagagcaaccggggcctgaccaaggagaacctcgtgttcctggcgcagaaactgttcaacaacagcagcagccacctggaggactacagtggcctgtccgtgtcctggtcccagttcaacagggagaacttgccgggctggaactacaccttctggcagtggtttgacggggtgatggaggtgttgaagaagcaccacaagccccactggaatgatggggccatcctaggttttgtgaataagcaacaggcccacgacctgctcatcaacaagcccgacgggaccttcttgttgcgctttagtgactcagaaatcgggggcatcaccatcgcctggaagtttgactccccggaacgcaacctgtggaacctgaaaccattcaccacgcgggatttctccatcaggtccctggctgaccggctgggggacctgagctatctcatctatgtgtttcctgaccgccccaaggatgaggtcttctccaagtactacactcctgtgctggctaaagctgttgatggatatgtgaaaccacagatcaagcaagtggtccctgagtttgtgaatgcatctgcagatgctgggggcagcagcgccacgtacatggaccaggccccctccccagctgtgtgcccccaggctccctataacatgtacccacagaaccctgaccatgtactcg

SEQ ID NO: 20717 - DNA, 1140 bp, Homo sapiens
  misc_feature 1..1140: note = ENST00000591556
  source 1..1140: mol_type = unassigned DNA
atttgtgtcacctttctggatctgtctcagtctcctctgtctctaggtgtctgtgtatcttgtgtgtgtgtgaatatttccaactccctcaatctaccttttcccctctcttgtctccctctcagggcagggtgccatttgccgtgcctgacaaagtgctgtggccgcagctgtgtgaggcgctcaacatgaaattcaaggccgaagtgcagagcaaccggggcctgaccaaggagaacctcgtgttcctggcgcagaaactgttcaacaacagcagcagccacctggaggactacagtggcctgtccgtgtcctggtcccagttcaacagggagaacttgccgggctggaactacaccttctggcagtggtttgacggggtgatggaggtgttgaagaagcaccacaagccccactggaatgatggggccatcctaggttttgtgaataagcaacaggcccacgacctgctcatcaacaagcccgacgggaccttcttgttgcgctttagtgactcagaaatcgggggcatcaccatcgcctggaagtttgactccccggaacgcaacctgtggaacctgaaaccattcaccacgcgggatttctccatcaggtccctggctgaccggctgggggacctgagctatctcatctatgtgtttcctgaccgccccaaggatgaggtcttctccaagtactacactcctgtgctgggtgggtactgccccaggaccctgccggctgactcccccgggctcttccccagcccatagacaaagccttgggctgcgccgtggggacttccccaggaggagcctaggggccatgtcccctgtgggttttggcccatggggtggtggagaggatttcagggctcacaaatgaggagagggaacgagaaacccgtcccagctctcttctctgcaaagtgaaagctgcatggattctcacttctgcaccctcggaggaaggggtggcagcactgtagggagtggccgggatcattcgagcccacagatagtgctccgctccccacctcaccagctgctctccacaccctgctcacaaaccttcccccgagtggagtgcaggcagcaaaagggagaagtctctcttcttccagctgccccaaatccattg

SEQ ID NO: 20718 - DNA, 1022 bp, Homo sapiens
  misc_feature 1..1022: note = ENST00000587646
  source 1..1022: mol_type = unassigned DNA
gtatcttgtgtgtgtgtgaatatttccaactccctcaatctaccttttcccctctcttgtctccctctcagggcagggtgccatttgccgtgcctgacaaagtgctgtggccgcagctgtgtgaggcgctcaacatgaaattcaaggccgaagtgcagagcaaccggggcctgaccaaggagaacctcgtgttcctggcgcagaaactgttcaacaacagcagcagccacctggaggactacagtggcctgtccgtgtcctggtcccagttcaacagggagaacttgccgggctggaactacaccttctggcagtggtttgacggggtgatggaggtgttgaagaagcaccacaagccccactggaatgatggggccatcctaggttttgtgaataagcaacaggcccacgacctgctcatcaacaagcccgacgggaccttcttgttgcgctttagtgactcagaaatcgggggcatcaccatcgcctggaagtttgactccccggaacgcaacctgtggaacctgaaaccattcaccacgcgggatttctccatcaggtccctggctgaccggctgggggacctgagctatctcatctatgtgtttcctgaccgccccaaggatgaggtcttctccaagtactacactcctgtgctggctaaagctgttgatggatatgtgaaaccacagatcaagcaagtggtccctgagtttgtgaatgcatctgcagatgctgggggcagcagcgccacgtacatggaccaggccccctccccagctgtgtgcccccaggctccctataacatgtacccacagaagtaggtggtgttctcatggggtccgcaggggaagaactggggacttggccccaggctggactcctggagggctggcgggcaaaggatccagagctctggttaggcccaagtccaggaggagtgagatcagccaggaaaacagagcattttgaagctagacatagcagggtcaagtcctcactctagtactaactgtgtgatc

SEQ ID NO: 20719 - DNA, 5353 bp, Homo sapiens
  misc_feature 1..5353: note = ENST00000265087
  source 1..5353: mol_type = unassigned DNA
tttctccttccctccacgggccgggtgagaaagtagccgggggctatcccgacccggcggttcttggggagggggccgaacaagaaaagggaggagatggagataacttccccggatttagcttttttgtctttgtttttgttctcaccacttccatcggatgactggagagtaaaagggaacccggagcggggtggcgagcagcgctttgagaaaatgcaggagtgtgtttggagacgcgtaaagttgcctttcaagctctggcctccgggcacgcgatgctccgcggcgggctgactcagggctgccttgggcctccctgccaccctcctggaaatgatgcaagtcctgactgtcacctggatccctgcagcccagcctggaatgcgtctggattaggggaaagacgagaaacgacactccaggtgttgcacggcccaccaaagcgggaagatagggcagttgctcagaccaaatactgtatctagtgcttctgctcctatcttcaatcgtggggttctttttaatgcaaagtgtcacaaggccaggaattcccatgtgtgctcagttggcccacagcatcattgtgcctaggaaactgcttcaatttatcaagtcctctgggctgggaatctcactgaattccaaacggcggaaagaggaaactttcccaacccgatgtgggtgtgacgcgagccaggggccccagggacactgtcccagagcacaccgtccccctttaacagcaactggagcttggattcgctcttatattgtacagtcctttcgaccattgccctggagcacccgcacacgcgcacgcatctccggccgcgctcacacacactcatacacacgcacgcaaacgcgtggccgccgccaggtcggcaactttgtccggcgctcccagcggcgctcggcttcctcctgtagtagttgagcgcaggccccgcctcccggccgtgttgtcaaaagggccggggtctcggattggtccagccgccgggacaacacctgctcgactccttcattcaagtgacaccagagcttccagggatatttgaggcaccatccctgccattgccgggcactcgcggcgctgctaacggcctggtcacatgctctccggagagctacgggagggcgctgggtaacctctatccgagccgcggccgcgaggaggagggaaaaggcgagcaaaaaggaagagtgggaggaggaggggaagcggcgaaggaggaagaggaggaggaggaagaggggagcacaaaggatccaggtctcccgacgggaggttaataccaagaaccatgtgtgccgagcggctgggccagttcatgaccctggctttggtgttggccacctttgacccggcgcgggggaccgacgccaccaacccacccgagggtccccaagacaggagctcccagcagaaaggccgcctgtccctgcagaatacagcggagatccagcactgtttggtcaacgctggcgatgtggggtgtggcgtgtttgaatgtttcgagaacaactcttgtgagattcggggcttacatgggatttgcatgacttttctgcacaacgctggaaaatttgatgcccagggcaagtcattcatcaaagacgccttgaaatgtaaggcccacgctctgcggcacaggttcggctgcataagccggaagtgcccggccatcagggaaatggtgtcccagttgcagcgggaatgctacctcaagcacgacctgtgcgcggctgcccaggagaacacccgggtgatagtggagatgatccatttcaaggacttgctgctgcacgaaccctacgtggacctcgtgaacttgctgctgacctgtggggaggaggtgaaggaggccatcacccacagcgtgcaggttcagtgtgagcagaactggggaagcctgtgctccatcttgagcttctgcacctcggccatccagaagcctcccacggcgccccccgagcgccagccccaggtggacagaaccaagctctccagggcccaccacggggaagcaggacatcacctcccagagcccagcagtagggagactggccgaggtgccaagggtgagcgaggtagcaagagccacccaaacgcccatgcccgaggcagagtcgggggccttggggctcagggaccttccggaagcagcgagtgggaagacgaacagtctgagtattctgatatccggaggtgaaatgaaaggcctggccacgaaatctttcctccacgccgtccattttcttatctatggacattccaaaacatttaccattagagaggggggatgtcacacgcaggattctgtggggactgtggacttcatcgaggtgtgtgttcgcggaacggacaggtgagatggagacccctggggccgtggggtctcaggggtgcctggtgaattctgcacttacacgtactcaagggagcgcgcccgcgttatcctcgtacctttgtcttctttccatctgtggagtcagtgggtgtcggccgctctgttgtgggggaggtgaaccagggaggggcagggcaaggcagggcccccagagctgggccacacagtgggtgctgggcctcgccccgaagcttctggtgcagcagcctctggtgctgtctccgcggaagtcagggcggctggattccaggacaggagtgaatgtaaaaataaatatcgcttagaatgcaggagaagggtggagaggaggcaggggccgagggggtgcttggtgccaaactgaaattcagtttcttgtgtggggccttgcggttcagagctcttggcgagggtggagggaggagtgtcatttctatgtgtaatttctgagccattgtactgtctgggctgggggggacactgtccaagggagtggcccctatgagtttatattttaaccactgcttcaaatctcgatttcactttttttatttatccagttatatctacatatctgtcatctaaataaatggctttcaaacaaagcaactgggtcattaaaaccagctcaaagggggtttaaaaaaaaaaaaccagcccatcctttgaggctgatttttcttttttttaagttctattttaaaagctatcaaacagcgacatagccatacatctgactgcctgacatggactcctgcccacttgggggaaaccttatacccagaggaaaatacacacctggggagtacatttgacaaatttcccttaggatttcgttatctcaccttgaccctcagccaagattggtaaagctgcgtcctggcgattccaggagacccagctggaaacctggcttctccatgtgaggggatgggaaaggaaagaagagaatgaagactacttagtaattcccatcaggaaatgctgaccttttacataaaatcaaggagactgctgaaaatctctaagggacaggattttccagatcctaattggaaatttagcaataaggagaggagtccaaggggacaaataaaggcagagagaagagacagaactaaaaatacgaggaaaggagagtgaggattttcattaaaagtctcagcagtgggtttcttgggttatttaaaacatcacctaaataggccttttcttcctaattggccatcaaattaaagcctatcctttctcaagcaggagctggtattgtagggagtggccgggtattctgggctgggctcttctggagtagggggtcagcaaacattgtctgcaaagggccagatactgaatccagtactttcagtttggcgagccgtgaggtctctgtcgaaactactcaactctgccgtcctagcacaaaagcagccatagacaacacacaaacgagagggcttggctcccttccaggaagatttatttaacaggctcccagctgaatttcactcacaggacacagtttactgatctctgttctagtgagtgggtcaaaaagcatatgcatccttatccgtcaactcatcagctcttcctcaaggcaacctgaggccagacaccaagaaaccaagcgtatctgctctaaaatgacttgttcctggggaatgccttcaaccaaaacacagctagtatttctatgccccaaatccaatcccagtctttcatgatccatgccggcggttgggtggggaggggaatcattggttgggggaagggaggaaaccccacctccagcccccgccaccgggctccctgggcacccagcaagatctggggctgcagagaacagaagagctggtgcacttaatccagctctgcccttggggggaggaggacctgtgtgtcaggctctgccatgggaacgagtgtaaaccgtggctgtctcctgcagtgagccaccgcggcaggcacgttgactgttttactgacatcactcaaaagctaaagcaataacattctcctgcgttgctgagtcagctgttcatttgtccgccagctcctggactggatgtgtgaaaggcatcacatttccattttcctccgtgtaaatgttttatgtgttcgcctactgatcccattcgttgcttctattgtaaatatttgtcatttgtatttattatctctgtgttttccccctaaggcataaaatggtttactgtgttcatttgaacccatttactgatctctgttgtatatttttcatgccactgctttgttttctcctcagaagtcgggtagatagcatttctatcccatccctcacgttattggaagcatgcaacagtatttattgctcagggtcttctgcttaaaactgaggaaggtccacattcctgcaagcattgattgagacatttgcacaatctaaaatgtaagcaaagtagtcattaaaaatacaccctctacttgggctttatactgcatacaaatttactcatgagccttcctttgaggaaggatgtggatctccaaataaagatttagtgtttattttgagctctgcatcttaacaagatgatctgaacacctctcctttgtatcaataaatagccctgttattctgaagtgagaggaccaagtatagtaaaatgctgacatctaaaactaaataaatagaaaacaccaggccagaactatagtcatactcacacaaagggagaaatttaaactcgaaccaagcaaaaggcttcacggaaatagcatggaaaaacaatgcttccagtggccacttcctaaggaggaacaaccccgtctgatctcagaattggcaccacgtgagcttgctaagtgataatatctgtttctactacggatttaggcaacaggacctgtacattgtcacattgcattatttttcttcaagcgttaataaaagttttaaataaatggcttccacttga

SEQ ID NO: 20720 - DNA, 566 bp, Homo sapiens
  misc_feature 1..566: note = ENST00000520593
  source 1..566: mol_type = unassigned DNA
aagggagcagcaccgagctcgcctccacacccccaacagctgtctcctttctaggataagcacaatcagacggggttgccaggaaagagaactgcaggccagatgtatgcctggctgccttcgccactcggaggcagggagcgtgggggaggggccgccagtgcggcagttcagactccagatgctgccaggcagggtgccaggccagccttttagaggcaataatccgaacagtttaaaggagtagagtcattttcaaaaaggaaaagagcgctcttcctgggcaagtcattcatcaaagacgccttgaaatgtaaggcccacgctctgcggcacaggttcggctgcataagccggaagtgcccggccatcagggaaatggtgtcccagttgcagcgggaatgctacctcaagcacgacctgtgcgcggctgcccaggagaacacccgggtgatagtggagatgatccatttcaaggacttgctgctgcacgaaccctacgtggacctcgtgaacttgctgctgacctgtggggaggaggtgaaggaggccatcacccacagcgt

SEQ ID NO: 20721 - DNA, 616 bp, Homo sapiens
  misc_feature 1..616: note = ENST00000520648
  source 1..616: mol_type = unassigned DNA
gcagaatacagcggagatccagcactgtttggtcaacgctggcgatgtggggtgtggcgtgtttgaatgtttcgagaacaactcttgtgagattcggggcttacatgggatttgcatgacttttctgcacaacgctggaaaatttgatgcccagggcaagtcattcatcaaagacgccttgaaatgtaaggcccacgctctgcggcacaggttcggctgcataagccggaagtgcccggccatcagggaaatggtgtcccagttgcagcgggaatgctacctcaagcacgacctgtgcgcggctgcccaggagaacacccgggtgatagtggagatgatccatttcaaggacttgctgctgcacgagtgagtactgccccgcagagggcctgggtgaaggggccacccagcaaggatggcaatgtgtatgggaggagagccgcgttgcttctagaggctgaatgcctgtcaaatggagaaggcttccatttacttcagaaagctacactgactctactaaaaggcccctttcctgctggcttttaggaaaagagagaattccctcatcagtctcaaaatcacaagcaacagaaatgggaaatcgttttactaagaa

SEQ ID NO: 20722 - DNA, 473 bp, Homo sapiens
  misc_feature 1..473: note = ENST00000518455
  source 1..473: mol_type = unassigned DNA
tgccccttccgagagaggactgggggccacattcggtgaagggctgcaagcttcctcccgggctgcgggaattctaggggattgggtgatacctcacccggatccctaattaaaaggagcctgcaacctctgatagtggcgtttctgaaggctcgcccccagctgactccactcctaagcctgctcgccaaccgcagcttccctagctgcggagatccagcactgtttggtcaacgctggcgatgtggggtgtggcgtgtttgaatgtttcgagaacaactcttgtgagattcggggcttacatgggatttgcatgacttttctgcacaacgctggaaaatttgatgcccagggcaagtcattcatcaaagacgccttgaaatgtaaggcccacgctctgcggcacaggttcggctgcataagccggaagtgcccggccatcagggaaatggtgtcccagttgcagcgggaat

SEQ ID NO: 20723 - DNA, 582 bp, Homo sapiens
  misc_feature 1..582: note = ENST00000519511
  source 1..582: mol_type = unassigned DNA
atatttgaggcaccatccctgccattgccgggcactcgcggcgctgctaacggcctggtcacatgctctccggagagctacgggagggcgctgggtaacctctatccgagccgcggccgcgaggaggagggaaaaggcgagcaaaaaggaagagtgggaggaggaggggaagcggcgaaggaggaagaggaggaggaggaagaggggagcacaaaggatccaggtctcccgacgggaggttaataccaagaaccatgtgtgccgagcggctgggccagttcatgaccctggctttggtgttggccacctttgacccggcgcgggggaccgacgccaccaacccacccgagggtccccaagacaggagctcccagcagaaaggccgcctgtccctgcagaatacagcggagatccagcactgtttggtcaacgctggcgatgtggggtgtggcgtgtttgaatgtttcgagaacaactcttgtgagattcggggcttacatgggatttgcatgacttttctgcacaacgctggaaaatttgatgcccaggtaaaaatccatccagagcatgaagaatgtttgg

SEQ ID NO: 20724 - DNA, 4262 bp, Homo sapiens
  misc_feature 1..4262: note = ENST00000393110
  source 1..4262: mol_type = unassigned DNA
accgccttcgccgcggaccttcagctgccgcggtcgctccgagcggcgggccgcagagatgacatttattcattttatgcatcctgggttctactggtcgtcccacctcagttcctgtagcaaagagacttgagtctgagccactaattatcacccgtgaggtttcctccccgagcaggaagcagcaggccagagctgcgctctctcagtgcactctccaaccaagcatcagtcaccactcccggtccagcccctgtggccaagagctggcgtgcaggctgcgggaggcagctggctgtgcaagaccctggcagggccctcgcctcctgagaaaccgagagtcagaaccaaagccaggctgtcctggttggagactgagccagaaagggtggctcacctcacggtgaggctgtcgagtgacctgagagcctcagaccctcacgtcagccggatgtcgcaccagcctgctgttgccaccaaaatgccagaagagatggacaagccactgatcagcctccacctggtggacagcgatagtagccttgccaaggtccccgatgaggcccccaaagtgggcatcctgggtagcggggactttgcccgctccctggccacacgcctggtgggctctggcttcaaagtggtggtggggagccgcaaccccaaacgcacagccaggctgtttccctcagcggcccaagtgactttccaagaggaggcagtgagctccccggaggtcatctttgtggctgtgttccgggagcactactcttcactgtgcagtctcagtgaccagctggcgggcaagatcctggtggatgtgagcaaccctacagagcaagagcaccttcagcatcgtgagtccaatgctgagtacctggcctccctcttccccacttgcacagtggtcaaggccttcaatgtcatctctgcctggaccctgcaggctggcccaagggatggtaacaggcaggtgcccatctgcggtgaccagccagaagccaagcgtgctgtctcggagatggcgctcgccatgggcttcatgcccgtggacatgggatccctggcgtcagcctgggaggtggaggccatgcccctgcgcctcctcccggcctggaaggtgcccaccctgctggccctggggctcttcgtctgcttctatgcctacaacttcgtccgggacgttctgcagccctatgtgcaggaaagccagaacaagttcttcaagctgcccgtgtccgtggtcaacaccacactgccgtgcgtggcctacgtgctgctgtcactcgtgtacttgcccggcgtgctggcggctgccctgcagctgcggcgcggcaccaagtaccagcgcttccccgactggctggaccactggctacagcaccgcaagcagatcgggctgctcagcttcttctgcgccgccctgcacgccctctacagcttctgcttgccgctgcgccgcgcccaccgctacgacctggtcaacctggcagtcaagcaggtcttggccaacaagagccacctctgggtggaggaggaggtctggcggatggagatctacctctccctgggagtgctggccctcggcacgttgtccctgctggccgtgacctcactgccgtccattgcaaactcgctcaactggagggagttcagcttcgttcagtcctcactgggctttgtggccctcgtgctgagcacactgcacacgctcacctacggctggacccgcgccttcgaggagagccgctacaagttctacctgcctcccaccttcacgctcacgctgctggtgccctgcgtcgtcatcctggccaaagccctgtttctcctgccctgcatcagccgcagactcgccaggatccggagaggctgggagagggagagcaccatcaagttcacgctgcccacagaccacgccctggccgagaagacgagccacgtatgaggtgcctgccctgggctctggaccccgggcacacgagggacggtgccctgagcccgttaggttttcttttcttggtggtgcaaagtggtataactgtgtgcaaataggaggtttgaggtccaaattcctgggactcaaatgtatgcagtactattcagaatgatatacacacatatgtgtatatgtatttacatatattccacatatataacaggatttgcaattatacatagctagctaaaaagttgggtctctgagatttcaacttgtagatttaaaaacaagtgccgtacgttaagagaagagcagatcatgctattgtgacatttgcagagatatacacacactttttgtacagaagaggcttgtgctgtggtgggttcgatttatccctgcccaccccacccccacaacttcccttttgctacttccccaaggctcttgcagagctagggctctgaaggggagggaaggcaacggctctgcccagagccatccctggagcatgtgagcagcggctggtctcttccctccacctggggcagcagcaggaggcctggggaggaggaaaatcaggcagtcggcctggagtctgtgcctggtcctttgcccggtggtgggaggatggagggattgggctgaagctgctccacctcatccttgctgagtgggggagacattttccctgaaagtcagaagtcaccatagagcctgcaaatggatcctcctgtgagagtgacgtcacctcctttccagagccattagtgagcctggcttgggaacaagtgtaatttccttccctcctttaacctggcgatgagcgtcctttaaaccactgtgccttctcaccctttccatcttcagtttgaatgactcccaggaaggcctagagcagaccctttagaaatcagcccaagggggagagcaagagaaaacactctagggagtaaagctccccgggcgtcagagttgagccctgcctgggctgaaggactgtcttcacgaagtcagtcctgaggaaaaatattggggactccaaatgtcctctggcagaggacccagaaaaccacactggctccaacttcctcctcatggggcattacacttcaaaacagtggggagcaacttttccaccaaagctacaaacctaaaatgctgctgccccaaagcacaagagggaagagcaccgccggggccacaggacgtctgtcctccagtcacaggccatccttgctgctccctactgactctagcttacttcccctgtgaagaaacaggtgttctcggctgagcccccaaccctctgcagaaccaggttgatctgccacagaaaaagcatctttgaagacaaagagggtgaggtcttcatgagtctcctgggcccaaagccatcttctgatggaaggaagagagtagggccagtgaaggctgcccagagagaatgtcacagatgaggctgcccctgccccccccccgccagggaggtttcatgagctcatgtctatgcagcacataagggttcttcagtgaaaagcaggagaagagcccactgcaaggatagctcattaggcacatgaccgatgcagggaaggccatgccggggaagctcttcctgcaggtattttccatctgctgtgccaaggctgagcggcagaaacttgtctcataaattggcactgatggagcatcagctgtggcccacagagagccttgctgagaagggggcaggtaaagcagagattttagcattgccttggcataacaagggcccatcgattccctactaatgagaggcagggagagcatgggcaatggagacccaccaatgatccccaaccccggtgggtactggctgcctgccctgggccagggaatggctccttataccaaagatgctggcacatagcagaacccagtgcacgtcctccccttcccacccacctctggctgaaggtgctcaagagggaagcaattataaggtgggtggcaggagggaacaggtgccacctgctggacaatcacacgaaaggcaggcgggctgtgtactgggccctgactgtgcgtccactgctgtcttccctacctcaccaggctactggcagcagcatcccgagagcacatcatctccacagcctggtaaattccatgtgcctctgggtacaaaagtgcctcaacgacatgctctggaaatcccaaatgccacagtctgaggttgatatctaaaatctatgccttcaaaagagtctctgttttttttttttaacctggtagacagtataaaagcagtgcaaataaacacctaaccttctgcaaa

SEQ ID NO: 20725 - DNA, 3915 bp, Homo sapiens
  misc_feature 1..3915: note = ENST00000393106
  source 1..3915: mol_type = unassigned DNA
accgccttcgccgcggaccttcagctgccgcggtcgctccgagcggcgggccgcagaggttcaagcgattctcctgcttcagcctccggagtagctgggattacaggcacgtgccaacacacccagccaccaaaatgccagaagagatggacaagccactgatcagcctccacctggtggacagcgatagtagccttgccaaggtccccgatgaggcccccaaagtgggcatcctgggtagcggggactttgcccgctccctggccacacgcctggtgggctctggcttcaaagtggtggtggggagccgcaaccccaaacgcacagccaggctgtttccctcagcggcccaagtgactttccaagaggaggcagtgagctccccggaggtcatctttgtggctgtgttccgggagcactactcttcactgtgcagtctcagtgaccagctggcgggcaagatcctggtggatgtgagcaaccctacagagcaagagcaccttcagcatcgtgagtccaatgctgagtacctggcctccctcttccccacttgcacagtggtcaaggccttcaatgtcatctctgcctggaccctgcaggctggcccaagggatggtaacaggcaggtgcccatctgcggtgaccagccagaagccaagcgtgctgtctcggagatggcgctcgccatgggcttcatgcccgtggacatgggatccctggcgtcagcctgggaggtggaggccatgcccctgcgcctcctcccggcctggaaggtgcccaccctgctggccctggggctcttcgtctgcttctatgcctacaacttcgtccgggacgttctgcagccctatgtgcaggaaagccagaacaagttcttcaagctgcccgtgtccgtggtcaacaccacactgccgtgcgtggcctacgtgctgctgtcactcgtgtacttgcccggcgtgctggcggctgccctgcagctgcggcgcggcaccaagtaccagcgcttccccgactggctggaccactggctacagcaccgcaagcagatcgggctgctcagcttcttctgcgccgccctgcacgccctctacagcttctgcttgccgctgcgccgcgcccaccgctacgacctggtcaacctggcagtcaagcaggtcttggccaacaagagccacctctgggtggaggaggaggtctggcggatggagatctacctctccctgggagtgctggccctcggcacgttgtccctgctggccgtgacctcactgccgtccattgcaaactcgctcaactggagggagttcagcttcgttcagtcctcactgggctttgtggccctcgtgctgagcacactgcacacgctcacctacggctggacccgcgccttcgaggagagccgctacaagttctacctgcctcccaccttcacgctcacgctgctggtgccctgcgtcgtcatcctggccaaagccctgtttctcctgccctgcatcagccgcagactcgccaggatccggagaggctgggagagggagagcaccatcaagttcacgctgcccacagaccacgccctggccgagaagacgagccacgtatgaggtgcctgccctgggctctggaccccgggcacacgagggacggtgccctgagcccgttaggttttcttttcttggtggtgcaaagtggtataactgtgtgcaaataggaggtttgaggtccaaattcctgggactcaaatgtatgcagtactattcagaatgatatacacacatatgtgtatatgtatttacatatattccacatatataacaggatttgcaattatacatagctagctaaaaagttgggtctctgagatttcaacttgtagatttaaaaacaagtgccgtacgttaagagaagagcagatcatgctattgtgacatttgcagagatatacacacactttttgtacagaagaggcttgtgctgtggtgggttcgatttatccctgcccaccccacccccacaacttcccttttgctacttccccaaggctcttgcagagctagggctctgaaggggagggaaggcaacggctctgcccagagccatccctggagcatgtgagcagcggctggtctcttccctccacctggggcagcagcaggaggcctggggaggaggaaaatcaggcagtcggcctggagtctgtgcctggtcctttgcccggtggtgggaggatggagggattgggctgaagctgctccacctcatccttgctgagtgggggagacattttccctgaaagtcagaagtcaccatagagcctgcaaatggatcctcctgtgagagtgacgtcacctcctttccagagccattagtgagcctggcttgggaacaagtgtaatttccttccctcctttaacctggcgatgagcgtcctttaaaccactgtgccttctcaccctttccatcttcagtttgaatgactcccaggaaggcctagagcagaccctttagaaatcagcccaagggggagagcaagagaaaacactctagggagtaaagctccccgggcgtcagagttgagccctgcctgggctgaaggactgtcttcacgaagtcagtcctgaggaaaaatattggggactccaaatgtcctctggcagaggacccagaaaaccacactggctccaacttcctcctcatggggcattacacttcaaaacagtggggagcaacttttccaccaaagctacaaacctaaaatgctgctgccccaaagcacaagagggaagagcaccgccggggccacaggacgtctgtcctccagtcacaggccatccttgctgctccctactgactctagcttacttcccctgtgaagaaacaggtgttctcggctgagcccccaaccctctgcagaaccaggttgatctgccacagaaaaagcatctttgaagacaaagagggtgaggtcttcatgagtctcctgggcccaaagccatcttctgatggaaggaagagagtagggccagtgaaggctgcccagagagaatgtcacagatgaggctgcccctgccccccccccgccagggaggtttcatgagctcatgtctatgcagcacataagggttcttcagtgaaaagcaggagaagagcccactgcaaggatagctcattaggcacatgaccgatgcagggaaggccatgccggggaagctcttcctgcaggtattttccatctgctgtgccaaggctgagcggcagaaacttgtctcataaattggcactgatggagcatcagctgtggcccacagagagccttgctgagaagggggcaggtaaagcagagattttagcattgccttggcataacaagggcccatcgattccctactaatgagaggcagggagagcatgggcaatggagacccaccaatgatccccaaccccggtgggtactggctgcctgccctgggccagggaatggctccttataccaaagatgctggcacatagcagaacccagtgcacgtcctccccttcccacccacctctggctgaaggtgctcaagagggaagcaattataaggtgggtggcaggagggaacaggtgccacctgctggacaatcacacgaaaggcaggcgggctgtgtactgggccctgactgtgcgtccactgctgtcttccctacctcaccaggctactggcagcagcatcccgagagcacatcatctccacagcctggtaaattccatgtgcctctgggtacaaaagtgcctcaacgacatgctctggaaatcccaaatgccacagtctgaggttgatatctaaaatctatgccttcaaaagagtctctgttttttttttttaacctggtagacagtataaaagcagtgcaaataaacacctaaccttctgcaaa

SEQ ID NO: 20726 - DNA, 2103 bp, Homo sapiens
  misc_feature 1..2103: note = ENST00000409811
  source 1..2103: mol_type = unassigned DNA
agctgccgcggtcgctccgagcggcgggccgcagagccaccaaaatgccagaagagatggacaagccactgatcagcctccacctggtggacagcgatagtagccttgccaaggtccccgatgaggcccccaaagtgggcatcctgggtagcggggactttgcccgctccctggccacacgcctggtgggctctggcttcaaagtggtggtggggagccgcaaccccaaacgcacagccaggctgtttccctcagcggcccaagtgactttccaagaggaggcagtgagctccccggaggtcatctttgtggctgtgttccgggagcactactcttcactgtgcagtctcagtgaccagctggcgggcaagatcctggtggatgtgagcaaccctacagagcaagagcaccttcagcatcgtgagtccaatgctgagtacctggcctccctcttccccacttgcacagtggtcaaggccttcaatgtcatctctgcctggaccctgcaggctggcccaagggatggtaacaggcaggtgcccatctgcggtgaccagccagaagccaagcgtgctgtctcggagatggcgctcgccatgggcttcatgcccgtggacatgggatccctggcgtcagcctgggaggtggaggccatgcccctgcgcctcctcccggcctggaaggtgcccaccctgctggccctggggctcttcgtctgcttctatgcctacaacttcgtccgggacgttctgcagccctatgtgcaggaaagccagaacaagttcttcaagctgcccgtgtccgtggtcaacaccacactgccgtgcgtggcctacgtgctgctgtcactcgtgtacttgcccggcgtgctggcggctgccctgcagctgcggcgcggcaccaagtaccagcgcttccccgactggctggaccactggctacagcaccgcaagcagatcgggctgctcagcttcttctgcgccgccctgcacgccctctacagcttctgcttgccgctgcgccgcgcccaccgctacgacctggtcaacctggcagtcaagcaggtcttggccaacaagagccacctctgggtggaggaggaggtctggcggatggagatctacctctccctgggagtgctggccctcggcacgttgtccctgctggccgtgacctcactgccgtccattgcaaactcgctcaactggagggagttcagcttcgttcagtgtgtggcaacttccagtgcaggaaacacaggcagtggaacccgaagacctgaatctcagtcccaagacccccacttacctgccccgcatcatcagacaagtttcctaggccctcggagcttctgctgctcacttgtgcctgtgtccaccccatatggtcatcaagaggatttgagctggacacgttaaatgcaggatgcgtgcagccaacagtggcatgctggcttttgagtcctcactgggctttgtggccctcgtgctgagcacactgcacacgctcacctacggctggacccgcgccttcgaggagagccgctacaagttctacctgcctcccaccttcacgctcacgctgctggtgccctgcgtcgtcatcctggccaaagccctgtttctcctgccctgcatcagccgcagactcgccaggatccggagaggctgggagagggagagcaccatcaagttcacgctgcccacagaccacgccctggccgagaagacgagccacgtatgaggtgcctgccctgggctctggaccccgggcacacgagggacggtgccctgagcccgttaggttttcttttcttggtggtgcaaagtggtataactgtgtgcaaataggaggtttgaggtccaaattcctgggactcaaatgtatgcagtactattcagaatgatatacacacatatgtgtatatgtatttacatatattccacatatataacaggatttgcaattatacatagctagctaaaaagttgggtctctgagatttcaacttgtagatttaaaaacaagtgccgtacgttaagagaagagcagatcatgctattgtgacatttgcagagatatacacacactttttgtacagaa

SEQ ID NO: 20727 - DNA, 1871 bp, Homo sapiens
  misc_feature 1..1871: note = ENST00000393107
  source 1..1871: mol_type = unassigned DNA
agctgccgcggtcgctccgagcggcgggccgcagagccaccaaaatgccagaagagatggacaagccactgatcagcctccacctggtggacagcgatagtagccttgccaaggtccccgatgaggcccccaaagtgggcatcctgggtagcggggactttgcccgctccctggccacacgcctggtgggctctggcttcaaagtggtggtggggagccgcaaccccaaacgcacagccaggctgtttccctcagcggcccaagtgactttccaagaggaggcagtgagctccccggaggtcatctttgtggctgtgttccgggagcactactcttcactgtgcagtctcagtgaccagctggcgggcaagatcctggtggatgtgagcaaccctacagagcaagagcaccttcagcatcgtgagtccaatgctgagtacctggcctccctcttccccacttgcacagtggtcaaggccttcaatgtcatctctgcctggaccctgcaggctggcccaagggatggtaacaggcaggtgcccatctgcggtgaccagccagaagccaagcgtgctgtctcggagatggcgctcgccatgggcttcatgcccgtggacatgggatccctggcgtcagcctgggaggtggaggccatgcccctgcgcctcctcccggcctggaaggtgcccaccctgctggccctggggctcttcgtctgcttctatgcctacaacttcgtccgggacgttctgcagccctatgtgcaggaaagccagaacaagttcttcaagctgcccgtgtccgtggtcaacaccacactgccgtgcgtggcctacgtgctgctgtcactcgtgtacttgcccggcgtgctggcggctgccctgcagctgcggcgcggcaccaagtaccagcgcttccccgactggctggaccactggctacagcaccgcaagcagatcgggctgctcagcttcttctgcgccgccctgcacgccctctacagcttctgcttgccgctgcgccgcgcccaccgctacgacctggtcaacctggcagtcaagcaggtcttggccaacaagagccacctctgggtggaggaggaggtctggcggatggagatctacctctccctgggagtgctggccctcggcacgttgtccctgctggccgtgacctcactgccgtccattgcaaactcgctcaactggagggagttcagcttcgttcagtcctcactgggctttgtggccctcgtgctgagcacactgcacacgctcacctacggctggacccgcgccttcgaggagagccgctacaagttctacctgcctcccaccttcacgctcacgctgctggtgccctgcgtcgtcatcctggccaaagccctgtttctcctgccctgcatcagccgcagactcgccaggatccggagaggctgggagagggagagcaccatcaagttcacgctgcccacagaccacgccctggccgagaagacgagccacgtatgaggtgcctgccctgggctctggaccccgggcacacgagggacggtgccctgagcccgttaggttttcttttcttggtggtgcaaagtggtataactgtgtgcaaataggaggtttgaggtccaaattcctgggactcaaatgtatgcagtactattcagaatgatatacacacatatgtgtatatgtatttacatatattccacatatataacaggatttgcaattatacatagctagctaaaaagttgggtctctgagatttcaacttgtagatttaaaaacaagtgccgtacgttaagagaagagcagatcatgctattgtgacatttgcagagatatacacacactttttgtacagaa

SEQ ID NO: 20728 - DNA, 2743 bp, Homo sapiens
  misc_feature 1..2743: note = ENST00000358794
  source 1..2743: mol_type = unassigned DNA
gaattcccctcggccctacaggaccaaacgaccggcgcgctgagaaagggtgtgcggttccactgaggacgcccaagcgggacagccgggcccgccgcggtgagatccccggcctgtccagcccaagcccaagcgccctcgcggtcacgtggcatttccggaacattcagaacctaacagccaggaggcaggagggccgggccgaggccggagcgctggacaacgcgggtagctggcgctcgagggacaggcagctcccaccggctaggacccccatcccgatgcgcgggcgaagggctggggccctgtgccgctggcgatcccggggaccgcctggaactcgcggcactcgggagcgagagggaaagcaacccagaggccccgcagccgccggcgacacagctacagaccccgactgcagccggtactcccatatatcaggggcggggcgaaacccggccttttgaagggcagcgatttaaaccaatcagcgcaaagagttggcaaccctccgcccaattggaatcgctctcattctgaaggcggttccgacatggagtccggcagcccaatgggagaggtggaaatttccagaacgatcagaaccaatgggcgcggccagcgcggctacgattggcagtgcaaaagaccaatccgtgtcgcagaagttcgctcctccctccattcgtggagcctgagatgggtcaatgagctgaaggagaaaggcaacaaggccctgagcgtgggtaacatcgatgatgccttacagtgctactccgaagctattaagctggatccccacaaccacgtgctgtacagcaaccgttctgctgcctatgccaagaaaggagactaccagaaggcttatgaggatggctgcaagactgtcgacctaaagcctgactggggcaagggctattcacgaaaagcagcagctctagagttcttaaaccgctttgaagaagccaagcgaacctatgaggagggcttaaaacacgaggcaaataaccctcaactgaaagagggtttacagaatatggaggccaggttggcagagagaaaattcatgaaccctttcaacatgcctaatctgtatcagaagttggagagtgatcccaggacaaggacactactcagtgatcctacctaccgggagctgatagagcagctacgaaacaagccttctgacctgggcacgaaactacaagatccccggatcatgaccactctcagcgtcctccttggggtcgatctgggcagtatggatgaggaggaagagattgcaacacctccaccaccaccccctcccaaaaaggagaccaagccagagccaatggaagaagatcttccagagaataagaagcaggcactgaaagaaaaagagctggggaacgatgcctacaagaagaaagactttgacacagccttgaagcattacgacaaagccaaggagctggaccccactaacatgacttacattaccaatcaagcagcggtatactttgaaaagggcgactacaataagtgccgggagctttgtgagaaggccattgaagtggggagagaaaaccgagaagactatcgacagattgccaaagcatatgctcgaattggcaactcctacttcaaagaagaaaagtacaaggatgccatccatttctataacaagtctctggcagagcaccgaaccccagatgtgctcaagaaatgccagcaggcagagaaaatcctgaaggagcaagagcggctggcctacataaaccccgacctggctttggaggagaagaacaaaggcaacgagtgttttcagaaaggggactatccccaggccatgaagcattatacagaagccatcaaaaggaacccgaaagatgccaaattatacagcaatcgagctgcctgctacaccaaactcctggagttccagctggcactcaaggactgtgaggaatgtatccagctggagccgaccttcatcaagggttatacacggaaagccgctgcgctggaagcgatgaaggactacaccaaagccatggatgtgtaccagaaggcgctagacctggactccagctgtaaggaggcggcagacggctaccagcgctgtatgatggcgcagtacaaccggcacgacagccccgaagatgtgaagcgacgagccatggccgaccctgaggtgcagcagatcatgagtgacccagccatgcgccttatcctggaacagatgcagaaggacccccaggcactcagcgaacacttaaagaatcctgtaatagcacagaagatccagaagctgatggatgtgggtctgattgcaattcggtgatgacttgttcatccccccttcccttcgccctcatgtggaaagaggagctgggaccgcggcgagcagcacggagcggaagggagagcaggggagagaaggcctcatctctctatatttatacataaccccggggaagacacagagactcgtacctgcgctgtttgtgccgccgctgcctctgggccctcccagcacacgcatggtctcttcaccgctgccctcgagttccatgtctctttcccctgcccctagttgctgtctcggctgctctcccatagttggttttttttttatttggggcagtgggcatgttatggggaggggagggggttcttccagcctcaggtcccagctgtctcacgttgtttattctgcgtccccttctccaataaaacaagccagttgggcgtggttata

SEQ ID NO: 20729 - DNA, 2196 bp, Homo sapiens
  misc_feature 1..2196: note = ENST00000305218
  source 1..2196: mol_type = unassigned DNA
ctagaagaactcgaccagtgagcaggcgaggaaggggcgggagccggggtcccggtagcttctagtaggttccagaaggcggcgcgtgcggttgggaacgcggagcggacggattcgattcaacggggttccggaccgcgctgcgctatggagcaggtcaatgagctgaaggagaaaggcaacaaggccctgagcgtgggtaacatcgatgatgccttacagtgctactccgaagctattaagctggatccccacaaccacgtgctgtacagcaaccgttctgctgcctatgccaagaaaggagactaccagaaggcttatgaggatggctgcaagactgtcgacctaaagcctgactggggcaagggctattcacgaaaagcagcagctctagagttcttaaaccgctttgaagaagccaagcgaacctatgaggagggcttaaaacacgaggcaaataaccctcaactgaaagagggtttacagaatatggaggccaggttggcagagagaaaattcatgaaccctttcaacatgcctaatctgtatcagaagttggagagtgatcccaggacaaggacactactcagtgatcctacctaccgggagctgatagagcagctacgaaacaagccttctgacctgggcacgaaactacaagatccccggatcatgaccactctcagcgtcctccttggggtcgatctgggcagtatggatgaggaggaagagattgcaacacctccaccaccaccccctcccaaaaaggagaccaagccagagccaatggaagaagatcttccagagaataagaagcaggcactgaaagaaaaagagctggggaacgatgcctacaagaagaaagactttgacacagccttgaagcattacgacaaagccaaggagctggaccccactaacatgacttacattaccaatcaagcagcggtatactttgaaaagggcgactacaataagtgccgggagctttgtgagaaggccattgaagtggggagagaaaaccgagaagactatcgacagattgccaaagcatatgctcgaattggcaactcctacttcaaagaagaaaagtacaaggatgccatccatttctataacaagtctctggcagagcaccgaaccccagatgtgctcaagaaatgccagcaggcagagaaaatcctgaaggagcaagagcggctggcctacataaaccccgacctggctttggaggagaagaacaaaggcaacgagtgttttcagaaaggggactatccccaggccatgaagcattatacagaagccatcaaaaggaacccgaaagatgccaaattatacagcaatcgagctgcctgctacaccaaactcctggagttccagctggcactcaaggactgtgaggaatgtatccagctggagccgaccttcatcaagggttatacacggaaagccgctgcgctggaagcgatgaaggactacaccaaagccatggatgtgtaccagaaggcgctagacctggactccagctgtaaggaggcggcagacggctaccagcgctgtatgatggcgcagtacaaccggcacgacagccccgaagatgtgaagcgacgagccatggccgaccctgaggtgcagcagatcatgagtgacccagccatgcgccttatcctggaacagatgcagaaggacccccaggcactcagcgaacacttaaagaatcctgtaatagcacagaagatccagaagctgatggatgtgggtctgattgcaattcggtgatgacttgttcatccccccttcccttcgccctcatgtggaaagaggagctgggaccgcggcgagcagcacggagcggaagggagagcaggggagagaaggcctcatctctctatatttatacataaccccggggaagacacagagactcgtacctgcgctgtttgtgccgccgctgcctctgggccctcccagcacacgcatggtctcttcaccgctgccctcgagttccatgtctctttcccctgcccctagttgctgtctcggctgctctcccatagttggttttttttttatttggggcagtgggcatgttatggggaggggagggggttcttccagcctcaggtcccagctgtctcacgttgtttattctgcgtccccttctccaataaaacaagccagttgggcgtggttata

SEQ ID NO: 20730 - DNA, 738 bp, Homo sapiens
  misc_feature 1..738: note = ENST00000536973
  source 1..738: mol_type = unassigned DNA
tccagaaggcggcgcgtgcggttgggaacgcggagcggacggattcgattcaacggggttccggaccgcgctgcgctatggagcaggtcaatgagctgaaggagaaaggcaacaaggccctgagcgtgggtaacatcgatgatgccttacagtgctactccgaagctattaagctggatccccacaaccacgtgctgtacagcaaccgttctgctgcctatgccaagaaaggagactaccagaaggcttatgaggatggctgcaagactgtcgacctaaagcctgactggggcaagggctattcacgaaaagcagcagctctagagttcttaaaccgctttgaagaagccaagcgaacctatgaggagggcttaaaacacgaggcaaataaccctcaactgaaagagggtttacagaatatggaggccaggttggcagtacaaccggcacgacagccccgaagatgtgaagcgacgagccatggccgaccctgaggtgcagcagatcatgagtgacccagccatgcgccttatcctggaacagatgcagaaggacccccaggcactcagcgaacacttaaagaatcctgtaatagcacagaagatccagaagctgatggatgtgggtctgattgcaattcggtgatgacttgttcatccccccttcccttcgccctcatgtggaaagaggagctgggaccgcggcgagcagcacggagcggaagggagagcaggggag

SEQ ID NO: 20731 - DNA, 1900 bp, Homo sapiens
  misc_feature 1..1900: note = ENST00000538945
  source 1..1900: mol_type = unassigned DNA
ggttgggaacgcggagcggacggattcgattcaacggggttccggaccgcgctgcgctatggagcaggtcaatgagctgaaggagaaaggcaacaaggccctgagcgtgggtaacatcgatgatgccttacagtgctactccgaagctattaagctggatccccacaaccacgtgctgtacagcaaccgttctgctgcctatgccaagaaaggagactaccagaaggcttatgaggatggctgcaagactgtcgacctaaagcctgactggggcaagggcttaaaacacgaggcaaataaccctcaactgaaagagggtttacagaatatggaggccaggttggcagagagaaaattcatgaaccctttcaacatgcctaatctgtatcagaagttggagagtgatcccaggacaaggacactactcagtgatcctacctaccgggagctgatagagcagctacgaaacaagccttctgacctgggcacgaaactacaagatccccggatcatgaccactctcagcgtcctccttggggtcgatctgggcagtatggatgaggaggaagagattgcaacacctccaccaccaccccctcccaaaaaggagaccaagccagagccaatggaagaagatcttccagagaataagaagcaggcactgaaagaaaaagagctggggaacgatgcctacaagaagaaagactttgacacagccttgaagcattacgacaaagccaaggagctggaccccactaacatgacttacattaccaatcaagcagcggtatactttgaaaagggcgactacaataagtgccgggagctttgtgagaaggccattgaagtggggagagaaaaccgagaagactatcgacagattgccaaagcatatgctcgaattggcaactcctacttcaaagaagaaaagtacaaggatgccatccatttctataacaagtctctggcagagcaccgaaccccagatgtgctcaagaaatgccagcaggcagagaaaatcctgaaggagcaagagcggctggcctacataaaccccgacctggctttggaggagaagaacaaaggcaacgagtgttttcagaaaggggactatccccaggccatgaagcattatacagaagccatcaaaaggaacccgaaagatgccaaattatacagcaatcgagctgcctgctacaccaaactcctggagttccagctggcactcaaggactgtgaggaatgtatccagctggagccgaccttcatcaagggttatacacggaaagccgctgcgctggaagcgatgaaggactacaccaaagccatggatgtgtaccagaaggcgctagacctggactccagctgtaaggaggcggcagacggctaccagcgctgtatgatggcgcagtacaaccggcacgacagccccgaagatgtgaagcgacgagccatggccgaccctgaggtgcagcagatcatgagtgacccagccatgcgccttatcctggaacagatgcagaaggacccccaggcactcagcgaacacttaaagaatcctgtaatagcacagaagatccagaagctgatggatgtgggtctgattgcaattcggtgatgacttgttcatccccccttcccttcgccctcatgtggaaagaggagctgggaccgcggcgagcagcacggagcggaagggagagcaggggagagaaggcctcatctctctatatttatacataaccccggggaagacacagagactcgtacctgcgctgtttgtgccgccgctgcctctgggccctcccagcacacgcatggtctcttcaccgctgccctcgagttccatgtctctttcccctgcccctagttgctgtctcggctgctctcccatagttgg

SEQ ID NO: 20732 - DNA, 772 bp, Homo sapiens
  misc_feature 1..772: note = ENST00000543847
  source 1..772: mol_type = unassigned DNA
ggattcgattcaacggggttccggaccgcgctgcgctatggagcaggtcaatgagctgaaggagaaaggcaacaaggccctgagcgtgggtaacatcgatgatgccttacagtgctactccgaagctattaagctggatccccacaaccacgtgctgtacagcaaccgttctgctgcctatgccaagaaaggagactaccagaaggcttatgaggatggctgcaagactgtcgacctaaagcctgactggggcaagggctattcacgaaaagcagcagctctagagttcttaaaccgctttgaagaagccaagcgaacctatgaggagggcttaaaacacgaggcaaataaccctcaactgaaagagggtttacagaatatggaggccaggttggcagagagaaaattcatgaaccctttcaacatgcctaatctgtatcagaagttggagagtgatcccaggacaaggacactactcagtgatcctacctaccgggagctgatagagcagctacgaaacaagccttctgacctgggcacgaaactacaagatccccggatcatgaccactctcagcgtcctccttggggtcgatctgggcagtatggatgaggaggaagagattgcaacacctccaccaccaccccctcccaaaaaggagaccaagccagagccaatggaagaagatcttccagagaataagaagcaggtcttgtttttttctctcctcactgtcacctatctataaacaactagaaatctttatgttgaa

SEQ ID NO: 20733 - DNA, 399 bp, Homo sapiens
  misc_feature 1..399: note = ENST00000540736
  source 1..399: mol_type = unassigned DNA
tcaacggggttccggaccgcgctgcgctatggagcaggtcaatgagctgaaggagaaaggcaacaaggccctgagcgtgggtaacatcgatgatgccttacagtgctactccgaagctattaagctggatccccacaaccacgtgctgtacagcaaccgttctgctgcctatgccaagaaaggagactaccagaaggcttatgaggatggctgcaagactgtcgacctaaagcctgactggggcaaggtcagctgtgggcagtggagggagagaggcccttcagacccttccagaaatgccttttggtggcctgaggtttacctgtcctgatacactgatagttacctacccacctccctgtttgagtatcctcctcagaaatggcatttttcatcaaa

SEQ ID NO: 20734 - DNA, 880 bp, Homo sapiens
  misc_feature 1..880: note = ENST00000540501
  source 1..880: mol_type = unassigned DNA
cctgctcggggaccggcggtggccaggccgcggtaggggggcggggcgggcgccggatccaggagaccggagctcggcgctggggccggacggggcggcggcggggaggtgagggccgcgggcggcgggcgggagcgggatctttagcgaggccggccgcggggagcgcccatcgccccctggttgggcgaggagggcccggcggaggccacagcttgggtcaatgagctgaaggagaaaggcaacaaggccctgagcgtgggtaacatcgatgatgccttacagtgctactccgaagctattaagctggatccccacaaccacgtgctgtacagcaaccgttctgctgcctatgccaagaaaggagactaccagaaggcttatgaggatggctgcaagactgtcgacctaaagcctgactggggcaagggctattcacgaaaagcagcagctctagagttcttaaaccgctttgaagaagccaagcgaacctatgaggagggcttaaaacacgaggcaaataaccctcaactgaaagagggtttacagaatatggaggccaggttggcagagagaaaattcatgaaccctttcaacatgcctaatctgtatcagaagttggagagtgatcccaggacaaggacactactcagtgatcctacctaccgggagctgatagagcagctacgaaacaagccttctgacctgggcacgaaactacaagatccccggatcatgaccactctcagcgtcctccttggggtcgatctgggcagtatggatgaggaggaagagattgcaacacctccaccaccaccccctcccaaaaaggagaccaagccagagccaatggaagaagatcttccagagaataagaagc

SEQ ID NO: 20735 - DNA, 562 bp, Homo sapiens
  misc_feature 1..562: note = ENST00000544739
  source 1..562: mol_type = unassigned DNA
actcagccgcttctcatcctctcaccaccccctctgctatggttccctgacaactaagaccctgaggcaaccacaagactgacaccagatctgctgcagcctcagaataaagcctggtccaaaactctgctgtcctcaccggttgcttcaagtcgaagggatttcctctcccctaaagaagcgctctgcttcctgacaaagatctaggagagcactgaaagaaaaagagctggggaacgatgcctacaagaagaaagactttgacacagccttgaagcattacgacaaagccaaggagctggaccccactaacatgacttacattaccaatcaagcagcggtatactttgaaaagggcgactacaataagtgccgggagctttgtgagaaggccattgaagtggggagagaaaaccgagaagactatcgacagattgccaaagcatatgctcgaattggcaactcctacttcaaagaagaaaagtacaaggatgccatccatttctataacaagtctctggcagagcaccgaaccccagatgtgctcaagaaatgccagcag

SEQ ID NO: 20736 - DNA, 601 bp, Homo sapiens
  misc_feature 1..601: note = ENST00000537479
  source 1..601: mol_type = unassigned DNA
atttcctctcccctaaagaagcgctctgcttcctgacaaagatctaggagagtaggtggaaaagggggagtttcagagcaagcaaagatgaagttagttttcattctaacggctgatactttattgtctatagctgactgatgaagaggccttcaggagaacttgatagaattctattcatgcactgaaagaaaaagagctggggaacgatgcctacaagaagaaagactttgacacagccttgaagcattacgacaaagccaaggagctggaccccactaacatgacttacattaccaatcaagcagcggtatactttgaaaagggcgactacaataagtgccgggagctttgtgagaaggccattgaagtggggagagaaaaccgagaagactatcgacagattgccaaagcatatgctcgaattggcaactcctacttcaaagaagaaaagtacaaggatgccatccatttctataacaagtctctggcagagcaccgaaccccagatgtgctcaagaaatgccagcaggcagagaaaatcctgaaggagcaagagcggctggcctacataaaccccgacctggctttggaggagaag

SEQ ID NO: 20737 - DNA, 582 bp, Homo sapiens
  misc_feature 1..582: note = ENST00000538497
  source 1..582: mol_type = unassigned DNA
cagaacttgtgacagatcatagattcttgctttgtcacctgagttagatttgctcagcactcacttctaaacctcatctaggcactgaaagaaaaagagctggggaacgatgcctacaagaagaaagactttgacacagccttgaagcattacgacaaagccaaggagctggaccccactaacatgacttacattaccaatcaagcagcggtatactttgaaaagggcgactacaataagtgccgggagctttgtgagaaggccattgaagtggggagagaaaaccgagaagactatcgacagattgccaaagcatatgctcgaattggcaactcctacttcaaagaagaaaagtacaaggatgccatccatttctataacaagtctctggcagagcaccgaaccccagatgtgctcaagaaatgccagcaggcagagaaaatcctgaaggagcaagagcggctggcctacataaaccccgacctggctttggaggagaagaacaaaggcaacgagtgttttcagaaaggggactatccccaggccatgaagcattatacagaagccatcaaaaggaacccg

SEQ ID NO: 20738 - DNA, 877 bp, Homo sapiens
  misc_feature 1..877: note = ENST00000540887
  source 1..877: mol_type = unassigned DNA
gcctgctacaccaaactcctggagttccagctggcactcaaggactgtgaggaatgtatccagctggagccgaccttcatcaagggttatacacggaaagccgctgcgctggaagcgatgaaggactacaccaaagccatggatgtgtaccagaaggcgctagacctggactccagctgtaaggaggcggcagacggctaccagcgctgtatgatggcgcagtacaaccggcacgacagccccgaagatgtgaagcgacgagccatggccgaccctgaggtgcagcagatcatgagtgacccagccatgcgccttatcctggaacagatgcagaaggacccccaggcactcagcgagtacgtagagtcagagaggcggccttgctggaaatggagaacaaaagcaggcagatgagtgcacgcggctggggggtggtatgctcagtctgcgaggaagaggaattctgtcattcttcctaaacttaaggagattggcagtgggtggcgagctggaagggctttgttagtcgtgatagcttaagcagtcatttggaaaggcccatttagctgggagaaaggtcttgactggaagctgtgtcgtgggctcaagagtaggactggcaagttctgcgaagtggagcaggcctctgcagctcggcgccccgggcctcgccaggacccctccctgccggggccttctgtagagggggttgaattggggcttgctctgagagcaagtaagactttaaaggttgtctcatttcaagtaactgcgtcttcctctgtagacacttaaagaatcctgtaatagcacagaagatccagaagctgatggatgtgggtctgattgcaattcggtgatgacttgttcatccccc

SEQ ID NO: 20739 - DNA, 528 bp, Homo sapiens
  misc_feature 1..528: note = ENST00000355603
  source 1..528: mol_type = unassigned DNA
tttttttttttttttttttttttagtagagatggggtttcaccatgttggccaggctggtgtcaaactcctgacctcaggtgatccacccaccttggccttccagagtgctgggattacaggcatgagccaccgcacccagcgttgttttgttttttagtcagcaatggttttggattccaaagctctcaggaccaaggcccacgcattttgtctagttgtcatgtactcttcagtttctcaaactggaattgtcccccgctatgtgtttttcataacatcagcctcttgcagagtccaggcagtttgtcttgtgtgggatgatccatcatctggagttgtctttcctgatgttgtcccctctgtttggtgctgggtgaggcattagagttggaagtccacatgcttgagttgcctgtactgagcttgtccaagggaatgagcctaatttctttctgttgcttcattctaggactgtgaggaatgtatccagctggagccgaccttcatcaagggttatacacggaaa

SEQ ID NO: 20740 - DNA, 5287 bp, Homo sapiens
  misc_feature 1..5287: note = ENST00000263955
  source 1..5287: mol_type = unassigned DNA
ccgcgactgcaagcttcggtagtcctctccgctgctgtcgccaggagtcacttcacgagaagccaggtcacaaccgtcggcccttgtctggaaaagtaaaagtggatcctgccacgttcggagctccctggcgcctcgcccggctggagctagagaactcgtcctgtggcggcccccggcgtggggcgggacagcggccccctggagggggcagtcccgggagaacctgcggcggccggagcggtaaaaataagtgactaaagaagcagacctgggaatcacctaacatgtcgaggaggagatttgattgccgaagtatttcaggcctactaactacaactcctcaaattccaataaaaatggaaaactttaataatttctatatacttacatctaaagagctagggagaggaaaatttgctgtggttagacaatgtatatcaaaatctactggccaagaatatgctgcaaaatttctaaaaaagagaagaagaggacaggattgtcgagcagaaattttacacgagattgctgtgcttgaattggcaaagtcttgtccccgtgttattaatcttcatgaggtctatgaaaatacaagtgaaatcattttgatattggaatatgctgcaggtggagaaattttcagcctgtgtttacctgagttggctgaaatggtttctgaaaatgatgttatcagactcattaaacaaatacttgaaggagtttattatctacatcagaataacattgtacaccttgatttaaagccacagaatatattactgagcagcatataccctctcggggacattaaaatagtagattttggaatgtctcgaaaaatagggcatgcgtgtgaacttcgggaaatcatgggaacaccagaatatttagctccagaaatcctgaactatgatcccattaccacagcaacagatatgtggaatattggtataatagcatatatgttgttaactcacacatcaccatttgtgggagaagataatcaagaaacatacctcaatatttctcaagttaatgtagattattcggaagaaactttttcatcagtttcacagctggccacagactttattcagagccttttagtaaaaaatccagagaaaagaccaacagcagagatatgcctttctcattcttggctacagcagtgggactttgaaaacttgtttcaccctgaagaaacttccagttcctctcaaactcaggatcattctgtaaggtcctctgaagacaagacttctaaatcctcctgtaatggaacctgtggtgatagagaagacaaagagaatatcccagaggatagcagcatggtttccaaaagatttcgtttcgatgactcattacccaatccccatgaacttgtttcagatttgctctgttagcacttttttctttgactcatttggactgaatttgaaattttatatccactccagtgagattatgatttgtagcttcatatatgacatgtttatattgtaaatgcacttttccatggaataatttagggaagtgttttaatgttaaattactagttgctagcatgttatgatttcatatcctgagatagctctgcagataagaaaatatttaaatatatgacaaaaagtaaaattgtacatgtgagtttacatgttaatgaaataattcaacttcaaatgaacttaccagaatgttttgcatatcaacaaaaaaagtggcttgagttttattatagttggtgtaaactgaacacagtgaagacattggaatttaataggttctctctctaaggtgactcttataccatgcctctatcaacataatttgtttaggaaagcagtatgaagtttaagccaaaataatttctactttatagatgctcaagagacattttacaattgaaaatgtctttcaattacaaatattttgaaacttcgtaagattttcattctctgtggtctgttatatgagagagatcctttaactagagcaaagagggagttagaaacctgatcagggatattctttacaagttggagcagaggaaagagtagcatgccttcgtattttaacgcaaatgtctttttcctcctcccaacctacttgagatctgataaggtctggaagatggagatatttggtatgcaagtgtagagttttttaatcctccagaatttctagagtagaagatacttaggtatagttaaatattctgtatttttagtcaaacatatttattaattgaatatagaagaaaatgttgacacactcagacagcttactgaattttagatgtcttctgcatcttagaatacaagccagtcattcagagttctaaaagtatgcataaaaaattacagcaccggtaggtctattaacacagtgcccgagtcagcggtagcaagactgatgtgatcataaaacatgacatcaggctcgtctgaagttcttgtgtgaaattcctagtgagtgaggaggctcagcttaaagccatctgcagagtggcccctcattgtggtcttttgctgggaccaatgcaagagactagggagagcaaaatgtttgcttatggctagagactatatccagccctaatgatggggaaagttagtccttttcgggtaatcttttatgaattttcacctgatgaccgttatattggtctgttatcatgttacgataactgtgatctcatgaccatgttgctgtatcagaagaaatagtttgacaaatggtaacaacaacctgatgttccccctttagacctttaacttctcaaaattttggtaagtttccaaattctttaataataacttaaaactttttgaataactatcaggtcactttatttgaccacatggtgaattcctttaatgtcttcagcatttgttaaggaaaagttttctctacttgtgtgtgtatgtgtgcacatgtgtgtatgtacaggtgtatgtatatatctatagatagatacaatacattctttagacacttttcaagattctttgctgtggtatattgtgctcaactcaggtgccaaaggagctttttttttttttttttttttttgagatggagttttgctctgtctctcaggctggagtgcagtggcatgatctcagctcacggcaacctctgcctcccgggttcaagcaattctcctgtctcagcctcctgagtagttgggattacaggcgcatgccaccgtgcccagctaatttttgtatttttagtagagacggggtttcaccatgttggccaggctggtcacaaactcctgacttcaagtgatccacccgcctcggcctcccaaagtgctgggattacaggcgtgagccactgcgcccccgcccaggagctcttttcttatgacatataaattatgacatttatattctttatatgactttatgttctcttcttatgacatttaaattctttaagtagtttgttggtccaataaactagacgttgtataatctaaattgagcccttgtatatctaaaactgatgagttgtttctaaattgttgattgtccatttacttgcctttggtattaagataatgcaagtaaagtttagtaagtcattggataatgaaatgattatgtttctgaagaccatattatatttttaatttttagaggaatcatgccatcccccaaaaaatcaagaaatatttgaattttaaattataagttcatttgttaaaagacatttttacaaatgtctgaaaatcttaaaatactttacatctacctttaagtagtagaatacagagctgtaaatttccatgccttttttcctgatattaagttttatagtaaaaaagcaactagtgattgcacaaagaatataaaaatccactctttttacaaaggtgtgaatttaaataacgttattgattggaatatgaaaatagaccaatcatttaagagctttttagcaaatgattcaattcttactctttttctcccaagattgaaaagcataatgtatttctctaaagtaggaatctagagagcccctgtgagtggacaaatgtcagtaacacttgaacacatgagaagataagtgttatgttgtgataatttaaagttaaatttgctttttgggtaggatccctaaatagatgggatttttaaatagatgatatatagatgacaattgcaattgtcattttaattattttccctacagtaaagaacctagctctgagcagtgaaattgtaatggcactttaaaggaagtaagccgttaactgttctctagtggagcgatctccaactgttttggcactagggacgggttttgtggaagaaaatttttccacaggactgggggtttagggggatggtttcaggatgattcaagtacattacatttatcattagattctcataaggagcatgcaacctagatctcttgcacgtgtggttcacagcaggattcgagctcctttgagaatctaatgccatggctgatctaacaggaaactgagctcaggcagtaatgcttggcaccgccccccaccttctatgcagcccggtcgtggcctggggactggggacccctgctctagtcagtaataaggtacttgtgccagaatataaatcaacacattgcttcctttatcaaagaagtcttgttatttaaaaaaagtcaactgagccagtatgattagtgatgtaattgattttcattctggcacaagcctctttcattctggacagctcacaaatagttaatggaccatgctttgaatagccttcctctaagcaacatttataaatactgatattttagaactgtttacatttcttctgtttatttttgaattttcagtttgatatcttgtccttattcattgttgtataaacaactgtactttaatttcaagtagtattaaaagtatttcacttcagtttggggggattattatcaatttataattttataaaagtattttaaagaataattgtaaattttccataaattacaacttcctgccatattttattaaataataatcttgcttaaggcatatagacagacattattatgagtattccagtaaaaaaaatctacatcaacttgaccattctggctaaaaattaaaaagcacttttttatatctgtggttgtcatttgtttcaaagcatttctaaatttattgttcttaaaagtatgtctgcatgttctagcctttgacctaggtcatctatgaaccctctttgtgtctaataaacatatctgtaaaggcatataaatctgaaaacaa

SEQ ID NO: 20741 - DNA, 1441 bp, Homo sapiens
  misc_feature 1..1441: note = ENST00000409228
  source 1..1441: mol_type = unassigned DNA
ctctttctctctcacagcttctcacgaggtagaactttagagcctggtgtgtttgtggctggagcatagcagctcttctacaactttactgtagtttctactgaatattttggtttgcaaatataaaggattctctgaagcacaaccttaaataacgtgtggtagacacctgggagaggaaaactgcagacagaaaaatgtggccggatgctctgtgggcgggcggcagcgatgttcggccaggtggctccaaggagaggaagcagtgatgcattgaggtaaaaataagtgactaaagaagcagacctgggaatcacctaacatgtcgaggaggagatttgattgccgaagtatttcaggcctactaactacaactcctcaaattccaataaaaatggaaaactttaataatttctatatacttacatctaaagagctagggagaggaaaatttgctgtggttagacaatgtatatcaaaatctactggccaagaatatgctgcaaaatttctaaaaaagagaagaagaggacaggattgtcgagcagaaattttacacgagattgctgtgcttgaattggcaaagtcttgtccccgtgttattaatcttcatgaggtctatgaaaatacaagtgaaatcattttgatattggaatatgctgcaggtggagaaattttcagcctgtgtttacctgagttggctgaaatggtttctgaaaatgatgttatcagactcattaaacaaatacttgaaggagtttattatctacatcagaataacattgtacaccttgatttaaagccacagaatatattactgagcagcatataccctctcggggacattaaaatagtagattttggaatgtctcgaaaaatagggcatgcgtgtgaacttcgggaaatcatgggaacaccagaatatttagctccagaaatcctgaactatgatcccattaccacagcaacagatatgtggaatattggtataatagcatatatgttgttaactcacacatcaccatttgtgggagaagataatcaagaaacatacctcaatatttctcaagttaatgtagattattcggaagaaactttttcatcagtttcacagctggccacagactttattcagagccttttagtaaaaaatccagagaaaagaccaacagcagagatatgcctttctcattcttggctacagcagtgggactttgaaaacttgtttcaccctgaagaaacttccagttcctctcaaactcaggatcattctgtaaggtcctctgaagacaagacttctaaatcctcctgtaatggaacctgtggtgatagagaagacaaagagaatatcccagaggatagcagcatggtttccaaaagatttcgtttcgatgactcattacccaatccccatgaacttgtttcagatttgctctgttag

SEQ ID NO: 20742 - DNA, 562 bp, Homo sapiens
  misc_feature 1..562: note = ENST00000606789
  source 1..562: mol_type = unassigned DNA
aaatttgctgtggttagacaatgtatatcaaaatctactggccaagaatatgctgcaaaatttctaaaaaagagaagaagaggacaggattgtcgagcagaaattttacacgagattgctgtgcttgaattggcaaagtcttgtccccgtgttattaatcttcatgaggtctatgaaaatacaagtgaaatcattttgatattggaatagtaagtatatactaaatagtacctattttagttggtatgaaaagatgattaaaatgtcaagaataagaatgataaaggtgtgacaagaacttgtaaagattcctgttaataaaatgtaaaagggacctaatttatattcagatattttcataagactaaatgtatagcctcgggcacatacacaaaaactaacagcacagaataagcaaatgacaaatacaacatttgaggaatgtggagaaatgaatatacattattttcttaatggctaattgattgaatttttctggaacacaatctgatgggcagatagaattgaagtaatttgtatattttcttcatctatttgaaaa

SEQ ID NO: 20743 - DNA, 507 bp, Homo sapiens
  misc_feature 1..507: note = ENST00000420683
  source 1..507: mol_type = unassigned DNA
aggaaaactgcagacagaaaaatgtggccggatgctctgtgggcgggcggcagcgatgttcggccaggtggctccaaggagaggaagcagtgatgcattgagggagtaaacatggaatcggtgagaatcactttccttgatcattatgtggtcagtatgcggtgactgacttgatgtgactggggaaggtcccttccctggacagaatatggtgagtgtcgtgccattaccggagaggatcaccttccctggccacatgtggtaaaaataagtgactaaagaagcagacctgggaatcacctaacatgtcgaggaggagatttgattgccgaagtatttcaggcctactaactacaactcctcaaattccaataaaaatggaaaactttaataatttctatatacttacatctaaagagctagggagaggaaaatttgctgtggttagacaatgtatatcaaaatctactggccaagaatatgctgcaaaatttctaaaaaagagaa

SEQ ID NO: 20744 - DNA, 567 bp, Homo sapiens
  misc_feature 1..567: note = ENST00000449152
  source 1..567: mol_type = unassigned DNA
aggtcgcgccaggcagggcccccttcgcggcgggcccgcgcgggtcccttccacagcaaggccacgcggtccccctagcctctcccgagtcccagctgcggcgtgggcgcgttcccatcgggactcgtggacgcgtcctgctcccagctgcctttcgtctagagaaaggcaaccagatgtttgaggagggcttggtggacaaaggtgacattcatgctccactatatgcaaaactggccaaaggagaggaaatggaaaaatatcttggctctgacaattggttcagatgcagtaaataaaaggaaaatgaacttaagaaatgcttaatggatgcctaaagcagcttgtgatcactggaagatcaattcttttatcatccatactttagaggcagcaaaatcgaagctttcttcaccagtaaaagggaatgcgaagtaaatcacaacaaaattccatttcaccttcatcacactagaatagccaaacttaaaagtctgaattgggtaaaaataagtgactaaagaagcagacctgggaatcacctaacatgtcgaggaggagatttga

SEQ ID NO: 20745 - DNA, 988 bp, Homo sapiens
  misc_feature 1..988: note = ENST00000497732
  source 1..988: mol_type = unassigned DNA
gtctgacacaagcattagtgagatgctcccctcgaagaatagtcttgtttcttctaaggactgattctcaccccggctttggctctcctaattttagagggtcctccaaatgcagtgaggttaggaaggacgtctgcgctcagatcaagaatccagttacctcaaagctccccaacttccacctccgcagagctatgacgtcatggcaggcacgccagaggccgaaggatgcaaaagtggttttctgctttcgatgatgcaatcattcagcgacagtggcgggcaaacccctcccggggcgggggaggtgtgagcttcacgaaggaggttgacaccaacgtggccaccggcgcccctccacgccgccaacgagtccccgggcgtgcgtgcccttggagggagccaatccgcggccggcgtggggcccggcctggcggaggtgatgctggtatgtgcgtcgccaccgcccctcccagcactgacgggcctgagggacgacaagttgacgctcctttcgtcatcacctggtctaggagggacgcccggggagaccgtacgtcactgctctgcgccggaagaccctattttcaggttctcttccctccattcctaccccttccccggtaccataaaatcccgggatatgagctggaagaggcatcacctgatcccggagacctttggagttaagaggcggcggaagcgagggcctgtggagtcggatcctcttcggggtgagccagggtcggcgcgcgcggctgtctcagaactcatgcagctgttcccgcgaggcctgtttgaggacgcgctgccgcccatcgtgctgaggagccaggtgtacagccttgtgcctgacaggaccgtggccgaccggcagctgaaggagcttcaagagcagggggagatcagaatcgtccagctgggcttcgacttggatgcccatggaattatcttcactgaggactacaggaccagagtatgtgactgt

SEQ ID NO: 20746 - DNA, 1620 bp, Homo sapiens
  misc_feature 1..1620: note = ENST00000426802
  source 1..1620: mol_type = unassigned DNA
gtcctccaaatgcagtgaggttaggaaggacgtctgcgctcagatcaagaatccagttacctcaaagctccccaacttccacctccgcagagctatgacgtcatggcaggcacgccagaggccgaaggatgcaaaagtggttttctgctttcgatgatgcaatcattcagcgacagtggcgggcaaacccctcccggggcgggggaggtgtgagcttcacgaaggaggttgacaccaacgtggccaccggcgcccctccacgccgccaacgagtccccgggcgtgcgtgcccttggagggagccaatccgcggccggcgtggggcccggcctggcggaggtgatgctggagggacgcccggggagaccgtacgtcactgctctgcgccggaagaccctattttcaggttctcttccctccattcctaccccttccccggtaccataaaatcccgggatatgagctggaagaggcatcacctgatcccggagacctttggagttaagaggcggcggaagcgagggcctgtggagtcggatcctcttcggggtgagccagggtcggcgcgcgcggctgtctcagaactcatgcagctgttcccgcgaggcctgtttgaggacgcgctgccgcccatcgtgctgaggagccaggtgtacagccttgtgcctgacaggaccgtggccgaccggcagctgaaggagcttcaagagcagggggagatcagaatcgtccagctgggcttcgacttggatgcccatggaattatcttcactgaggactacaggaccagagtcctcaaggcctgtgatggccgaccgtatgctggggcagtgcagaaatttctagcttcagtacttccagcctgtggggaccttagtttccagcaggaccaaatgacacagacctttggcttcagggactcagaaatcacgcatctggtgaatgctggagtcctcaccgtccgagatgctgggagctggtggctagctgtgcctggagctgggagattcatcaagtactttgttaaagggcgccaggctgtccttagcatggtccggaaggcaaagtaccgggaactgctcctatcagagctcctgggccggcgggcgcctgtcgtggtgcggcttggcctcacctaccatgtgcacgacctcattggggcccagctagtggactgcatctctaccacttcaggaaccctcctccgcctgccagagacatgaagattctgctcatcattgctcagctcctcagagtgggccgggaggggactagaagagctgcatgatggtggctgagacagggtcaccttgggaaggcttgggagccaggatgagtgtcgggctctcgtgtgtgcaaaaggtcagatgtgactgctgctgtttgcctggtttctgacccagtggtggggtttgagcaatgcttctctgcccttccatggaaagtggaaccagaaatggtgccaaggctgtggctgttccctttcgtgtaaaatggtgctgttattactctgtcttgaaataggaaggtgggatttctggggaggctggtgaaggagggcagggttcttttctctacgtgtcatgttaaaattgccaaataaagtacctctgcctgtga

SEQ ID NO: 20747 - DNA, 1557 bp, Homo sapiens
  misc_feature 1..1557: note = ENST00000452688
  source 1..1557: mol_type = unassigned DNA
cttccacctccgcagagctatgacgtcatggcaggcacgccagaggccgaaggatgcaaaagtggttttctgctttcgatgatgcaatcattcagcgacagtggcgggcaaacccctcccggggcgggggaggtgtgagcttcacgaaggaggttgacaccaacgtggccaccggcgcccctccacgccgccaacgagtccccgggcgtgcgtgcccttggagggagccaatccgcggccggcgtggggcccggcctggcggaggtgatgctggagggacgcccggggagaccgtacgtcactgctctgcgccggaagaccctattttcaggttctcttccctccattcctaccccttccccggtaccataaaatcccgggatatgagctggaagaggcatcacctgatcccggagacctttggagttaagaggcggcggaagcgagggcctgtggagtcggatcctcttcggggtgagccagggtcggcgcgcgcggctgtctcagaactcatgcagctgttcccgcgaggcctgtttgaggacgcgctgccgcccatcgtgctgaggagccaggtgtacagccttgtgcctgacaggaccgtggccgaccggcagctgaaggagcttcaagagcagggggagatcagaatcgtccagctgggcttcgacttggatgcccatggaattatcttcactgaggactacaggaccagagtatgtgactgtgtcctcaaggcctgtgatggccgaccgtatgctggggcagtgcagaaatttctagcttcagtacttccagcctgtggggaccttagtttccagcaggaccaaatgacacagacctttggcttcagggactcagaaatcacgcatctggtgaatgctggagtcctcaccgtccgagatgctgggagctggtggctagctgtgcctggagctgggagattcatcaagtactttgttaaagggcgccaggctgtccttagcatggtccggaaggcaaagtaccgggaactgctcctatcagagctcctgggccggcgggcgcctgtcgtggtgcggcttggcctcacctaccatgtgcacgacctcattggggcccagctagtggactgcatctctaccacttcaggaaccctcctccgcctgccagagacatgaagattctgctcatcattgctcagctcctcagagtgggccgggaggggactagaagagctgcatgatggtggctgagacagggtcaccttgggaaggcttgggagccaggatgagtgtcgggctctcgtgtgtgcaaaaggtcagatgtgactgctgctgtttgcctggtttctgacccagtggtggggtttgagcaatgcttctctgcccttccatggaaagtggaaccagaaatggtgccaaggctgtggctgttccctttcgtgtaaaatggtgctgttattactctgtcttgaaataggaaggtgggatttctggggaggctggtgaaggagggcagggttcttttctctacgtgtcatgttaaaattgccaaataaagtacctctgcctgtga

SEQ ID NO: 20748 - DNA, 2131 bp, Homo sapiens
  misc_feature 1..2131: note = ENST00000466867
  source 1..2131: mol_type = unassigned DNA
ccggaagaccctattttcaggttctcttccctccattcctaccccttccccggtaccataaaatcccgggatatgagctggaagaggcatcacctgatcccggagacctttggagttaagaggcggcggaagcgagggcctgtggagtcggatcctcttcggggtgagccagggtcggcgcgcgcggctgtctcagaactcatgcagctgttcccgcgaggcctgtttgaggacgcgctgccgcccatcgtgctgaggagccaggtgtacagccttgtgcctgacaggaccgtggccgaccggcagctgaaggagcttcaagagcagggggagatcagaatcgtccagctgggcttcgacttggatgcccatggaattatcttcactgaggactacaggaccagagtcctcaaggcctgtgatggccgaccgtatgctggggcagtgcagaaatttctagcttcagtacttccagcctgtggggaccttagtttccagcaggaccaaatgacacagacctttggcttcagggactcagaaatcacgtgagacttgtggaaccaaccaaagtcaggcatctggtgcttccctgcctccctccagttccatccagcctgtcctcctgtttttttggtgaacctgccagaaaagctgccaaaaagctgactcttctttttaataaaatgacccaagtttgtattcctccccacaagagaggaggcctatcttacctgggccttagaaagagccctgaaatagaattcagttcttggtggcttatcaaaagcacacaggggcctggcaggaagtgtaaaagcttgatgttaatcatactgggactaagaggatagagaatggtaggagctgggatacccctaaacattcacattaaaacaaaaaaaacccaaagctaaaaaacaactgggcaggagctaaataaaaatctaattttgagaggctgtatctggctcaggcctcctactttgtaacccatggaatatgtgaaagcatttgaaaaactatagcactgatctcacatgggcagacacactctcagagagatgtggtgggagccatggcgcagtctgcctaggcagtggcaggagcgcagaagactctgattcctctcctcggtcctaagaccgaatgtgtgtcaggacatgtggtcagggaagagaagctatttaactgaaccagtaatagtagcaggaaaagaaaaagtggagggagggcagtccaggtagggggcctggaacaagcaactgcaccaacagaggcagttggtgcgagcacagaaccaccccaggctgggattttgttatccagtctctcttgcatggttgcccgtgtttctggagacttgtgtaaacattaatggatgaggaggagagatggttctcagagcccagccctcatctctgctggcttcccactgccctcaggcatctggtgaatgctggagtcctcaccgtccgagatgctgggagctggtggctagctgtgcctggagctgggagattcatcaagtactttgttaaagggcgccaggctgtccttagcatggtccggaaggcaaagtaccgggaactgctcctatcagagctcctgggccggcgggcgcctgtcgtggtgcggcttggcctcacctaccatgtgcacgacctcattggggcccagctagtggactgcatctctaccacttcaggaaccctcctccgcctgccagagacatgaagattctgctcatcattgctcagctcctcagagtgggccgggaggggactagaagagctgcatgatggtggctgagacagggtcaccttgggaaggcttgggagccaggatgagtgtcgggctctcgtgtgtgcaaaaggtcagatgtgactgctgctgtttgcctggtttctgacccagtggtggggtttgagcaatgcttctctgcccttccatggaaagtggaaccagaaatggtgccaaggctgtggctgttccctttcgtgtaaaatggtgctgttattactctgtcttgaaataggaaggtgggatttctggggaggctggtgaaggagggcagggttcttttctctacgtgtcatgttaaaattgccaaataaagtacctctgcctgtga

SEQ ID NO: 20749 - DNA, 682 bp, Homo sapiens
  misc_feature 1..682: note = ENST00000478799
  source 1..682: mol_type = unassigned DNA
ttttcaggttctcttccctccattcctaccccttccccggtaccataaaatcccgggatatgagctggaagaggcatcacctgatcccggagacctttggagttaagaggcggcggaagcgagggcctgtggagtcggatcctcttcggggtgagccagggccggcgggcgcctgtcgtggtgcggcttggcctcacctaccatgtgcacgacctcattggggcccagctagtggactgcatctctaccacttcaggaaccctcctccgcctgccagagacatgaagattctgctcatcattgctcagctcctcagagtgggccgggaggggactagaagagctgcatgatggtggctgagacagggtcaccttgggaaggcttgggagccaggatgagtgtcgggctctcgtgtgtgcaaaaggtcagatgtgactgctgctgtttgcctggtttctgacccagtggtggggtttgagcaatgcttctctgcccttccatggaaagtggaaccagaaatggtgccaaggctgtggctgttccctttcgtgtaaaatggtgctgttattactctgtcttgaaataggaaggtgggatttctggggaggctggtgaaggagggcagggttcttttctctacgtgtcatgttaaaattgccaaataaagtacctctgcctgtga

SEQ ID NO: 20750 - DNA, 1101 bp, Homo sapiens
  misc_feature 1..1101: note = ENST00000520138
  source 1..1101: mol_type = unassigned DNA
ccccttccccggtaccataaaatcccgggatatgagctggaagaggcatcacctgatcccggagacctttggagttaagaggcggcggaagcgagggcctgtggagtcggatcctcttcggggtgagccagaaggagcttcaagagcagggggagatcagaatcgtccagctgggcttcgacttggatgcccatggaattatcttcactgaggactacaggaccagagtcctcaaggcctgtgatggccgaccgtatgctggggcagtgcagaaatttctagcttcagtacttccagcctgtggggaccttagtttccagcaggaccaaatgacacagacctttggcttcagggactcagaaatcacgcatctggtgaatgctggagtcctcaccgtccgagatgctgggagctggtggctagctgtgcctggagctgggagattcatcaagtactttgttaaagggcgccaggctgtccttagcatggtccggaaggcaaagtaccgggaactgctcctatcagagctcctgggccggcgggcgcctgtcgtggtgcggcttggcctcacctaccatgtgcacgacctcattggggcccagctagtggactgcatctctaccacttcaggaaccctcctccgcctgccagagacatgaagattctgctcatcattgctcagctcctcagagtgggccgggaggggactagaagagctgcatgatggtggctgagacagggtcaccttgggaaggcttgggagccaggatgagtgtcgggctctcgtgtgtgcaaaaggttgctcttgttctctccttctgtggttcatctgggggtccccctatcggtgggggtgcagctccaggatgtgccccgaggacaggtagtgaaaggatcagtgttcctgagaaacccatctcgtaataatgtcccctgctccccaaaggtggacttcacccttagctcagaaagagacttcgcactcctcagtctccaggtgcccttgaaagatgcgaagagctgtggcctccatcaactcctcagaggccctgaggtccagctggtggcccattcgccatggctaaaggactctctgtccag

SEQ ID NO: 20751 - DNA, 1049 bp, Homo sapiens
  misc_feature 1..1049: note = ENST00000486358
  source 1..1049: mol_type = unassigned DNA
cccggtaccataaaatcccgggatatgagctggaagaggcatcacctgatcccggagacctttggagttaagaggcggcggaagcgagggcctgtggagtcggatcctcttcggggtgagccagaaggagcttcaagagcagggggagatcagaatcgtccagctgggcttcgacttggatgcccatggaattatcttcactgaggactacaggaccagagtcctcaaggcctgtgatggccgaccgtatgctggggcagtgcagaaatttctagcttcagtacttccagcctgtggggaccttagtttccagcaggaccaaatgacacagacctttggcttcagggactcagaaatcacgcatctggtgaatgctggagtcctcaccgtccgagatgctgggagctggtggctagctgtgcctggagctgggagattcatcaagtactttgttaaagggcgccaggctgtccttagcatggtccggaaggcaaagtaccgggaactgctcctatcagagctcctgggccggcgggcgcctgtcgtggtgcggcttggcctcacctaccatgtgcacgacctcattggggcccagctagtggactgcatctctaccacttcaggaaccctcctccgcctgccagagacatgaagattctgctcatcattgctcagctcctcagagtgggccgggaggggactagaagagctgcatgatggtggctgagacagggtcaccttgggaaggcttgggagccaggatgagtgtcgggctctcgtgtgtgcaaaaggtcagatgtgactgctgctgtttgcctggtttctgacccagtggtggggtttgagcaatgcttctctgcccttccatggaaagtggaaccagaaatggtgccaaggctgtggctgttccctttcgtgtaaaatggtgctgttattactctgtcttgaaataggaaggtgggatttctggggaggctggtgaaggagggcagggttcttttctctacgtgtcatgttaaaattgccaaataaagtacctctgcctgtga

SEQ ID NO: 20752 - DNA, 919 bp, Homo sapiens
  misc_feature 1..919: note = ENST00000468899
  source 1..919: mol_type = unassigned DNA
ggtaccataaaatcccgggatatgagctggaagaggcatcacctgatcccggagacctttggagttaagaggcggcggaagcgagggcctgtggagtcggatcctcttcggggtgagccagggtcggcgcgcgcggctgtctcagaactcatgcagctgttcccgcgaggcctgtttgaggacgcgctgccgcccatcgtgctgaggagccaggtgtacagccttgtgcctgacaggaccgtggccgaccggcagctggtgaggggcgtcggtgcgaccgccggaagcccctttcctaactcctggaattccctgtcactcagtcactccgccagccgttcagcaagcattaggcctttcaggcgagggcactgtgccaggcactggggtgccacagagaccctgttaaaagtcccgcaggtagtacagggcatttcaaatcatggaggtagaagaacgaggcttttggggaaaccgagtcatggggcatggttcgaacatacagcgctgggagtgcagtcagacgtcagatcatgacaggccttgtacatcagtgttgtttccatcttacactgaggcgatgggctggtagagaatatcatagagagagggaatggtgtattggagatagtggatgaggcagggaggtcagctaagaagatactgcatctgagaagtggtgaaggcctaaattaggtcagtgcagtagggagggagaggagagtgaggaagagggaggagtccaggacaactcagactttccagatgactgcgtggctggtggtattaggagcacatttagttgttggactacagataatgtgtttaattttatacaagttgagttgatggtgcatgtggagcatccaaagacaaaggtattagacagttggatatgagagttggagagaattctggg

SEQ ID NO: 20753 - DNA, 1128 bp, Homo sapiens
  misc_feature 1..1128: note = ENST00000460232
  source 1..1128: mol_type = unassigned DNA
cgagagttttgttagaaccgcgtccccgccccagttccctgtccgtgagccgatttatctgcccagggtcggcgcgcgcggctgtctcagaactcatgcagctgttcccgcgaggcctgtttgaggacgcgctgccgcccatcgtgctgaggagccaggtgtacagccttgtgcctgacaggaccgtggccgaccggcagctgaaggagcttcaagagcagggggagatcagaatcgtccagctgggcttcgacttggatgcccatggaattatcttcactgaggactacaggaccagagtcctcaaggcctgtgatggccgaccgtatgctggggcagtgcagaaatttctagcttcagtacttccagcctgtggggaccttagtttccagcaggaccaaatgacacagacctttggcttcagggactcagaaatcacgcatctggtgaatgctggagtcctcaccgtccgagatgctgggagctggtggctagctgtgcctggagctgggagattcatcaagtactttgttaaagggcgccaggctgtccttagcatggtccggaaggcaaagtaccgggaactgctcctatcagagctcctgggccggcgggcgcctgtcgtggtgcggcttggcctcacctaccatgtgcacgacctcattggggcccagctagtggactgcatctctaccacttcaggaaccctcctccgcctgccagagacatgaagattctgctcatcattgctcagctcctcagagtgggccgggaggggactagaagagctgcatgatggtggctgagacagggtcaccttgggaaggcttgggagccaggatgagtgtcgggctctcgtgtgtgcaaaaggtcagatgtgactgctgctgtttgcctggtttctgacccagtggtggggtttgagcaatgcttctctgcccttccatggaaagtggaaccagaaatggtgccaaggctgtggctgttccctttcgtgtaaaatggtgctgttattactctgtcttgaaataggaaggtgggatttctggggaggctggtgaaggagggcagggttcttttctctacgtgtcatgttaaaattgccaaataaagtacctctgcctgtga

SEQ ID NO: 20754 - DNA, 725 bp, Homo sapiens
  misc_feature 1..725: note = ENST00000464694
  source 1..725: mol_type = unassigned DNA
ccccgccccagttccctgtccgtgagccgatttatctgcccagggtcggcgcgcgcggctgtctcagaactcatgcagctgttcccgcgaggcctgtttgaggacgcgctgccgcccatcgtgctgaggagccaggtgtacagccttgtgcctgacaggaccgtggccgaccggcagctgaaggagcttcaagagcagggggagatcagaatcgtccagctgggcttcgacttggatgcccatggaattatcttcactgaggactacaggaccagagtcctcaaggcctgtgatggccgaccgtatgctggggcagtgcagaaatttctagcttcagtacttccagcctgtggggaccttagtttccagcaggaccaaatgacacagacctttggcttcagggactcagaaatcacgtgagacttgtggaaccaaccaaagtcaggcatctggtgcttccctgcctccctccagttccatccagcctgtcctcctgtttttttggtgaacctgccagaaaagctgccaaaaagctgactcttctttttaataaaatgacccaagtttgtattcctccccacaagagaggaggcctatcttacctgggccttagaaagagccctgaaatagaattcagttcttggtggcttatcaaaagcacacaggggcctggcaggaagtgtaaaagcttgatgttaatcatactgggactaagaggatagaga

SEQ ID NO: 20755 - DNA, 820 bp, Homo sapiens
  misc_feature 1..820: note = ENST00000473747
  source 1..820: mol_type = unassigned DNA
gccccagttccctgtccgtgagccgatttatctgcccagggtcggcgcgcgcggctgtctcagaactcatgcagctgttcccgcgaggcctgtttgaggacgcgctgccgcccatcgtgctgaggagccaggtgtacagccttgtgcctgacaggaccgtggccgaccggcagctggtgaggggcgtcggtgcgaccgccggaagcccctttcctaactcctggaattccctgtcactcagtcactccgccagccgttcagcaagcattaggcctttcaggcgagggcactgtgccaggcactggggtgccacagagaccctgttaaaagtcccgcagaaggagcttcaagagcagggggagatcagaatcgtccagctgggcttcgacttggatgcccatggaattatcttcactgaggactacaggaccagagtcctcaaggcctgtgatggccgaccgtatgctggggcagtgcagaaatttctagcttcagtacttccagcctgtggggaccttagtttccagcaggaccaaatgacacagacctttggcttcagggactcagaaatcacgcatctggtgaatgctggagtcctcaccgtccgagatgctgggagctggtggctagctgtgcctggagctgggagattcatcaagtactttgttaaagggcgccaggctgtccttagcatggtccggaaggcaaagtaccgggaactgctcctatcagagctcctgggccggcgggcgcctgtcgtggtgcggcttggcctcacctaccatgtgcacgacctcattggggcccagctagtggactg

SEQ ID NO: 20756 - DNA, 854 bp, Homo sapiens
  misc_feature 1..854: note = ENST00000447249
  source 1..854: mol_type = unassigned DNA
ggaggagagatggttctcagagcccagccctcatctctgctggcttcccactgccctcaggcatctggtgaatgctggagtcctcaccgtccgagatgctgggagctggtggctagctgtgcctggagctgggagattcatcaagtactttgttaaaggtatcccatctgcagctcaagcctgcagcccctcaccttttggtggctcctcaggcctctaggccttattcacctttcccctttcctgtgccacttctcctctagggcgccaggctgtccttagcatggtccggaaggcaaagtaccgggaactgctcctatcagagctcctgggccggcgggcgcctgtcgtggtgcggcttggcctcacctaccatgtgcacgacctcattggggcccagctagtggactgcatctctaccacttcaggaaccctcctccgcctgccagagacatgaagattctgctcatcattgctcagctcctcagagtgggccgggaggggactagaagagctgcatgatggtggctgagacagggtcaccttgggaaggcttgggagccaggatgagtgtcgggctctcgtgtgtgcaaaaggtcagatgtgactgctgctgtttgcctggtttctgacccagtggtggggtttgagcaatgcttctctgcccttccatggaaagtggaaccagaaatggtgccaaggctgtggctgttccctttcgtgtaaaatggtgctgttattactctgtcttgaaataggaaggtgggatttctggggaggctggtgaaggagggcagggttcttttctctacgtgtcatgttaaaattgccaaataaagtacctctgcctgtga

SEQ ID NO: 20757 - DNA, 1804 bp, Homo sapiens
  misc_feature 1..1804: note = ENST00000549310
  source 1..1804: mol_type = unassigned DNA
gtctgacacaagcattagtgagatgctcccctcgaagaatagtcttgtttcttctaaggactgattctcaccccggctttggctctcctaattttagagggtcctccaaatgcagtgaggttaggaaggacgtctgcgctcagatcaagaatccagttacctcaaagctccccaacttccacctccgcagagctatgacgtcatggcaggcacgccagaggccgaaggatgcaaaagtggttttctgctttcgatgatgcaatcattcagcgacagtggcgggcaaacccctcccggggcgggggaggtgtgagcttcacgaaggaggttgacaccaacgtggccaccggcgcccctccacgccgccaacgagtccccgggcgtgcgtgcccttggagggagccaatccgcggccggcgtggggcccggcctggcggaggtgatgctggtatgtgcgtcgccaccgcccctcccagcactgacgggcctgagggacgacaagttgacgctcctttcgtcatcacctggtctaggagggacgcccggggagaccgtacgtcactgctctgcgccggaagaccctattttcaggttctcttccctccattcctaccccttccccggtaccataaaatcccgggatatgagctggaagaggcatcacctgatcccggagacctttggagttaagaggcggcggaagcgagggcctgtggagtcggatcctcttcggggtgagccagggtcggcgcgcgcggctgtctcagaactcatgcagctgttcccgcgaggcctgtttgaggacgcgctgccgcccatcgtgctgaggagccaggtgtacagccttgtgcctgacaggaccgtggccgaccggcagctgaaggagcttcaagagcagggggagatcagaatcgtccagctgggcttcgacttggatgcccatggaattatcttcactgaggactacaggaccagagtcctcaaggcctgtgatggccgaccgtatgctggggcagtgcagaaatttctagcttcagtacttccagcctgtggggaccttagtttccagcaggaccaaatgacacagacctttggcttcagggactcagaaatcacgcatctggtgaatgctggagtcctcaccgtccgagatgctgggagctggtggctagctgtgcctggagctgggagattcatcaagtactttgttaaagggcgccaggctgtccttagcatggtccggaaggcaaagtaccgggaactgctcctatcagagctcctgggccggcgggcgcctgtcgtggtgcggcttggcctcacctaccatgtgcacgacctcattggggcccagctagtggactgcatctctaccacttcaggaaccctcctccgcctgccagagacatgaagattctgctcatcattgctcagctcctcagagtgggccgggaggggactagaagagctgcatgatggtggctgagacagggtcaccttgggaaggcttgggagccaggatgagtgtcgggctctcgtgtgtgcaaaaggtcagatgtgactgctgctgtttgcctggtttctgacccagtggtggggtttgagcaatgcttctctgcccttccatggaaagtggaaccagaaatggtgccaaggctgtggctgttccctttcgtgtaaaatggtgctgttattactctgtcttgaaataggaaggtgggatttctggggaggctggtgaaggagggcagggttcttttctctacgtgtcatgttaaaattgccaaataaagtacctctgcctgtg

SEQ ID NO: 20758 - DNA, 988 bp, Homo sapiens; identical to SEQ ID NO: 20745
  misc_feature 1..988: note = ENST00000459769
  source 1..988: mol_type = unassigned DNA

SEQ ID NO: 20759 - DNA, 1620 bp, Homo sapiens; identical to SEQ ID NO: 20746
  misc_feature 1..1620: note = ENST00000425138
  source 1..1620: mol_type = unassigned DNA

SEQ ID NO: 20760 - DNA, 1557 bp, Homo sapiens; identical to SEQ ID NO: 20747
  misc_feature 1..1557: note = ENST00000433397
  source 1..1557: mol_type = unassigned DNA

SEQ ID NO: 20761 - DNA, 2131 bp, Homo sapiens
  misc_feature 1..2131: note = ENST00000483467
  source 1..2131: mol_type = unassigned DNA
ccggaagaccctattttcaggttctcttccctccattcctaccccttccccggtaccataaaatcccgggatatgagctggaagaggcatcacctgatcccggagacctttggagttaagaggcggcggaagcgagggcctgtggagtcggatcctcttcggggtgagccagggtcggcgcgcgcggctgtctcagaactcatgcagctgttcccgcgaggcctgtttgaggacgcgctgccgcccatcgtgctgaggagccaggtgtacagccttgtgcctgacaggaccgtggccgaccggcagctgaaggagcttcaagagcagggggagatcagaatcgtccagctgggcttcgacttggatgcccatggaattatcttcactgaggactacaggaccagagtcctcaaggcctgtgatggccgaccgtatgctggggcagtgcagaaatttctagcttcagtacttccagcctgtggggaccttagtttccagcaggaccaaatgacacagacctttggcttcagggactcagaaatcacgtgagacttgtggaaccaaccaaagtcaggcatctggtgcttccctgcctccctccagttccatccagcctgtcctcctgtttttttggtgaacctgccagaaaagctgccaaaaagctgactcttcttgttaataaaatgacccaagtttgtattcctccccacaagagaggaggcctatcttacctgggccttagaaagagccctgaaatagaattcagttcttggtggcttatcaaaagcacacaggggcctggcaggaagtgtaaaagcttgatgttaatcatactgggactaagaggatagagaatggtaggagctgggatacccctaaacattcacattaaaacaaaaaaaacccaaagctaaaaaacaactgggcaggagctaaataaaaatctaattttgagaggctgtatctggctcaggcctcctactttgtaacccatggaatatgtgaaagcatttgaaaaactatagcactgatctcacatgggcagacacactctcagagagatgtggtgggagccatggcgcagtctgcctaggcagtggcaggagcgcagaagactctgattcctctcctcggtcctaagaccgaatgtgtgtcaggacatgtggtcagggaagagaagctatttaactgaaccagtaatagtagcaggaaaagaaaaagtggagggagggcagtccaggtagggggcctggaacaagcaactgcaccaacagaggcagttggtgcgagcacagaaccaccccaggctgggattttgttatccagtctctcttgcatggttgcccgtgtttctggagacttgtgtaaacattaatggatgaggaggagagatggttctcagagcccagccctcatctctgctggcttcccactgccctcaggcatctggtgaatgctggagtcctcaccgtccgagatgctgggagctggtggctagctgtgcctggagctgggagattcatcaagtactttgttaaagggcgccaggctgtccttagcatggtccggaaggcaaagtaccgggaactgctcctatcagagctcctgggccggcgggcgcctgtcgtggtgcggcttggcctcacctaccatgtgcacgacctcattggggcccagctagtggactgcatctctaccacttcaggaaccctcctccgcctgccagagacatgaagattctgctcatcattgctcagctcctcagagtgggccgggaggggactagaagagctgcatgatggtggctgagacagggtcaccttgggaaggcttgggagccaggatgagtgtcgggctctcgtgtgtgcaaaaggtcagatgtgactgctgctgtttgcctggtttctgacccagtggtggggtttgagcaatgcttctctgcccttccatggaaagtggaaccagaaatggtgccaaggctgtggctgttccctttcgtgtaaaatggtgctgttattactctgtcttgaaataggaaggtgggatttctggggaggctggtgaaggagggcagggttcttttctctacgtgtcatgttaaaattgccaaataaagtacctctgcctgtga

SEQ ID NO: 20762 - DNA, 682 bp, Homo sapiens; identical to SEQ ID NO: 20749
  misc_feature 1..682: note = ENST00000487912
  source 1..682: mol_type = unassigned DNA

SEQ ID NO: 20763 - DNA, 1049 bp, Homo sapiens; identical to SEQ ID NO: 20751
  misc_feature 1..1049: note = ENST00000461093
  source 1..1049: mol_type = unassigned DNA

SEQ ID NO: 20764 - DNA, 919 bp, Homo sapiens
  misc_feature 1..919: note = ENST00000462407
  source 1..919: mol_type = unassigned DNA
ggtaccataaaatcccgggatatgagctggaagaggcatcacctgatcccggagacctttggagttaagaggcggcggaagcgagggcctgtggagtcggatcctcttcggggtgagccagggtcggcgcgcgcggctgtctcagaactcatgcagctgttcccgcgaggcctgtttgaggacgcgctgccgcccatcgtgctgaggagccaggtgtacagccttgtgcctgacaggaccgtggccgaccggcagctggtgaggggcgtcggtgcgaccgccggaagcccctttcctaactcctggaattccctgtcactcagtcactccgccagccgttcagcaagcattaggcctttcaggcgagggcactgtgccaggcactggggtgccacagagaccctgttaaaagtcccgcaggtagtacagggcatttcaaatcatggaggtagaagaacgaggcttttggggaaaccgagtcatggggcatggttcgaacatacagcgctgggagtgcagtcagacgtcagatcatgacaggccttgtacatcagtgttgtttccatcttacactgaggcgatgggctggtagagaatatcatagagagagggaatggtgtgttggagatagtggatgaggcagggaggtcagctaagaagatactgcatctgagaagtggtgaaggcctaaattaggtcagtgcagtagggagggagaggagagtgaggaagagggaggagtccaggacaactcagactttccagatgactgcgtggctggtggtattaggagcacatttagttgttggactacagataatgtgtttaattttatacaagttgagttgatggtgcatgtggagcatccaaagacaaaggtattagacagttggatatgagagttggagagaattctggg

SEQ ID NO: 20765 - DNA, 1128 bp, Homo sapiens; identical to SEQ ID NO: 20753
  misc_feature 1..1128: note = ENST00000490195
  source 1..1128: mol_type = unassigned DNA

SEQ ID NO: 20766 - DNA, 725 bp, Homo sapiens
  misc_feature 1..725: note = ENST00000490429
  source 1..725: mol_type = unassigned DNA
ccccgccccagttccctgtccgtgagccgatttatctgcccagggtcggcgcgcgcggctgtctcagaactcatgcagctgttcccgcgaggcctgtttgaggacgcgctgccgcccatcgtgctgaggagccaggtgtacagccttgtgcctgacaggaccgtggccgaccggcagctgaaggagcttcaagagcagggggagatcagaatcgtccagctgggcttcgacttggatgcccatggaattatcttcactgaggactacaggaccagagtcctcaaggcctgtgatggccgaccgtatgctggggcagtgcagaaatttctagcttcagtacttccagcctgtggggaccttagtttccagcaggaccaaatgacacagacctttggcttcagggactcagaaatcacgtgagacttgtggaaccaaccaaagtcaggcatctggtgcttccctgcctccctccagttccatccagcctgtcctcctgtttttttggtgaacctgccagaaaagctgccaaaaagctgactcttcttgttaataaaatgacccaagtttgtattcctccccacaagagaggaggcctatcttacctgggccttagaaagagccctgaaatagaattcagttcttggtggcttatcaaaagcacacaggggcctggcaggaagtgtaaaagcttgatgttaatcatactgggactaagaggatagaga

SEQ ID NO: 20767 - DNA, 820 bp, Homo sapiens; identical to SEQ ID NO: 20755
  misc_feature 1..820: note = ENST00000479148
  source 1..820: mol_type = unassigned DNA

SEQ ID NO: 20768 - DNA, 854 bp, Homo sapiens; identical to SEQ ID NO: 20756
  misc_feature 1..854: note = ENST00000474087
  source 1..854: mol_type = unassigned DNA

SEQ ID NO: 20769 - DNA, 1804 bp, Homo sapiens; identical to SEQ ID NO: 20757
  misc_feature 1..1804: note = ENST00000551718
  source 1..1804: mol_type = unassigned DNA

SEQ ID NO: 20770 - DNA, 1889 bp, Homo sapiens
  misc_feature 1..1889: note = ENST00000466132
  source 1..1889: mol_type = unassigned DNA
agttttgtcaggtgcccccgccacgtcactatggcctctgccagccagcctggacccctgagaggcaggagttacaggctgaaggtctgacacaagcattagtgagatgctcccctcgaagaatagtcttgtttcttctaaggactgattctcaccccggctttggctctcctaattttagagggtcctccaaatgcagtgaggttaggaaggacgtctgcgctcagatcaagaatccagttacctcaaagctccccaacttccacctccgcagagctatgacgtcatggcaggcacgccagaggccgaaggatgcaaaagtggttttctgctttcgatgatgcaatcattcagcgacagtggcgggcaaacccctcccggggcgggggaggtgtgagcttcacgaaggaggttgacaccaacgtggccaccggcgcccctccacgccgccaacgagtccccgggcgtgcgtgcccttggagggagccaatccgcggccggcgtggggcccggcctggcggaggtgatgctggtatgtgcgtcgccaccgcccctcccagcactgacgggcctgagggacgacaagttgacgctcctttcgtcatcacctggtctaggagggacgcccggggagaccgtacgtcactgctctgcgccggaagaccctattttcaggttctcttccctccattcctaccccttccccggtaccataaaatcccgggatatgagctggaagaggcatcacctgatcccggagacctttggagttaagaggcggcggaagcgagggcctgtggagtcggatcctcttcggggtgagccagggtcggcgcgcgcggctgtctcagaactcatgcagctgttcccgcgaggcctgtttgaggacgcgctgccgcccatcgtgctgaggagccaggtgtacagccttgtgcctgacaggaccgtggccgaccggcagctgaaggagcttcaagagcagggggagatcagaatcgtccagctgggcttcgacttggatgcccatggaattatcttcactgaggactacaggaccagagtcctcaaggcctgtgatggccgaccgtatgctggggcagtgcagaaatttctagcttcagtacttccagcctgtggggaccttagtttccagcaggaccaaatgacacagacctttggcttcagggactcagaaatcacgcatctggtgaatgctggagtcctcaccgtccgagatgctgggagctggtggctagctgtgcctggagctgggagattcatcaagtactttgttaaagggcgccaggctgtccttagcatggtccggaaggcaaagtaccgggaactgctcctatcagagctcctgggccggcgggcgcctgtcgtggtgcggcttggcctcacctaccatgtgcacgacctcattggggcccagctagtggactgcatctctaccacttcaggaaccctcctccgcctgccagagacatgaagattctgctcatcattgctcagctcctcagagtgggccgggaggggactagaagagctgcatgatggtggctgagacagggtcaccttgggaaggcttgggagccaggatgagtgtcgggctctcgtgtgtgcaaaaggtcagatgtgactgctgctgtttgcctggtttctgacccagtggtggggtttgagcaatgcttctctgcccttccatggaaagtggaaccagaaatggtgccaaggctgtggctgttccctttcgtgtaaaatggtgctgttattactctgtcttgaaataggaaggtgggatttctggggaggctggtgaaggagggcagggttcttttctctacgtgtcatgttaaaattgccaaataaagtacctctgcctgtga

SEQ ID NO: 20771 - DNA, 575 bp, Homo sapiens
  misc_feature 1..575: note = ENST00000460018
  source 1..575: mol_type = unassigned DNA
aggctgaaggtctgacacaagcattagtgagatgctcccctcgaagaatagtcttgtttcttctaaggactgattctcaccccggctttggctctcctaattttagagggtcctccaaatgcagtgaggttaggaaggacgtctgcgctcagatcaagaatccagttacctcaaagctccccaacttccacctccgcagagctatgacgtcatggcaggcacgccagaggccgaaggatgcaaaagtggttttctgctttcgatgatgcaatcattcagcgacagtggcgggcaaacccctcccggggcgggggaggtgtgagcttcacgaaggaggttgacaccaacgtggccaccggcgcccctccacgccgccaacgagtccccgggcgtgcgtgcccttggagggagccaatccgcggccggcgtggggcccggcctggcggaggtgatgctggagggacgcccggggagaccgtacgtcactgctctgcgccggaagaccctattttcaggttctcttccctccattcctaccccttccccggtaccataaaatcccgggatatgagctg

SEQ ID NO: 20772 - DNA, 1352 bp, Homo sapiens
  misc_feature 1..1352: note = ENST00000479644
  source 1..1352: mol_type = unassigned DNA
ctgcctctttccttgcccttcacccaccctccctccaggtcctccaaatgcagtgaggttaggaaggacgtctgcgctcagatcaagaatccagttacctcaaagctccccaacttccacctccgcagagctatgacgtcatggcaggcacgccagaggccgaaggatgcaaaagtggttttctgctttcgatgatgcaatcattcagcgacagtggcgggcaaacccctcccggggcgggggaggtgtgagcttcacgaaggaggttgacaccaacgtggccaccggcgcccctccacgccgccaacgagtccccgggcgtgcgtgcccttggagggagccaatccgcggccggcgtggggcccggcctggcggaggtgatgctggagggacgcccggggagaccgtacgtcactgctctgcgccggaagaccctattttcaggttctcttccctccattcctaccccttccccggtaccataaaatcccgggatatgagctggaagaggcatcacctgatcccggagacctttggagttaagaggcggcggaagcgagggcctgtggagtcggatcctcttcggggtgagccagggtcggcgcgcgcggctgtctcagaactcatgcagctgttcccgcgaggcctgtttgaggacgcgctgccgcccatcgtgctgaggagccaggtgtacagccttgtgcctgacaggaccgtggccgaccggcagctggtgaggggcgtcggtgcgaccgccggaagcccctttcctaactcctggaattccctgtcactcagtcactccgccagccgttcagcaagcattaggcctttcaggcgagggcactgtgccaggcactggggtgccacagagaccctgttaaaagtcccgcaggtagtacagggcatttcaaatcatggaggtagaagaacgaggcttttggggaaaccgagtcatggggcatggttcgaacatacagcgctgggagtgcagtcagacgtcagatcatgacaggccttgtacatcagtgttgtttccatcttacactgaggcgatgggctggtagagaatatcatagagagagggaatggtgtattggagatagtggatgaggcagggaggtcagctaagaagatactgcatctgagaagtggtgaaggcctaaattaggtcagtgcagtagggagggagaggagagtgaggaagagggaggagtccaggacaactcagactttccagatgactgcgtggctggtggtattaggagcacatttagttgttggactacagataatgtgtttaattttatacaagttgagttgatggtgcatgtggagcatccaaagacaaa

SEQ ID NO: 20773 - DNA, 1663 bp, Homo sapiens
  misc_feature 1..1663: note = ENST00000375331
  source 1..1663: mol_type = unassigned DNA
ctgcctctttccttgcccttcacccaccctccctccaggtcctccaaatgcagtgaggttaggaaggacgtctgcgctcagatcaagaatccagttacctcaaagctccccaacttccacctccgcagagctatgacgtcatggcaggcacgccagaggccgaaggatgcaaaagtggttttctgctttcgatgatgcaatcattcagcgacagtggcgggcaaacccctcccggggcgggggaggtgtgagcttcacgaaggaggttgacaccaacgtggccaccggcgcccctccacgccgccaacgagtccccgggcgtgcgtgcccttggagggagccaatccgcggccggcgtggggcccggcctggcggaggtgatgctggagggacgcccggggagaccgtacgtcactgctctgcgccggaagaccctattttcaggttctcttccctccattcctaccccttccccggtaccataaaatcccgggatatgagctggaagaggcatcacctgatcccggagacctttggagttaagaggcggcggaagcgagggcctgtggagtcggatcctcttcggggtgagccagggtcggcgcgcgcggctgtctcagaactcatgcagctgttcccgcgaggcctgtttgaggacgcgctgccgcccatcgtgctgaggagccaggtgtacagccttgtgcctgacaggaccgtggccgaccggcagctgaaggagcttcaagagcagggggagatcagaatcgtccagctgggcttcgacttggatgcccatggaattatcttcactgaggactacaggaccagagtcctcaaggcctgtgatggccgaccgtatgctggggcagtgcagaaatttctagcttcagtacttccagcctgtggggaccttagtttccagcaggaccaaatgacacagacctttggcttcagggactcagaaatcacgcatctggtgaatgctggagtcctcaccgtccgagatgctgggagctggtggctagctgtgcctggagctgggagattcatcaagtactttgttaaagggcgccaggctgtccttagcatggtccggaaggcaaagtaccgggaactgctcctatcagagctcctgggccggcgggcgcctgtcgtggtgcggcttggcctcacctaccatgtgcacgacctcattggggcccagctagtggactgcatctctaccacttcaggaaccctcctccgcctgccagagacatgaagattctgctcatcattgctcagctcctcagagtgggccgggaggggactagaagagctgcatgatggtggctgagacagggtcaccttgggaaggcttgggagccaggatgagtgtcgggctctcgtgtgtgcaaaaggtcagatgtgactgctgctgtttgcctggtttctgacccagtggtggggtttgagcaatgcttctctgcccttccatggaaagtggaaccagaaatggtgccaaggctgtggctgttccctttcgtgtaaaatggtgctgttattactctgtcttgaaataggaaggtgggatttctggggaggctggtgaaggagggcagggttcttttctctacgtgtcatgttaaaattgccaaataaagtacctctgcctgtgatattt

SEQ ID NO: 20774 - DNA, 1405 bp, Homo sapiens
  misc_feature 1..1405: note = ENST00000492583
  source 1..1405: mol_type = unassigned DNA
cgtctgcgctcagatcaagaatccagttacctcaaagctccccaacttccacctccgcagagctatgacgtcatggcaggcacgccagaggccgaaggatgcaaaagtggttttctgctttcgatgatgcaatcattcagcgacagtggcgggcaaacccctcccggggcgggggaggtgtgagcttcacgaaggaggttgacaccaacgtggccaccggcgcccctccacgccgccaacgagtccccgggcgtgcgtgcccttggagggagccaatccgcggccggcgtggggcccggcctggcggaggtgatgctggtatgtgcgtcgccaccgcccctcccagcactgacgggcctgagggacgacaagttgacgctcctttcgtcatcacctggtctaggagggacgcccggggagaccgtacgtcactgctctgcgccggaagaccctattttcaggttctcttccctccattcctaccccttccccggtaccataaaatcccgggatatgagctggaagaggcatcacctgatcccggagacctttggagttaagaggcggcggaagcgagggcctgtggagtcggatcctcttcggggtgagccagggtcggcgcgcgcggctgtctcagaactcatgcagctgttcccgcgaggcctgtttgaggacgcgctgccgcccatcgtgctgaggagccaggtgtacagccttgtgcctgacaggaccgtggccgaccggcagctgaaggagcttcaagagcagggggagatcagaatcgtccagctgggcttcgacttggatgcccatggaattatcttcactgaggactacaggaccagagtatgtgactgtgtcctcaaggcctgtgatggccgaccgtatgctggggcagtgcagaaatttctagcttcagtacttccagcctgtggggaccttagtttccagcaggaccaaatgacacagacctttggcttcagggactcagaaatcacgcatctggtgaatgctggagtcctcaccgtccgagatgctgggagctggtggctagctgtgcctggagctgggagattcatcaagtactttgttaaagggcgccaggctgtccttagcatggtccggaaggcaaagtaccgggaactgctcctatcagagctcctgggccggcgggcgcctgtcgtggtgcggcttggcctcacctaccatgtgcacgacctcattggggcccagctagtggactgcatctctaccacttcaggaaccctcctccgcctgccagagacatgaagattctgctcatcattgctcagctcctcagagtgggccgggaggggactagaagagctgcatgatggtggctgagacagggtcaccttgggaaggcttgggagccaggatgagt

SEQ ID NO: 20775 - DNA, 1557 bp, Homo sapiens; identical to SEQ ID NO: 20747
  misc_feature 1..1557: note = ENST00000375333
  source 1..1557: mol_type = unassigned DNA

SEQ ID NO: 20776 - DNA, 1894 bp, Homo sapiens
  misc_feature 1..1894: note = ENST00000473983
  source 1..1894: mol_type = unassigned DNA
ccggaagaccctattttcaggttctcttccctccattcctaccccttccccggtaccataaaatcccgggatatgagctggaagaggcatcacctgatcccggagacctttggagttaagaggcggcggaagcgagggcctgtggagtcggatcctcttcggggtgagccagggtcggcgcgcgcggctgtctcagaactcatgcagctgttcccgcgaggcctgtttgaggacgcgctgccgcccatcgtgctgaggagccaggtgtacagccttgtgcctgacaggaccgtggccgaccggcagctgaaggagcttcaagagcagggggagatcagaatcgtccagctgggcttcgacttggatgcccatggaattatcttcactgaggactacaggaccagagtcctcaaggcctgtgatggccgaccgtatgctggggcagtgcagaaatttctagcttcagtacttccagcctgtggggaccttagtttccagcaggaccaaatgacacagacctttggcttcagggactcagaaatcacgtgagacttgtggaaccaaccaaagtcaggcatctggtgcttccctgcctccctccagttccatccagcctgtcctcctgtttttttggtgaacctgccagaaaagctgccaaaaagctgactcttcttgttaataaaatgacccaagtttgtattcctccccacaagagaggaggcctatcttacctgggccttagaaagagccctgaaatagaattcagttcttggtggcttatcaaaagcacacaggggcctggcaggaagtgtaaaagcttgatgttaatcatactgggactaagaggatagagaatggtaggagctgggatacccctaaacattcacattaaaacaaaaaaaacccaaagctaaaaaacaactgggcaggagctaaataaaaatctaattttgagaggctgtatctggctcaggcctcctactttgtaacccatggaatatgtgaaagcatttgaaaaactatagcactgatctcacatgggcagacacactctcagagagatgtggtgggagccatggcgcagtctgcctaggcagtggcaggagcgcagaagactctgattcctctcctcggtcctaagaccgaatgtgtgtcaggacatgtggtcagggaagagaagctatttaactgaaccagtaatagtagcaggaaaagaaaaagtggagggagggcagtccaggtagggggcctggaacaagcaactgcaccaacagaggcagttggtgcgagcacagaaccaccccaggctgggattttgttatccagtctctcttgcatggttgcccgtgtttctggagacttgtgtaaacattaatggatgaggaggagagatggttctcagagcccagccctcatctctgctggcttcccactgccctcaggcatctggtgaatgctggagtcctcaccgtccgagatgctgggagctggtggctagctgtgcctggagctgggagattcatcaagtactttgttaaagggcgccaggctgtccttagcatggtccggaaggcaaagtaccgggaactgctcctatcagagctcctgggccggcgggcgcctgtcgtggtgcggcttggcctcacctaccatgtgcacgacctcattggggcccagctagtggactgcatctctaccacttcaggaaccctcctccgcctgccagagacatgaagattctgctcatcattgctcagctcctcagagtgggccgggaggggactagaagagctgcatgatggtggctgagacagggtcaccttgggaaggcttgggagccaggatgagtgtcgggctctcgtgtgtgcaaaaggtcagatgtgactgctgctgt

SEQ ID NO: 20777 - DNA, 759 bp, Homo sapiens
  misc_feature 1..759: note = ENST00000478486
  source 1..759: mol_type = unassigned DNA
attttcaggttctcttccctccattcctaccccttccccggtaccataaaatcccgggatatgagctggaagaggcatcacctgatcccggagacctttggagttaagaggcggcggaagcgagggcctgtggagtcggatcctcttcggggtgagccagggtcggcgcgcgcggctgtctcagaactcatgcagctgttcccgcgaggcctgtttgaggacgcgctgccgcccatcgtgctgaggagccaggtgtacagccttgtgcctgacaggaccgtggccgaccggcagctggtgaggggcgtcggtgcgaccgccggaagcccctttcctaactcctggaattccctgtcactcagtcactccgccagccgttcagcaagcattaggcctttcaggcgagggcactgtgccaggcactggggtgccacagagaccctgttaaaagtcccgcagaaggagcttcaagagcagggggagatcagaatcgtccagctgggcttcgacttggatgcccatggaattatcttcactgaggactacaggaccagagtcctcaaggcctgtgatggccgaccgtatgctggggcagtgcagaaatttctagcttcagtacttccagcctgtggggaccttagtttccagcaggaccaaatgacacagacctttggcttcagggactcagaaatcacgtgagacttgtggaaccaaccaaagtcaggcatctggtgcttccctgcctccctccagttccat

SEQ ID NO: 20778 - DNA, 543 bp, Homo sapiens
  misc_feature 1..543: note = ENST00000463823
  source 1..543: mol_type = unassigned DNA
attcctaccccttccccggtaccataaaatcccgggatatgagctggaagaggcatcacctgatcccggagacctttggagttaagaggcggcggaagcgagggcctgtggagtcggatcctcttcggggtgagccagaaggagcttcaagagcagggggagatcagaatcgtccagctgggcttcgacttggatgcccatggaattatcttcactgaggactacaggaccagagtcctcaaggcctgtgatggccgaccgtatgctggggcagtgcagaaatttctagcttcagtacttccagcctgtggggaccttagtttccagcaggaccaaatgacacagacctttggcttcagggactcagaaatcacgtgagacttgtggaaccaaccaaagtcaggcatctggtgcttccctgcctccctccagttccatccagcctgtcctcctgtttttttggtgaacctgccagaaaagctgccaaaaagctgactcttcttgttaataaaatgacccaagtttgtattcctccccacaaga

SEQ ID NO: 20779 - DNA, 1039 bp, Homo sapiens
  misc_feature 1..1039: note = ENST00000483801
  source 1..1039: mol_type = unassigned DNA
ccccttccccggtaccataaaatcccgggatatgagctggaagaggcatcacctgatcccggagacctttggagttaagaggcggcggaagcgagggcctgtggagtcggatcctcttcggggtgagccagaaggagcttcaagagcagggggagatcagaatcgtccagctgggcttcgacttggatgcccatggaattatcttcactgaggactacaggaccagagtcctcaaggcctgtgatggccgaccgtatgctggggcagtgcagaaatttctagcttcagtacttccagcctgtggggaccttagtttccagcaggaccaaatgacacagacctttggcttcagggactcagaaatcacgcatctggtgaatgctggagtcctcaccgtccgagatgctgggagctggtggctagctgtgcctggagctgggagattcatcaagtactttgttaaagggcgccaggctgtccttagcatggtccggaaggcaaagtaccgggaactgctcctatcagagctcctgggccggcgggcgcctgtcgtggtgcggcttggcctcacctaccatgtgcacgacctcattggggcccagctagtggactgcatctctaccacttcaggaaccctcctccgcctgccagagacatgaagattctgctcatcattgctcagctcctcagagtgggccgggaggggactagaagagctgcatgatggtggctgagacagggtcaccttgggaaggcttgggagccaggatgagtgtcgggctctcgtgtgtgcaaaaggtcagatgtgactgctgctgtttgcctggtttctgacccagtggtggggtttgagcaatgcttctctgcccttccatggaaagtggaaccagaaatggtgccaaggctgtggctgttccctttcgtgtaaaatggtgctgttattactctgtcttgaaataggaaggtgggatttctggggaggctggtgaaggagggcagggttcttttctctacgtgtcatgttaaaattgccaaataa

SEQ ID NO: 20780 - DNA, 1101 bp, Homo sapiens; identical to SEQ ID NO: 20750
  misc_feature 1..1101: note = ENST00000519179
  source 1..1101: mol_type = unassigned DNA

SEQ ID NO: 20781 - DNA, 517 bp, Homo sapiens
  misc_feature 1..517: note = ENST00000466336
  source 1..517: mol_type = unassigned DNA
ataaaatcccgggatatgagctggaagaggcatcacctgatcccggagacctttggagttaagaggcggcggaagcgagggcctgtggagtcggatcctcttcggggtgagccagggtcggcgcgcgcggctgtctcagaactcatgcagctgttcccgcgaggcctgtttgaggacgcgctgccgcccatcgtgctgaggagccaggtgtacagccttgtgcctgacaggaccgtggccgaccggcagctgaaggagcttcaagagcagggggagatcagaatcgtccagctgggcttcgacttggatgcccatggaattatcttcactgaggactacaggaccagagcatctggtgaatgctggagtcctcaccgtccgagatgctgggagctggtggctagctgtgcctggagctgggagattcatcaagtactttgttaaagggcgccaggctgtccttagcatggtccggaaggcaaagtaccgggaactgctcctatcagagctcctgggc

SEQ ID NO: 20782 - DNA, 529 bp, Homo sapiens
  misc_feature 1..529: note = ENST00000471028
  source 1..529: mol_type = unassigned DNA
ggggcctcgcttccggtagccgagagttttgttagaaccgcgtccccgccccagttccctgtccgtgagccgatttatctgcccagggtcggcgcgcgcggctgtctcagaactcatgcagctgttcccgcgaggcctgtttgaggacgcgctgccgcccatcgtgctgaggagccaggtgtacagccttgtgcctgacaggaccgtggccgaccggcagctgaaggagcttcaagagcagggggagatcagaatcgtccagctgggcttcgacttggatgcccatggaattatcttcactgaggactacaggaccagagtatgtgactgtcctcaaggcctgtgatggccgaccgtatgctggggcagtgcagaaatttctagcttcagtacttccagcctgtggggaccttagtttccagcaggaccaaatgacacagacctttggcttcagggactcagaaatcacgtgagacttgtggaaccaaccaaagtcaggcatctggtgcttccctgcctccctccagtt

SEQ ID NO: 20783 - DNA, 1128 bp, Homo sapiens; identical to SEQ ID NO: 20753
  misc_feature 1..1128: note = ENST00000491861
  source 1..1128: mol_type = unassigned DNA

SEQ ID NO: 20784 - DNA, 725 bp, Homo sapiens; identical to SEQ ID NO: 20766
  misc_feature 1..725: note = ENST00000484540
  source 1..725: mol_type = unassigned DNA

SEQ ID NO: 20785 - DNA, 1006 bp, Homo sapiens
  misc_feature 1..1006: note = ENST00000469907
  source 1..1006: mol_type = unassigned DNA
gccccagttccctgtccgtgagccgatttatctgcccagggtcggcgcgcgcggctgtctcagaactcatgcagctgttcccgcgaggcctgtttgaggacgcgctgccgcccatcgtgctgaggagccaggtgtacagccttgtgcctgacaggaccgtggccgaccggcagctggtgaggggcgtcggtgcgaccgccggaagcccctttcctaactcctggaattccctgtcactcagtcactccgccagccgttcagcaagcattaggcctttcaggcgagggcactgtgccaggcactggggtgccacagagaccctgttaaaagtcccgcagaaggagcttcaagagcagggggagatcagaatcgtccagctgggcttcgacttggatgcccatggaattatcttcactgaggactacaggaccagagtcctcaaggcctgtgatggccgaccgtatgctggggcagtgcagaaatttctagcttcagtacttccagcctgtggggaccttagtttccagcaggaccaaatgacacagacctttggcttcagggactcagaaatcacgcatctggtgaatgctggagtcctcaccgtccgagatgctgggagctggtggctagctgtgcctggagctgggagattcatcaagtactttgttaaagggcgccaggctgtccttagcatggtccggaaggcaaagtaccgggaactgctcctatcagagctcctgggccggcgggcgcctgtcgtggtgcggcttggcctcacctaccatgtgcacgacctcattggggcccagctagtggactgcatctctaccacttcaggaaccctcctccgcctgccagagacatgaagattctgctcatcattgctcagctcctcagagtgggccgggaggggactagaagagctgcatgatggtggctgagacagggtcaccttgggaaggcttgggagccaggatgagtgtcgggctctcgtgtgtgcaaaagg

SEQ ID NO: 20786 - DNA, 854 bp, Homo sapiens; identical to SEQ ID NO: 20756
  misc_feature 1..854: note = ENST00000490822
  source 1..854: mol_type = unassigned DNA

SEQ ID NO: 20787 - DNA, 1620 bp, Homo sapiens; identical to SEQ ID NO: 20746
  misc_feature 1..1620: note = ENST00000424104
  source 1..1620: mol_type = unassigned DNA

SEQ ID NO: 20788 - DNA, 1557 bp, Homo sapiens; identical to SEQ ID NO: 20747
  misc_feature 1..1557: note = ENST00000438256
  source 1..1557: mol_type = unassigned DNA

SEQ ID NO: 20789 - DNA, 1049 bp, Homo sapiens; identical to SEQ ID NO: 20751
  misc_feature 1..1049: note = ENST00000469677
  source 1..1049: mol_type = unassigned DNA

SEQ ID NO: 20790 - DNA, 988 bp, Homo sapiens; identical to SEQ ID NO: 20745
  misc_feature 1..988: note = ENST00000478011
  source 1..988: mol_type = unassigned DNA

SEQ ID NO: 20791 - DNA, 2131 bp, Homo sapiens; identical to SEQ ID NO: 20748
  misc_feature 1..2131: note = ENST00000460069
  source 1..2131: mol_type = unassigned DNA

SEQ ID NO: 20792 - DNA, 682 bp, Homo sapiens; identical to SEQ ID NO: 20749
  misc_feature 1..682: note = ENST00000464830
  source 1..682: mol_type = unassigned DNA

SEQ ID NO: 20793 - DNA, 919 bp, Homo sapiens; identical to SEQ ID NO: 20752
  misc_feature 1..919: note = ENST00000472631
  source 1..919: mol_type = unassigned DNA

SEQ ID NO: 20794 - DNA, 1128 bp, Homo sapiens; identical to SEQ ID NO: 20753
  misc_feature 1..1128: note = ENST00000493840
  source 1..1128: mol_type = unassigned DNA

SEQ ID NO: 20795 - DNA, 725 bp, Homo sapiens; identical to SEQ ID NO: 20754
  misc_feature 1..725: note = ENST00000486636
  source 1..725: mol_type = unassigned DNA

SEQ ID NO: 20796 - DNA, 820 bp, Homo sapiens; identical to SEQ ID NO: 20755
  misc_feature 1..820: note = ENST00000491132
  source 1..820: mol_type = unassigned DNA

SEQ ID NO: 20797 - DNA, 854 bp, Homo sapiens; identical to SEQ ID NO: 20756
  misc_feature 1..854: note = ENST00000468547
  source 1..854: mol_type = unassigned DNA

SEQ ID NO: 20798 - DNA, 1804 bp, Homo sapiens; identical to SEQ ID NO: 20757
  misc_feature 1..1804: note = ENST00000550656
  source 1..1804: mol_type = unassigned DNA

SEQ ID NO: 20799 - DNA, 988 bp, Homo sapiens; identical to SEQ ID NO: 20745
  misc_feature 1..988: note = ENST00000478304
  source 1..988: mol_type = unassigned DNA

SEQ ID NO: 20800 - DNA, 1620 bp, Homo sapiens
  misc_feature 1..1620: note = ENST00000383328
  source 1..1620: mol_type = unassigned DNA
gtcctccaaatgcagtgaggttaggaaggacgtctgcgctcagatcaagaatccagttacctcaaagctccccaacttccacctccgcagagctatgacgtcatggcaggcacgccagaggccgaaggatgcaaaagtggttttctgctttcgatgatgcaatcattcagcgacagtggcgggcaaacccctcccggggcgggggaggtgtgagcttcacgaaggaggttgacaccaacgtggccaccggcgcccctccacgccgccaacgagtccccgggcgtgcgtgcccttggagggagccaatccgcggccggcgtggggcccggcctggcggaggtgatgctggagggacgcccggggagaccgtacgtcactgctctgcgccggaagaccctattttcaggttctcttccctccattcctaccccttccccggtaccataaaatcccgggatatgagctggaagaggcatcacctgatcccggagacctttggagttaagaggcggcggaagcgagggcctgtggagtcggatcctcttcggggtgagccagggtcggcgcgcgcggctgtctcagaactcatgcagctgttcccgcgaggcctgtttgaggacgcgctgccgcccatcgtgctgaggagccaggtgtacagccttgtgcctgacaggaccgtggccgaccggcagctgaaggagcttcaagagcagggggagatcagaatcgtccagctgggcttcgacttggatgcccatggaattatcttcactgaggactacaggaccagagtcctcaaggcctgtgatggccgaccgtatgctggggcagtgcagaaatttctagcttcagtacttccagcctgtggggaccttagtttccagcaggaccaaatgacacagacctttggcttcagggactcagaaatcacgcatctggtgaatgctggagtcctcaccgtccgagatgctgggagctggtggctagctgtgcctggagctgggagattcatcaagtactttgttaaagggcgccaggctgtccttggcatggtccggaaggcaaagtaccgggaactgctcctatcagagctcctgggccggcgggcgcctgtcgtggtgcggcttggcctcacctaccatgtgcacgacctcattggggcccagctagtggactgcatctctaccacttcaggaaccctcctccgcctgccagagacatgaagattctgctcatcattgctcagctcctcagagtgggccgggaggggactagaagagctgcatgatggtggctgagacagggtcaccttgggaaggcttgggagccaggatgagtgtcgggctctcgtgtgtgcaaaaggtcagatgtgactgctgctgtttgcctggtttctgacccagtggtggggtttgagcaatgcttctctgcccttccatggaaagtggaaccagaaatggtgccaaggctgtggctgttccctttcgtgtaaaatggtgctgttattactctgtcttgaaataggaaggtgggatttctggggaggctggtgaaggagggcagggttcttttctctacgtgtcatgttaaaattgccaaataaagtacctctgcctgtga

SEQ ID NO: 20801 - DNA, 1557 bp, Homo sapiens
  misc_feature 1..1557: note = ENST00000383327
  source 1..1557: mol_type = unassigned DNA
cttccacctccgcagagctatgacgtcatggcaggcacgccagaggccgaaggatgcaaaagtggttttctgctttcgatgatgcaatcattcagcgacagtggcgggcaaacccctcccggggcgggggaggtgtgagcttcacgaaggaggttgacaccaacgtggccaccggcgcccctccacgccgccaacgagtccccgggcgtgcgtgcccttggagggagccaatccgcggccggcgtggggcccggcctggcggaggtgatgctggagggacgcccggggagaccgtacgtcactgctctgcgccggaagaccctattttcaggttctcttccctccattcctaccccttccccggtaccataaaatcccgggatatgagctggaagaggcatcacctgatcccggagacctttggagttaagaggcggcggaagcgagggcctgtggagtcggatcctcttcggggtgagccagggtcggcgcgcgcggctgtctcagaactcatgcagctgttcccgcgaggcctgtttgaggacgcgctgccgcccatcgtgctgaggagccaggtgtacagccttgtgcctgacaggaccgtggccgaccggcagctgaaggagcttcaagagcagggggagatcagaatcgtccagctgggcttcgacttggatgcccatggaattatcttcactgaggactacaggaccagagtatgtgactgtgtcctcaaggcctgtgatggccgaccgtatgctggggcagtgcagaaatttctagcttcagtacttccagcctgtggggaccttagtttccagcaggaccaaatgacacagacctttggcttcagggactcagaaatcacgcatctggtgaatgctggagtcctcaccgtccgagatgctgggagctggtggctagctgtgcctggagctgggagattcatcaagtactttgttaaagggcgccaggctgtccttggcatggtccggaaggcaaagtaccgggaactgctcctatcagagctcctgggccggcgggcgcctgtcgtggtgcggcttggcctcacctaccatgtgcacgacctcattggggcccagctagtggactgcatctctaccacttcaggaaccctcctccgcctgccagagacatgaagattctgctcatcattgctcagctcctcagagtgggccgggaggggactagaagagctgcatgatggtggctgagacagggtcaccttgggaaggcttgggagccaggatgagtgtcgggctctcgtgtgtgcaaaaggtcagatgtgactgctgctgtttgcctggtttctgacccagtggtggggtttgagcaatgcttctctgcccttccatggaaagtggaaccagaaatggtgccaaggctgtggctgttccctttcgtgtaaaatggtgctgttattactctgtcttgaaataggaaggtgggatttctggggaggctggtgaaggagggcagggttcttttctctacgtgtcatgttaaaattgccaaataaagtacctctgcctgtga

SEQ ID NO: 20802 - DNA, 2131 bp, Homo sapiens
  misc_feature 1..2131: note = ENST00000497879
  source 1..2131: mol_type = unassigned DNA
ccggaagaccctattttcaggttctcttccctccattcctaccccttccccggtaccataaaatcccgggatatgagctggaagaggcatcacctgatcccggagacctttggagttaagaggcggcggaagcgagggcctgtggagtcggatcctcttcggggtgagccagggtcggcgcgcgcggctgtctcagaactcatgcagctgttcccgcgaggcctgtttgaggacgcgctgccgcccatcgtgctgaggagccaggtgtacagccttgtgcctgacaggaccgtggccgaccggcagctgaaggagcttcaagagcagggggagatcagaatcgtccagctgggcttcgacttggatgcccatggaattatcttcactgaggactacaggaccagagtcctcaaggcctgtgatggccgaccgtatgctggggcagtgcagaaatttctagcttcagtacttccagcctgtggggaccttagtttccagcaggaccaaatgacacagacctttggcttcagggactcagaaatcacgtgagacttgtggaaccaaccaaagtcaggcatctggtgcttccctgcctccctccagttccatccagcctgtcctcctgtttttttggtgaacctgccagaaaagctgccaaaaagctgactcttctttttaataaaatgacccaagtttgtattcctccccacaagagaggaggcctatcttacctgggccttagaaagagccctgaaatagaattcagttcttggtggcttatcaaaagcacacaggggcctggcaggaagtgtaaaagcttgatgttaatcatactgggactaagaggatagagaatggtaggagctgggatacccctaaacattcacattaaaacaaaaaaaacccaaagctaaaaaacaactgggcaggagctaaataaaaatctaattttgagaggctgtatctggctcaggcctcctactttgtaacccatggaatatgtgaaagcatttgaaaaactatagcactgatctcacatgggcagacacactctcagagagatgtggtgggagccatggcgcagtctgcctaggcagtggcaggagcgcagaagactctgattcctctcctcggtcctaagaccgaatgtgtgtcaggacatgtggtcagggaagagaagctatttaactgaaccagtaatagtagcaggaaaagaaaaagtggagggagggcagtccaggtagggggcctggaacaagcaactgcaccaacagaggcagttggtgcgagcacagaaccaccccaggctgggattttgttatccagtctctcttgcatggttgcccgtgtttctggagacttgtgtaaacattaatggatgaggaggagagatggttctcagagcccagccctcatctctgctggcttcccactgccctcaggcatctggtgaatgctggagtcctcaccgtccgagatgctgggagctggtggctagctgtgcctggagctgggagattcatcaagtactttgttaaagggcgccaggctgtccttggcatggtccggaaggcaaagtaccgggaactgctcctatcagagctcctgggccggcgggcgcctgtcgtggtgcggcttggcctcacctaccatgtgcacgacctcattggggcccagctagtggactgcatctctaccacttcaggaaccctcctccgcctgccagagacatgaagattctgctcatcattgctcagctcctcagagtgggccgggaggggactagaagagctgcatgatggtggctgagacagggtcaccttgggaaggcttgggagccaggatgagtgtcgggctctcgtgtgtgcaaaaggtcagatgtgactgctgctgtttgcctggtttctgacccagtggtggggtttgagcaatgcttctctgcccttccatggaaagtggaaccagaaatggtgccaaggctgtggctgttccctttcgtgtaaaatggtgctgttattactctgtcttgaaataggaaggtgggatttctggggaggctggtgaaggagggcagggttcttttctctacgtgtcatgttaaaattgccaaataaagtacctctgcctgtga

SEQ ID NO: 20803 - DNA, 682 bp, Homo sapiens; identical to SEQ ID NO: 20749
  misc_feature 1..682: note = ENST00000469629
  source 1..682: mol_type = unassigned DNA

SEQ ID NO: 20804 - DNA, 1049 bp, Homo sapiens
  misc_feature 1..1049: note = ENST00000481181
  source 1..1049: mol_type = unassigned DNA
cccggtaccataaaatcccgggatatgagctggaagaggcatcacctgatcccggagacctttggagttaagaggcggcggaagcgagggcctgtggagtcggatcctcttcggggtgagccagaaggagcttcaagagcagggggagatcagaatcgtccagctgggcttcgacttggatgcccatggaattatcttcactgaggactacaggaccagagtcctcaaggcctgtgatggccgaccgtatgctggggcagtgcagaaatttctagcttcagtacttccagcctgtggggaccttagtttccagcaggaccaaatgacacagacctttggcttcagggactcagaaatcacgcatctggtgaatgctggagtcctcaccgtccgagatgctgggagctggtggctagctgtgcctggagctgggagattcatcaagtactttgttaaagggcgccaggctgtccttggcatggtccggaaggcaaagtaccgggaactgctcctatcagagctcctgggccggcgggcgcctgtcgtggtgcggcttggcctcacctaccatgtgcacgacctcattggggcccagctagtggactgcatctctaccacttcaggaaccctcctccgcctgccagagacatgaagattctgctcatcattgctcagctcctcagagtgggccgggaggggactagaagagctgcatgatggtggctgagacagggtcaccttgggaaggcttgggagccaggatgagtgtcgggctctcgtgtgtgcaaaaggtcagatgtgactgctgctgtttgcctggtttctgacccagtggtggggtttgagcaatgcttctctgcccttccatggaaagtggaaccagaaatggtgccaaggctgtggctgttccctttcgtgtaaaatggtgctgttattactctgtcttgaaataggaaggtgggatttctggggaggctggtgaaggagggcagggttcttttctctacgtgtcatgttaaaattgccaaataaagtacctctgcctgtga

SEQ ID NO: 20805 - DNA, 919 bp, Homo sapiens; identical to SEQ ID NO: 20752
  misc_feature 1..919: note = ENST00000468702
  source 1..919: mol_type = unassigned DNA

SEQ ID NO: 20806 - DNA, 1128 bp, Homo sapiens
  misc_feature 1..1128: note = ENST00000490657
  source 1..1128: mol_type = unassigned DNA
cgagagttttgttagaaccgcgtccccgccccagttccctgtccgtgagccgatttatctgcccagggtcggcgcgcgcggctgtctcagaactcatgcagctgttcccgcgaggcctgtttgaggacgcgctgccgcccatcgtgctgaggagccaggtgtacagccttgtgcctgacaggaccgtggccgaccggcagctgaaggagcttcaagagcagggggagatcagaatcgtccagctgggcttcgacttggatgcccatggaattatcttcactgaggactacaggaccagagtcctcaaggcctgtgatggccgaccgtatgctggggcagtgcagaaatttctagcttcagtacttccagcctgtggggaccttagtttccagcaggaccaaatgacacagacctttggcttcagggactcagaaatcacgcatctggtgaatgctggagtcctcaccgtccgagatgctgggagctggtggctagctgtgcctggagctgggagattcatcaagtactttgttaaagggcgccaggctgtccttggcatggtccggaaggcaaagtaccgggaactgctcctatcagagctcctgggccggcgggcgcctgtcgtggtgcggcttggcctcacctaccatgtgcacgacctcattggggcccagctagtggactgcatctctaccacttcaggaaccctcctccgcctgccagagacatgaagattctgctcatcattgctcagctcctcagagtgggccgggaggggactagaagagctgcatgatggtggctgagacagggtcaccttgggaaggcttgggagccaggatgagtgtcgggctctcgtgtgtgcaaaaggtcagatgtgactgctgctgtttgcctggtttctgacccagtggtggggtttgagcaatgcttctctgcccttccatggaaagtggaaccagaaatggtgccaaggctgtggctgttccctttcgtgtaaaatggtgctgttattactctgtcttgaaataggaaggtgggatttctggggaggctggtgaaggagggcagggttcttttctctacgtgtcatgttaaaattgccaaataaagtacctctgcctgtga

SEQ ID NO: 20807 - DNA, 725 bp, Homo sapiens; identical to SEQ ID NO: 20754
  misc_feature 1..725: note = ENST00000465945
  source 1..725: mol_type = unassigned DNA

SEQ ID NO: 20808 - DNA, 820 bp, Homo sapiens
  misc_feature 1..820: note = ENST00000460304
  source 1..820: mol_type = unassigned DNA
gccccagttccctgtccgtgagccgatttatctgcccagggtcggcgcgcgcggctgtctcagaactcatgcagctgttcccgcgaggcctgtttgaggacgcgctgccgcccatcgtgctgaggagccaggtgtacagccttgtgcctgacaggaccgtggccgaccggcagctggtgaggggcgtcggtgcgaccgccggaagcccctttcctaactcctggaattccctgtcactcagtcactccgccagccgttcagcaagcattaggcctttcaggcgagggcactgtgccaggcactggggtgccacagagaccctgttaaaagtcccgcagaaggagcttcaagagcagggggagatcagaatcgtccagctgggcttcgacttggatgcccatggaattatcttcactgaggactacaggaccagagtcctcaaggcctgtgatggccgaccgtatgctggggcagtgcagaaatttctagcttcagtacttccagcctgtggggaccttagtttccagcaggaccaaatgacacagacctttggcttcagggactcagaaatcacgcatctggtgaatgctggagtcctcaccgtccgagatgctgggagctggtggctagctgtgcctggagctgggagattcatcaagtactttgttaaagggcgccaggctgtccttggcatggtccggaaggcaaagtaccgggaactgctcctatcagagctcctgggccggcgggcgcctgtcgtggtgcggcttggcctcacctaccatgtgcacgacctcattggggcccagctagtggactg

SEQ ID NO: 20809 - DNA, 854 bp, Homo sapiens
  misc_feature 1..854: note = ENST00000469343
  source 1..854: mol_type = unassigned DNA
ggaggagagatggttctcagagcccagccctcatctctgctggcttcccactgccctcaggcatctggtgaatgctggagtcctcaccgtccgagatgctgggagctggtggctagctgtgcctggagctgggagattcatcaagtactttgttaaaggtatcccatctgcagctcaagcctgcagcccctcaccttttggtggctcctcaggcctctaggccttattcacctttcccctttcctgtgccacttctcctctagggcgccaggctgtccttggcatggtccggaaggcaaagtaccgggaactgctcctatcagagctcctgggccggcgggcgcctgtcgtggtgcggcttggcctcacctaccatgtgcacgacctcattggggcccagctagtggactgcatctctaccacttcaggaaccctcctccgcctgccagagacatgaagattctgctcatcattgctcagctcctcagagtgggccgggaggggactagaagagctgcatgatggtggctgagacagggtcaccttgggaaggcttgggagccaggatgagtgtcgggctctcgtgtgtgcaaaaggtcagatgtgactgctgctgtttgcctggtttctgacccagtggtggggtttgagcaatgcttctctgcccttccatggaaagtggaaccagaaatggtgccaaggctgtggctgttccctttcgtgtaaaatggtgctgttattactctgtcttgaaataggaaggtgggatttctggggaggctggtgaaggagggcagggttcttttctctacgtgtcatgttaaaattgccaaataaagtacctctgcctgtga

SEQ ID NO: 20810 - DNA, 1804 bp, Homo sapiens
  misc_feature 1..1804: note = ENST00000547578
  source 1..1804: mol_type = unassigned DNA
gtctgacacaagcattagtgagatgctcccctcgaagaatagtcttgtttcttctaaggactgattctcaccccggctttggctctcctaattttagagggtcctccaaatgcagtgaggttaggaaggacgtctgcgctcagatcaagaatccagttacctcaaagctccccaacttccacctccgcagagctatgacgtcatggcaggcacgccagaggccgaaggatgcaaaagtggttttctgctttcgatgatgcaatcattcagcgacagtggcgggcaaacccctcccggggcgggggaggtgtgagcttcacgaaggaggttgacaccaacgtggccaccggcgcccctccacgccgccaacgagtccccgggcgtgcgtgcccttggagggagccaatccgcggccggcgtggggcccggcctggcggaggtgatgctggtatgtgcgtcgccaccgcccctcccagcactgacgggcctgagggacgacaagttgacgctcctttcgtcatcacctggtctaggagggacgcccggggagaccgtacgtcactgctctgcgccggaagaccctattttcaggttctcttccctccattcctaccccttccccggtaccataaaatcccgggatatgagctggaagaggcatcacctgatcccggagacctttggagttaagaggcggcggaagcgagggcctgtggagtcggatcctcttcggggtgagccagggtcggcgcgcgcggctgtctcagaactcatgcagctgttcccgcgaggcctgtttgaggacgcgctgccgcccatcgtgctgaggagccaggtgtacagccttgtgcctgacaggaccgtggccgaccggcagctgaaggagcttcaagagcagggggagatcagaatcgtccagctgggcttcgacttggatgcccatggaattatcttcactgaggactacaggaccagagtcctcaaggcctgtgatggccgaccgtatgctggggcagtgcagaaatttctagcttcagtacttccagcctgtggggaccttagtttccagcaggaccaaatgacacagacctttggcttcagggactcagaaatcacgcatctggtgaatgctggagtcctcaccgtccgagatgctgggagctggtggctagctgtgcctggagctgggagattcatcaagtactttgttaaagggcgccaggctgtccttggcatggtccggaaggcaaagtaccgggaactgctcctatcagagctcctgggccggcgggcgcctgtcgtggtgcggcttggcctcacctaccatgtgcacgacctcattggggcccagctagtggactgcatctctaccacttcaggaaccctcctccgcctgccagagacatgaagattctgctcatcattgctcagctcctcagagtgggccgggaggggactagaagagctgcatgatggtggctgagacagggtcaccttgggaaggcttgggagccaggatgagtgtcgggctctcgtgtgtgcaaaaggtcagatgtgactgctgctgtttgcctggtttctgacccagtggtggggtttgagcaatgcttctctgcccttccatggaaagtggaaccagaaatggtgccaaggctgtggctgttccctttcgtgtaaaatggtgctgttattactctgtcttgaaataggaaggtgggatttctggggaggctggtgaaggagggcagggttcttttctctacgtgtcatgttaaaattgccaaataaagtacctctgcctgtg

SEQ ID NO: 20811 - DNA, 988 bp, Homo sapiens; identical to SEQ ID NO: 20745
  misc_feature 1..988: note = ENST00000496606
  source 1..988: mol_type = unassigned DNA

SEQ ID NO: 20812 - DNA, 1620 bp, Homo sapiens; identical to SEQ ID NO: 20746
  misc_feature 1..1620: note = ENST00000444147
  source 1..1620: mol_type = unassigned DNA

SEQ ID NO: 20813 - DNA, 1557 bp, Homo sapiens; identical to SEQ ID NO: 20747
  misc_feature 1..1557: note = ENST00000431383
  source 1..1557: mol_type = unassigned DNA

SEQ ID NO: 20814 - DNA, 2131 bp, Homo sapiens; identical to SEQ ID NO: 20748
  misc_feature 1..2131: note = ENST00000481637
  source 1..2131: mol_type = unassigned DNA

SEQ ID NO: 20815 - DNA, 682 bp, Homo sapiens; identical to SEQ ID NO: 20749
  misc_feature 1..682: note = ENST00000478362
  source 1..682: mol_type = unassigned DNA

SEQ ID NO: 20816 - DNA, 798 bp, Homo sapiens
  misc_feature 1..798: note = ENST00000523972
  source 1..798: mol_type = unassigned DNA
ccccttccccggtaccataaaatcccgggatatgagctggaagaggcatcacctgatcccggagacctttggagttaagaggcggcggaagcgagggcctgtggagtcggatcctcttcggggtgagccagaaggagcttcaagagcagggggagatcagaatcgtccagctgggcttcgacttggatgcccatggaattatcttcactgaggactacaggaccagagtcctcaaggcctgtgatggccgaccgtatgctggggcagtgcagaaatttctagcttcagtacttccagcctgtggggaccttagtttccagcaggaccaaatgacacagacctttggcttcagggactcagaaatcacgcatctggtgaatgctggagtcctcaccgtccgagatgctgggagctggtggctagctgtgcctggagctgggagattcatcaagtactttgttaaagggcgccaggctgtccttagcatggtccggaaggcaaagtaccgggaactgctcctatcagagctcctgggccggcgggcgcctgtcgtggtgcggcttggcctcacctaccatgtgcacgacctcattggggcccagctagtggactgcatctctaccacttcaggaaccctcctccgcctgccagagacatgaagattctgctcatcattgctcagctcctcagagtgggccgggaggggactagaagagctgcatgatggtggctgagacagggtcaccttgggaaggcttgggagccaggatgagtgtcgggctctcgtgtgtgcaaaag

SEQ ID NO: 20817 - DNA, 1049 bp, Homo sapiens; identical to SEQ ID NO: 20751
  misc_feature 1..1049: note = ENST00000472138
  source 1..1049: mol_type = unassigned DNA

SEQ ID NO: 20818 - DNA, 919 bp, Homo sapiens; identical to SEQ ID NO: 20752
  misc_feature 1..919: note = ENST00000480096
  source 1..919: mol_type = unassigned DNA

SEQ ID NO: 20819 - DNA, 1128 bp, Homo sapiens; identical to SEQ ID NO: 20753
  misc_feature 1..1128: note = ENST00000465050
  source 1..1128: mol_type = unassigned DNA

SEQ ID NO: 20820 - DNA, 725 bp, Homo sapiens; identical to SEQ ID NO: 20754
  misc_feature 1..725: note = ENST00000465734
  source 1..725: mol_type = unassigned DNA

SEQ ID NO: 20821 - DNA, 820 bp, Homo sapiens; identical to SEQ ID NO: 20755
  misc_feature 1..820: note = ENST00000480672
  source 1..820: mol_type = unassigned DNA

SEQ ID NO: 20822 - DNA, 854 bp, Homo sapiens; identical to SEQ ID NO: 20756
  misc_feature 1..854: note = ENST00000463291
  source 1..854: mol_type = unassigned DNA

SEQ ID NO: 20823 - DNA, 1804 bp, Homo sapiens; identical to SEQ ID NO: 20757
  misc_feature 1..1804: note = ENST00000549916
  source 1..1804: mol_type = unassigned DNA

SEQ ID NO: 20824 - DNA, 594 bp, Homo sapiens
  misc_feature 1..594: note = ENST00000517832
  source 1..594: mol_type = unassigned DNA
ttacctaaggaaatgcaacctcaccacaagtacaaagaccatctttcatggactactttgataagcaagacttcaagaataagagtcacgaaaactgtaatcagaacatgcatgaacccttccctatgtccaaaaacgtttttcctgataactggaaagttcctcaagatggagactttgactttatagagccttactgggcccgtgcagattttccacttcctcggctgtggcccttggcatctgcggttatattcaacaggagcaccaacggtggccaagaagtcactaggatggtggctaaaggggaggagctgagctacaccccacttgatggaacgcaaagactgtggtgaggttggagagcagtgctgtgcgtccttcctcagccttaacgagtgcggggcaaggttaacacagatttctacacccttttgctgcatacacagacgaggccacctgcagatgccaccactgctcagtgaatcagcagaagccttggaaagccttgtgagttccacaggacacagaattgcttgagcttgagccaaattgtctctgttatccattgctacattaaaaaaacacttcaaa

SEQ ID NO: 20825 - DNA, 2826 bp, Homo sapiens
  misc_feature 1..2826: note = ENST00000419617
  source 1..2826: mol_type = unassigned DNA
ccgcggagttacgggaaagttggtccgagttcccagagtttccctctgtggtgccctaggctcggccggccggtgccccggctcctttcctcctttcggccttcgccgtccaccaggtccctctctctgtccccggccgccatggagcagccgccggcgcctaagagtaaactaaaaaagctgagtgaagacagtttgactaagcagcctgaagaagtttttgatgtattagagaagcttggagaagggtcttatggaagtgtatttaaagcaatacacaaggaatccggtcaagttgtcgcaattaaacaagtacctgttgaatcagatcttcaggaaataatcaaagaaatttccataatgcagcaatgtgacagcccatatgttgtaaagtactatggcagttattttaagaatacagacctctggattgttatggagtactgtggcgctggctctgtctcagacataattagattacgaaacaagacattaatagaagatgaaattgcaaccattcttaaatctacattgaaaggactagaatatttgcactttatgagaaaaatacacagagatataaaagctggaaatattctcctcaatacagaaggacatgcaaaattggcagattttggagtggctggtcagttaacagatacaatggcaaaacgcaatactgtaataggaactccattttggatggctcctgaggtgattcaagaaataggctataactgtgtggccgacatctggtcccttggcattacttctatagaaatggctgaaggaaaacctccttatgctgatatacatccaatgagggctatttttatgattcccacaaatccaccaccaacattcagaaagccagaactttggtccgatgatttcaccgattttgttaaaaagtgtttggtgaagaatcctgagcagagagctactgcaacacaacttttacagcatccttttatcaagaatgccaaacctgtatcaatattaagagacctgatcacagaagctatggagatcaaagctaaaagacatgaggaacagcaacgagaattggaagaggaagaagaaaattcggatgaagatgagctggattcccacaccatggtgaagactagtgtggagagtgtgggcaccatgcgggccacaagcacgatgagtgaaggggcccagaccatgattgaacataatagcacgatgttggaatccgacttggggaccatggtgataaacagtgaggatgaggaagaagaagatggaactatgaaaagaaatgcaacctcaccacaagtacaaagaccatctttcatggactactttgataagcaagacttcaagaataagagtcacgaaaactgtaatcagaacatgcatgaacccttccctatgtccaaaaacgtttttcctgataactggaaagttcctcaagatggagactttgactttttgaaaaatctaagtttagaagaactacagatgcggttaaaagcactggaccccatgatggaacgggagatagaagaacttcgtcagagatacactgcgaaaagacagcccattctggatgcgatggatgcaaagaaaagaaggcagcaaaacttttgagtctaatttcctctctgtttttaactattctggagaccaagaaaccactaggaattgaaggaatatttggatatttttaatcctaagattttgccctacaattaggcagaggtcaaaaagtgacaatggtacatgcccaggtaaattcccaaaaggcagaattgacagttgtatctgctgtgcattcactctaagatgaggagaacaaaagaagtgtattctcttgttctgtcagctgcataccagtaataaaactgttatgaaatggattttcaaggtctctaaaccttgaaaatccaaagctattgttgcattgtacagcactgaagggctttatgttacaatattctttattcctatctagtatactaggctatttattgtatccccttaggtaaacttatttatttatgctattttgctttgtttcattttttaaggacaagatcaggatagctttggtgaaggtagggtcatattaatatgatgataatgtgcaaccaatttatactttctgcagggagctatggggtacattccttgatttccaggatagtttttcaaataggaaagcaataatggcagtagttctcaaatgggctaggccttttttatattgaagcaataattccatttttaccctttgaaattttgtttttttgatttttgatgtttggtacaaatagaactatatatatttaggtaaaatagatctatcgtgtttaaaaccaaagaaatcaatggaacccttgcacaaaaaagtgtgataaatatttttaaataaaaacttaatacaaatgtaatttgttaatattgtttcatgttttatgtgtagatctaatagctgaactgattcaaactgtaataagctcatcaatttcatttctatgaaaatgtgctctgttgtcacaggatgtttctgttgattttattcatttcctgggaattggtaaacatcatgttcctgatgataacccagtagcaaaaacatttgtactgagtggtacaagccttggggactgaaaaaaaaaagattaaaaccattaaaaagaaactcatttttacgctgaatgaacatttatatgattgcattgggaccagtcatttcctaagctacatatggccatcttgacagtgttttttcttttgtgtgtttaattattatgtgtaaatcataaagacaaataaatttcactgtgccacccagca

SEQ ID NO: 20826 - DNA, 3107 bp, Homo sapiens
  misc_feature 1..3107: note = ENST00000523601
  source 1..3107: mol_type = unassigned DNA
gtgcagaaccgtttggttttcccgaggggtaggcagaatttccaaccccacgagctgctccctctttccgcaaacctcctaaccccggggtttttccataaatgtgtttacttcgtccacgccagcctgcgaagttccaaaatggagtctgggccacgccggcgttctgggcacgactacggtctcttgaaaagatttggaattgaccatgtagataatctctgagagcagttcttaaagtgtaatccagaaccggtggaacttgctagaaacgcatattcttcggaccccctccaaatctgctgaatctgagattgtggaggccattcaatgtcccttcttcaggaatttggaaaaaggatggagagatctctctgagctagactcttcagtggaggaaatgttacaactcatggacagtggcattaccatctgccttaggaacggagcagcctctgtcttcaagaaaaaagaatggagcacacaaggagaagaaaacaagcaagacagtaaactaaaaaagctgagtgaagacagtttgactaagcagcctgaagaagtttttgatgtattagagaagcttggagaagggtcttatggaagtgtatttaaagcaatacacaaggaatccggtcaagttgtcgcaattaaacaagtacctgttgaatcagatcttcaggaaataatcaaagaaatttccataatgcagcaatgtgacagcccatatgttgtaaagtactatggcagttattttaagaatacagacctctggattgttatggagtactgtggcgctggctctgtctcagacataattagattacgaaacaagacattaatagaagatgaaattgcaaccattcttaaatctacattgaaaggactagaatatttgcactttatgagaaaaatacacagagatataaaagctggaaatattctcctcaatacagaaggacatgcaaaattggcagattttggagtggctggtcagttaacagatacaatggcaaaacgcaatactgtaataggaactccattttggatggctcctgaggtgattcaagaaataggctataactgtgtggccgacatctggtcccttggcattacttctatagaaatggctgaaggaaaacctccttatgctgatatacatccaatgagggctatttttatgattcccacaaatccaccaccaacattcagaaagccagaactttggtccgatgatttcaccgattttgttaaaaagtgtttggtgaagaatcctgagcagagagctactgcaacacaacttttacagcatccttttatcaagaatgccaaacctgtatcaatattaagagacctgatcacagaagctatggagatcaaagctaaaagacatgaggaacagcaacgagaattggaagaggaagaagaaaattcggatgaagatgagctggattcccacaccatggtgaagactagtgtggagagtgtgggcaccatgcgggccacaagcacgatgagtgaaggggcccagaccatgattgaacataatagcacgatgttggaatccgacttggggaccatggtgataaacagtgaggatgaggaagaagaagatggaactatgaaaagaaatgcaacctcaccacaagtacaaagaccatctttcatggactactttgataagcaagacttcaagaataagagtcacgaaaactgtaatcagaacatgcatgaacccttccctatgtccaaaaacgtttttcctgataactggaaagttcctcaagatggagactttgactttttgaaaaatctaagtttagaagaactacagatgcggttaaaagcactggaccccatgatggaacgggagatagaagaacttcgtcagagatacactgcgaaaagacagcccattctggatgcgatggatgcaaagaaaagaaggcagcaaaacttttgagtctaatttcctctctgtttttaactattctggagaccaagaaaccactaggaattgaaggaatatttggatatttttaatcctaagattttgccctacaattaggcagaggtcaaaaagtgacaatggtacatgcccaggtaaattcccaaaaggcagaattgacagttgtatctgctgtgcattcactctaagatgaggagaacaaaagaagtgtattctcttgttctgtcagctgcataccagtaataaaactgttatgaaatggattttcaaggtctctaaaccttgaaaatccaaagctattgttgcattgtacagcactgaagggctttatgttacaatattctttattcctatctagtatactaggctatttattgtatccccttaggtaaacttatttatttatgctattttgctttgtttcattttttaaggacaagatcaggatagctttggtgaaggtagggtcatattaatatgatgataatgtgcaaccaatttatactttctgcagggagctatggggtacattccttgatttccaggatagtttttcaaataggaaagcaataatggcagtagttctcaaatgggctaggccttttttatattgaagcaataattccatttttaccctttgaaattttgtttttttgatttttgatgtttggtacaaatagaactatatatatttaggtaaaatagatctatcgtgtttaaaaccaaagaaatcaatggaacccttgcacaaaaaagtgtgataaatatttttaaataaaaacttaatacaaatgtaatttgttaatattgtttcatgttttatgtgtagatctaatagctgaactgattcaaactgtaataagctcatcaatttcatttctatgaaaatgtgctctgttgtcacaggatgtttctgttgattttattcatttcctgggaattggtaaacatcatgttcctgatgataacccagtagcaaaaacatttgtactgagtggtacaagccttggggactgaaaaaaaaaagattaaaaccattaaaaagaaactcatttttacgctgaatgaacatttatatgattgcattgggaccagtcatttcctaagctacatatggccatcttgacagtgttttttcttt

SEQ ID NO: 20827 - DNA, 697 bp, Homo sapiens
  misc_feature 1..697: note = ENST00000520440
  source 1..697: mol_type = unassigned DNA
ggatgaagatgagctggattcccacaccatggtgaagactagtgtggagagtgtgggcaccatgcgggccacaagcacgatgagtgaaggggcccagaccatgattgaacataatagcacgatgttggaatccgacttggggaccatggtgataaacagtgaggatgaggaagaagaagatggaactatgaaaagaaatgcaacctcaccacaagtacaaagaccatctttcatggactactttgataagcaagacttcaagaataagagtcacgaaaactgtaatcagaacatgcatgaacccttccctatgtccaaaaacgtttttcctgataactggaaagttcctcaagatggagactttgactttgtaagtacattttaattcttcaatttatgttttctccttctatattttatcatcaaattgagaagcatagttcatatgtatatgaactgtgtgtatgtatatacaattatagaccatatgttaatattcattatacagccatatacatggttagagaaattgtgaaactgtagcttgcttatagaaatgtacttgcagagaaatacttttttatagttaaataaatcatagctcaaatttaaataaatattcaggactccttaaaactaaaatgacaactattttaaaagatgttttcaataatgcaaatatgagatacttctgaca

SEQ ID NO: 20828 - DNA, 725 bp, Homo sapiens
  misc_feature 1..725: note = ENST00000518582
  source 1..725: mol_type = unassigned DNA
agttgatcacatcagctcctgaggcttctgcattcttcacgtagttctcgagccttggctttcagctccatcagctcctttaagcacttctctatattggttattctagttatacattcgtctaaatttttttgaaagttttcaacttctttgcctttggtttgaatttcctcctgtagctcagagtagtttgatcgtctgaagccttcttctctcaactcgtcaaagtcattctccgtccagctttgttccgttgctggctatttttatgattcccacaaatccaccaccaacattcagaaagccagaactttggtccgatgatttcaccgattttgttaaaaagtgtttggtgaagaatcctgagcagagagctactgcaacacaacttttacagcatccttttatcaagaatgccaaacctgtatcaatattaagagacctgatcacagaagctatggagatcaaagctaaaagacatgaggaacagcaacgagaattggaagaggaagaagaaaattcggatgaagatgagctggattcccacaccatggtgaagactagtgtggagagtgtgggcaccatgcgggccacaagcacgatgagtgaaggggcccagaccatgattgaacataatagcacgatgttggaatccgacttggggaccatggtgataaacagtgaggatgaggaagaagaagatggaactatgaaaagtatgtggc

SEQ ID NO: 20829 - DNA, 537 bp, Homo sapiens
  misc_feature 1..537: note = ENST00000523159
  source 1..537: mol_type = unassigned DNA
ggtgatttgctttgaacataagaattttgcaagagacacaaacattcagacaatagaagacactgtcttgccttcaggctatttttatgattcccacaaatccaccaccaacattcagaaagccagaactttggtccgatgatttcaccgattttgttaaaaagtgtttggtgaagaatcctgagcagagagctactgcaacacaacttttacagcatccttttatcaagaatgccaaacctgtatcaatattaagagacctgatcacagaagctatggagatcaaagctaaaagacatgaggaacagcaacgagaattggaagaggaagaagaaaattcggatgaagatgagctggattcccacaccatggtgaagactagtgtggagagtgtgggcaccatgcgggccacaagcacgatgagtgaaggggcccagaccatgattgaacataatagcacgatgttggaatccgacttggggaccatggtgataaacagtgaggatgaggaagaagaagatggaactatgaaaagta

SEQ ID NO: 20830 - DNA, 817 bp, Homo sapiens
  misc_feature 1..817: note = ENST00000518165
  source 1..817: mol_type = unassigned DNA
acgggaaagttggtccgagttcccagagtttccctctgtggtgccctaggctcggccggccggtgccccggctcctttcctcctttcggccttcgccgtccaccaggtccctctctctgtccccggccgccatggagcagccgccggcgcctaagagtaaactaaaaaagctgagtgaagacagtttgactaagcagcctgaagaagtttttgatgtattagagaagcttggagaagggtcttatggaagtgtatttaaagcaatacacaaggaatccggtcaagttgtcgcaattaaacaagtacctgttgaatcagatcttcaggaaataatcaaagaaatttccataatgcagcaatgtgacagcccatatgttgtaaagtactatggcagttattttaagaatacagacctctggattgttatggagtactgtggcgctggctctgtctcagacataattagattacgaaacaagacagctatttttatgattcccacaaatccaccaccaacattcagaaagccagaactttggtccgatgatttcaccgattttgttaaaaagtgtttggtgaagaatcctgagcagagagctactgcaacacaacttttacagcatccttttatcaagaatgccaaacctgtatcaatattaagagacctgatcacagaagctatggagatcaaagctaaaagacatgaggaacagcaacgagaattggaagaggaagaagaaaattcggatgaagatgagctggattcccacaccatggtgaagactagtgtggagagtgtgggcaccatgcgggccac

SEQ ID NO: 20831 - DNA, 468 bp, Homo sapiens
  misc_feature 1..468: note = ENST00000518627
  source 1..468: mol_type = unassigned DNA
aagtcatcctttgtaatacctattgctcacatgtatttgagcacttacactattttattaaaatgatctgatatacatttttatattccattagactctaaatttcttgaagaagttaatatattgcaggctatttttatgattcccacaaatccaccaccaacattcagaaagccagaactttggtccgatgatttcaccgattttgttaaaaagtgtttggtgaagaatcctgagcagagagctactgcaacacaacttttacagcatccttttatcaagaatgccaaacctgtatcaatattaagagacctgatcacagaagctatggagatcaaagctaaaagacatgaggaacagcaacgagaattggaagaggaagaagaaaattcgacatcaggaatacaactgtaaacaagatgtggttactgcccttatagatttgagagtctaatgggggatttagac

SEQ ID NO: 20832 - DNA, 510 bp, Homo sapiens
  misc_feature 1..510: note = ENST00000522924
  source 1..510: mol_type = unassigned DNA
ggggtatggaaaacaggctcttaagtataatgtttattgttatgaaagtgtaacttggtactcaatctccatagatgccagtacagcaatatctatttaaaataaaaatccatatattctttgatccaacagttgcacttctaggaatttattctacagaaatatttaaccatgtgtgaaataacatgtgtaaaaatattcgtagaacattgaaattgtaaaagattggaaagatcctaaatgtctgtcaacaagttggaaacaatttaaagtacaagaaaaagagttactggaaaaatacacctatgtacacacaacatatatacatatcttaatgcttataatgaagtatctctggaaaaataagcaagaaactggcctccagaaaagcatccttttatcaagaatgccaaacctgtatcaatattaagagacctgatcacagaagctatggagatcaaagctaaaagacatgaggaacagcaacgagaattggaagaggaagaagaa

SEQ ID NO: 20833 - DNA, 574 bp, Homo sapiens
  misc_feature 1..574: note = ENST00000521649
  source 1..574: mol_type = unassigned DNA
gagtttccctctgtggtgccctaggctcggccggccggtgccccggctcctttcctcctttcggccttcgccgtccaccaggtccctctctctgtccccggccgccatggagcagccgccggcgcctaagagtaaactaaaaaagctgagtgaagacagtttgactaagcagcctgaagaagtttttgatgtattagagaagcttggagaagggtcttatggaagtgtatttaaagcaatacacaaggaatccggtcaagttgtcgcaattaaacaagtacctgttgaatcagatcttcaggaaataatcaaagaaatttccataatgcagcaatgtgacaggctatttttatgattcccacaaatccaccaccaacattcagaaagccagaactttggtccgatgatttcaccgattttgttaaaaagtgtttggtgaagaatcctgagcagagagctactgcaacacaacttttacagcatccttttatcaagaatgccaaacctgtatcaatattaagagacctgatcacagaagctatggagatcaaagctaaaagacatgaggaacagc

SEQ ID NO: 20834 - DNA, 577 bp, Homo sapiens
  misc_feature 1..577: note = ENST00000520053
  source 1..577: mol_type = unassigned DNA
gtgctcaatgagctacaattcaaatagaggaaatttaatgggaaatgattacattagtagcagatggactggcttcctgaatttcagtgttactagaaatcctagaacagcttaaatttgtttttcaaatttagagtctgataaaaagacagataaagagatttgtttatttgattgtgctagtgtgattcttactgtcttttggatatttcatttgtactaggctatttttatgattcccacaaatccaccaccaacattcagaaagccagaactttggtccgatgatttcaccgattttgttaaaaagtgtttggtgaagaatcctgagcagagagctactgcaacacaacttttacagaacattgaaattgtaaaagattggaaagatcctaaatgtctgtcaacaagttggaaacaatttaaagtacaagaaaaagagttactggaaaaatacacctatgtacacacaacatatatacatatcttaatgcttataatgaagtatctctggaaaaataagcaagaaactggcctccagaaaagcatccttttatcaagaatgccaaacctgtat

SEQ ID NO: 20835 - DNA, 1016 bp, Homo sapiens
  misc_feature 1..1016: note = ENST00000521768
  source 1..1016: mol_type = unassigned DNA
tcaggctatttttatgattcccacaaatccaccaccaacattcagaaagccagaactttggtccgatgatttcaccgattttgttaaaaagtgtttggtgaagaatcctgagcagagagctactgcaacacaacttttacagcatttatcctttgactttttgctccaccataaaatatgtaagtacaagatccctggactccttgaagagattatcacgttgtaaatatcagttacaggattatctaaatgaagagcttcagagtttcaattttttttgatagaataattgtaagtagactttgtatccagaatgtcagtagattttaaaatctaccttaaaatttaatgcaaatagaaataatttaatatttataataggtgtttgtgaatcttaatttccccaacagaatagtcttagaactttcagctaataataagtatgtctcacattaacaaaacttgatatttgctaaatgatttctattgttaagtgacaaaaggatgaaaaacatggttcttgtaaaaagggacttccctgtctctaaaggaaccattgggttaaaagaacaaaaaaagaaaaaaggaaaaaaaaaaaaaagtaactttccaaagtcccatttttccaaaaggatgtattgaggggtatggaaaacaggctcttaagtataatgtttattgttatgaaagtgtaacttggtactcaatctccatagatgccagtacagcaatatctatttaaaataaaaatccatatattctttgatccaacagttgcacttctaggaatttattctacagaaatatttaaccatgtgtgaaataacatgtgtaaaaatattcgtagaacattgaaattgtaaaagattggaaagatcctaaatgtctgtcaacaagttggaaacaatttaaagtacaagaaaaagagttactggaaaaatacacctatgtacacacaacatatatacatatcttaatgcttataatgaagtatctctggaaaaataagcaagaaa

SEQ ID NO: 20836 - DNA, 531 bp, Homo sapiens
  misc_feature 1..531: note = ENST00000520653
  source 1..531: mol_type = unassigned DNA
accttctaataccatcacgttggtgatttgctttgaacataagaattttgcaagagacacaaacattcagacaatagaagacactgtcttgccttcaggctatttttatgattcccacaaatccaccaccaacattcagaaagccagaactttggtccgatgatttcaccgattttgttaaaaagtgtttggtgaagaatcctgagcagagagctactgcaacacaacttttacagcatttatcctttgactttttgctccaccataaaatatgtaagtacaagatccctggactccttgaagagattatcacgttgtaaatatcagttacaggattatctaaatgaagagcttcagagtttcaattttttttgatagaataattttgcacttctaggaatttattctacagaaatatttaaccatgtgtgaaataacatgtgtaaaaatattcgtagaacattgaaattgtaaaagattggaaagatcctaaatgtctgtcaacaagttggaaacaatttaaagtacaag

SEQ ID NO: 20837 - DNA, 2065 bp, Homo sapiens
  misc_feature 1..2065: note = ENST00000424861
  source 1..2065: mol_type = unassigned DNA
aaagttggtccgagttcccagagtttccctctgtggtgccctaggctcggccggccggtgccccggctcctttcctcctttcggccttcgccgtccaccaggtccctctctctgtccccggccgccatggagcagccgccggcgcctaagagtaaactaaaaaagctgagtgaagacagtttgactaagcagcctgaagaagtttttgatgtattagagaagcttggagaagggtcttatggaagtgtatttaaagcaatacacaaggaatccggtcaagttgtcgcaattaaacaagtacctgttgaatcagatcttcaggaaataatcaaagaaatttccataatgcagcaatgtgacagcccatatgttgtaaagtactatggcagttattttaagaatacagacctctggattgttatggagtactgtggcgctggctctgtctcagacataattagattacgaaacaagacaggattcttaacagataccactgaaggaagtgctagctgtgatttgagaatggatctaacgcttttccatcttggagctgaattcttacattaccttcttctatatgaagcagatcctctctcatgtgttttctccctcttggtgttttcagtataaatctgaccattttgaaatagttgggtatggacctatccagcctcatgaaaagtcttacagatatgagaaagaattaagcatctgttttcaataaaatgctcataaagccacccattaatgtactcagggtgaaaggaatcaaaaaaattattggccagttaatagaagatgaaattgcaaccattcttaaatctacattgaaaggactagaatatttgcactttatgagaaaaatacacagagatataaaagctggaaatattctcctcaatacagaaggacatgcaaaattggcagattttggagtggctggtcagttaacagatacaatggcaaaacgcaatactgtaataggaactccattttggatggctcctgaggtgattcaagaaataggctataactgtgtggccgacatctggtcccttggcattacttctatagaaatggctgaaggaaaacctccttatgctgatatacatccaatgaggtaatgccttgattggttgtgtcacctgtgcagtagttgaaaatggatatgagtacacaatttcaggacctccctgcttccttgtagatcatttggccgtatgctatttttatgattcccacaaatccaccaccaacattcagaaagccagaactttggtccgatgatttcaccgattttgttaaaaagtgtttggtgaagaatcctgagcagagagctactgcaacacaacttttacaggtcagtgcttgtgcctcgaagggaaggatattttcttcatacctttcagctttctgacattggccagaattgctgtgtgtttcataactgatttctaaagatgtaaacctcccctcccctcctgtttgctcccttcttttctttcctcccctctcgtcccctcatttcccccagagtcattttaaaacaaaatttccaaagcattctcctttcagaaaggaatctttgtcttcatagttactatttctcatgttttttttttcttctgttccttgactcagcatttatcctttgactttttgctccaccataaaatatgtaagtacaagatccctggactccttgaagagattatcacgttgtaaatatcagttacaggattatctaaatgaagagcttcagagtttcaattttttttgatagaataattgtaagtagactttgtatccagaatgtcagtagattttaaaatctaccttaaaatttaatgcaaatagaaataatttaatatttataataggtgtttgtgaatcttaatttccccaacagaatagtcttagaactttcagctaataataagtatgtctcacattaacaaaacttgatatttgctaaatgatttctattgttaagtgacaaaaggatgaaaaacatggttcttgtaaaaagggacttccctgtctctaaaggaaccattgggtt

SEQ ID NO: 20838 - DNA, 587 bp, Homo sapiens
  misc_feature 1..587: note = ENST00000523567
  source 1..587: mol_type = unassigned DNA
tggagagatctctctgagctagactcttcagtggaggaaatgttacaactcatggacagtggcattaccatctgccttaggaacggagcagcctctgtcttcaagaaaaaagaatggagcacacaaggagaagaaaacaagcaagacaggttgtaggctcatcagcaaagaatgagaggaatttttccatgtctcttccaacaaagaagcctaggcattgtgttctgaaacctggatttcttaacctctgggaagaatgaaatggtctttatttatgaaggtctaaatcccaagtggaaacttaaaggactgagcttctggattttatttggcctgaaaaatgttttaagagaatgtgaattagatgcttgtgtttaaaaaacagaagttttcatataaaaactgaaatttccagtacctctttaaaaatcagaagatttggtaacattcagcctgacttccctgtgacaacaggcagttggggatgagctggagctccaactcaagacaagaatgttctttccagtttgccacagtacctaagatacctgaatgtcttctatggtaccaacatccttaaagaatat

SEQ ID NO: 20839 - DNA, 5333 bp, Homo sapiens
  misc_feature 1..5333: note = ENST00000523960
  source 1..5333: mol_type = unassigned DNA
ttttcatcaaaggggaggcaactccccagcagcgggcttcacacctttcccgcccttaagtatgtgtacgttgggtgcagaaccgtttggttttcccgaggggtaggcagaatttccaaccccacgagctgctccctctttccgcaaacctcctaaccccggggtttttccataaatgtgtttacttcgtccacgccagcctgcgaagttccaaaatggagtctgggccacgccggcgttctgggcacgactacggtctcttgaaaagatttggaattgaccatgtagataatctctgagagcagttcttaaagtgtaatccagaaccggtggaacttgctagaaacgcatattcttcggaccccctccaaatctgctgaatctgagattgtggaggccattcaatgtcccttcttcaggaatttggaaaaaggatggagagatctctctgagctagactcttcagtggaggaaatgttacaactcatggacagtggcattaccatctgccttaggaacggagcagcctctgtcttcaagaaaaaagaatggagcacacaaggagaagaaaacaagcaagacaggtaaagaaatgcctggttgcagtccctcctcagaccaggcagcagttttggtgttgcgttcctttagatgtttattgtccttaaaataaattcttctttttatttatgttaaattgatgtgttacttggaaacaaaggacttcagtaatacagaagagtgtttggatttccttgcagatattttagcccaagagagtgatttagatagtttcgatgaaattttgtaatatgctgtattttccttctggcaggccagcctaatccataagtaatgtgatgaatggtggagagtgacctcatcaagccccaatgaatgtacattgttgggtggtttccaaactggatggttaatcatcagacttgcctggaggcactttttaaaaaatcagattcaggactcccctctcccccttagctgtggaaggagaacagtagagggaaaacaggagagaaattagttttgcgtaagcgtgcctggatagttttgagagattccatgtcagacattcaactttcttttaatattttctcttaaaaaacaaaacaaaacaaaacaaaacccttgctgataacgtgcttgtgcttaccataggccttttctcactttacaaagaaagacccatcaccatcccaaatcaagctggccttgggtatgagaactcctaggacaccaaagagaaggttcctacgatgatgtggttcccagataaggcttagaaactctcatttagaaaaccttatttctgagagtaaaaccagcattagaaatggccattttggtattgagatatttggttgagtgtgatggtaggagtaatgataattgttgtttaacatctttcttccttaatctgagtggccctgtcctagtggttcctctaaataaggcagctgttaaagaatgcatcacctggtgagtaaaaaaagaggatattgggccaggcatggtggctcatgcctccggcactttgggaggccgaggcaggtggatcacctgaggtcaggagttcgagaccagcctggccaacatggtgaaaccccgtctctactaaaaatacaaaaactagctgggcattgtggcgtgtgcctataaccccagctacttgggaggctgagggcaggagaatggcttgaacctgggaggcaggggttgcagtaaggtgagactgcaccattgcactccagcctgtgcaacagagcaagactgcctaaaaaaaaaaaaacaaaaaaaaaaggatattggtatgaaggagtgactgtcaatatatttaagtatatgtaaatattgattattttttacctcttcaattacttattcctaaaatgtatcattgattagaaaggaacccataaacatatacatctactacgtacccacaaaaattaaaaataaaaaaattttaaaaaggaaagggaagcaactataaacacccaaagcagaataggtgaatgattctgactattttaaatgtttttcatgactacccaatttttcaggaataagtcatggataaattttttatttattttggacttgctgtatattattacataaagaatatagttagaattgattatcaaatcatcatgaaatatttatttcaaatatggtcaattctcatctttaaaaatattttttgaatgaagcaatttttttttagaaacagggtcttgctccatcacccaggctggagtgcagtggcataatcctagctcaccatggcctcaacctcctggcctcaagcttctagccttctccctctttggcctaattctcatttttatttattaaattttgcatatttccttctttcgattaataagaaataaaatgctagcttctggatttttttagcaatgcatacacttttctttcattaattcatagggaaattttgatcatatatttaaacaaaattacagagtttgatattttttaaattaacagactgttttttagagcagttttaggtttacagaacaaatgagtgaaaagtacagagttcccaaatctcttcttgtttctccccctcccaacatttccctgatgattaatatcttgcattagtatgttacatttgttatgattgatgagccaatattgattcattattattaactaaagtccacagtttacattagggttaattctttgtgtggtacattctatgggtttggacaaatgtctaatgacatatacccaccacaacagtatcggacagaagagttttactgctctgaaatgctcctgtgctccacctgttcatccatctctcccccacaactccaggaacaactgaccttttactgtctccatagttttgccttttccagaatgtcatatagatggaatcatatagtatgtagccttttggggttggcttctttcacttagtaatatgcatttaaggttcctctatgtcttttcgtggcttgataactcatttcatgttagtgctgaataatattccattgtatggatgtactacagcctgtccattcacatattgaaggaaatcattgtcatgttcaagttttagaaattagaatgaagctgctatgtttattattaactaaataataatatgctatatgttattggcataaatatgttatttattaactaaacattcatatgcaggttttgggttagtcataagtttgggtgataccaaggagcaaaaccattgctgcataattaagagtatgtttagttttgtaaaatactgccaaaccgactttcacactggctgtatcatttgcattcctaccagcaatgaactgaagtttctgttgctccacatcctcatcagcattttgtattgtcagtgttttccattttagctatttaaataggtgtgtagtagtttctaattttttgttttaatttgtaattccctaatgacatatgatgttgaacttcttttcgtatgcttattttccgtctgtatatcttttttggtgaagtgagatcttttcatgtcttttgcccatcctttatcagatatgcaaatattttctcccagtctgtggcttgtctttttattttcttaatggagtttgatttgtattcttggttcttattctttctcaacaaatgaacaccagagtttgatcaaactaaatttttcagaagaatactatgccttttatgatacctctaacttcacaaataacctaaaagtttagtcacacattctattacatttttacaaagtatcacgttggtgggaaaaagtttttgctttgttgaaatttgccatttgatattggaatacattcttaaataaatgtggttatgttatagatcattttaatgcacatttcttactttttttggctaatgaattattacttgcatttattttatatgtattttatttatttttgagatggaatctccctctgtcaccgagggtagagggcagtggtgcaattttggctcactgcaaccaccacctcctaggttcaagcgattctcctgcctcagcctcccgagtagctggcattacaggcatgtaccaccacacctggctaacttttgtatttttagtagagacggcattttgccacattagccaggctggtcttgaactcctgacaggtgttccacccacctcggcctcccaaagtgctgggattacaggctgacccactgtgcccagcctattttatatttatttttgactatggaaatgatgttagacaaaaagcaaattcaagtgattttcttattcgagttcaaaattgttgaaacagcaaattgatttattatcttgcttagcacgtttgaataacatgttataaaatgatatattaattatcatgttattgatttaatcttttttagtaatattatgtggtacttccctgaagatatttctcagttgtttttaacaatgtttttgagatatgaattaatacattaatttgaattgaaaaacaaagttattgcacactgattaatttttgagaaaaaaaagaaaaagtcaggctttatatgaaagtgaaataaggctgattggattgacatagaggattagctctttaggttttgtggcaggtattttccaagacttgaatgtattctttcctcagcacccagttttgataaaagtatatgtaaaatgtattaataacagtttactgaaaaaaattgaattgacagaagtgtaatggaattaaaattgatatggatatcctagtcctgtctaaatccaaaggataaaacctgatgcctcgaagtgaaagagtaacaaccgtggtcagccatccgtatccgtgggttcagcatctgtggattcaaccaacctcagatcaaaaatattcagaaaaaaagttgtctgtactcaacatgtacagactttttgctttcttctcattattccccaaacaatatggtataacaactatttacatagcatttacactgtattagatgttacaagtaatctacagatgatttaaagtatacaggaggatgtgcatgggttatatgaaaatactatgccattttatattagggacttcaatatccgtggattttggtatccaagtgtgcatacacaaatacaccaatttatggccgggcgcggtggctcacacctgtaatcccagctactcgggaggctgaggtaggagaattccttgaacccaggaggccgaggttgcagtgagcagaaatcgcaccactgcactccagcctgggcgaaagagcaaaactccatctcaaaaaaaaaaaaaaaaaaa

SEQ ID NO: 20840 - DNA, 531 bp, Homo sapiens
  misc_feature 1..531: note = ENST00000519420
  source 1..531: mol_type = unassigned DNA
agagctcagtcctgagcctcagctgcgggatgcctgcggtcctctctctccaactgcctcattcctcctgcagcttttctcagtttgggagatttggagggagctttctcttccttcagactccccaagcctcccactcacggggtggtgacctgaagagcgttcctacgcttcgcacttccttttcatcaaaggggaggcaactccccagcagcgggcttcacacctttcccgcccttaagtatgtgtacgttgggtgcagaaccgtttggttttcccgaggggtaggcagaatttccaaccccacgagctgctccctctttccgcaaacctcctaaccccggggtttttccataaatgtgtttacttcgtccacgccagcctgcgaagttccaaaatggagtctgggccacgccggcgttctgggcacgactacggtctcttgaaaaggccattcaatgtcccttcttcaggaatttggaaaaaggatggagagatctctctgagctagactcttcagtggaggaaatg

SEQ ID NO: 20841 - DNA, 2485 bp, Homo sapiens
  misc_feature 1..2485: note = ENST00000617590
  source 1..2485: mol_type = unassigned DNA
acgggaaagttggtccgagttcccagagtttccctctgtggtgccctaggctcggccggccggtgccccggctcctttcctcctttcggccttcgccgtccaccaggtccctctctctgtccccggccgccatggagcagccgccggcgcctaagagtaaactaaaaaagctgagtgaagacagtttgactaagcagcctgaagaagtttttgatgtattagagaagcttggagaagggtcttatggaagtgtatttaaagcaatacacaaggaatccggtcaagttgtcgcaattaaacaagtacctgttgaatcagatcttcaggaaataatcaaagaaatttccataatgcagcaatgtgacagcccatatgttgtaaagtactatggcagttattttaagaatacagacctctggattgttatggagtactgtggcgctggctctgtctcagacataattagattacgaaacaagacagctatttttatgattcccacaaatccaccaccaacattcagaaagccagaactttggtccgatgatttcaccgattttgttaaaaagtgtttggtgaagaatcctgagcagagagctactgcaacacaacttttacagcatccttttatcaagaatgccaaacctgtatcaatattaagagacctgatcacagaagctatggagatcaaagctaaaagacatgaggaacagcaacgagaattggaagaggaagaagaaaattcggatgaagatgagctggattcccacaccatggtgaagactagtgtggagagtgtgggcaccatgcgggccacaagcacgatgagtgaaggggcccagaccatgattgaacataatagcacgatgttggaatccgacttggggaccatggtgataaacagtgaggatgaggaagaagaagatggaactatgaaaagaaatgcaacctcaccacaagtacaaagaccatctttcatggactactttgataagcaagacttcaagaataagagtcacgaaaactgtaatcagaacatgcatgaacccttccctatgtccaaaaacgtttttcctgataactggaaagttcctcaagatggagactttgactttttgaaaaatctaagtttagaagaactacagatgcggttaaaagcactggaccccatgatggaacgggagatagaagaacttcgtcagagatacactgcgaaaagacagcccattctggatgcgatggatgcaaagaaaagaaggcagcaaaacttttgagtctaatttcctctctgtttttaactattctggagaccaagaaaccactaggaattgaaggaatatttggatatttttaatcctaagattttgccctacaattaggcagaggtcaaaaagtgacaatggtacatgcccaggtaaattcccaaaaggcagaattgacagttgtatctgctgtgcattcactctaagatgaggagaacaaaagaagtgtattctcttgttctgtcagctgcataccagtaataaaactgttatgaaatggattttcaaggtctctaaaccttgaaaatccaaagctattgttgcattgtacagcactgaagggctttatgttacaatattctttattcctatctagtatactaggctatttattgtatccccttaggtaaacttatttatttatgctattttgctttgtttcattttttaaggacaagatcaggatagctttggtgaaggtagggtcatattaatatgatgataatgtgcaaccaatttatactttctgcagggagctatggggtacattccttgatttccaggatagtttttcaaataggaaagcaataatggcagtagttctcaaatgggctaggccttttttatattgaagcaataattccatttttaccctttgaaattttgtttttttgatttttgatgtttggtacaaatagaactatatatatttaggtaaaatagatctatcgtgtttaaaaccaaagaaatcaatggaacccttgcacaaaaaagtgtgataaatatttttaaataaaaacttaatacaaatgtaatttgttaatattgtttcatgttttatgtgtagatctaatagctgaactgattcaaactgtaataagctcatcaatttcatttctatgaaaatgtgctctgttgtcacaggatgtttctgttgattttattcatttcctgggaattggtaaacatcatgttcctgatgataacccagtagcaaaaacatttgtactgagtggtacaagccttggggactgaaaaaaaaaagattaaaaccattaaaaagaaactcatttttacgctgaatgaacatttatatgattgcattgggaccagtcatttcctaagctacatatggccatcttgacagtgttttttcttttgtgtgtttaattattatgtgtaaatcataaagacaaataaatttcactgtgccacccagcata

SEQ ID NO: 20842 - DNA, 2063 bp, Homo sapiens
  misc_feature 1..2063: note = ENST00000306304
  source 1..2063: mol_type = unassigned DNA
gtgcgctgggcggcgctcggaccccttggcagccgcaggtgcctccccagcccagcccagctcagtccagcgcagcccagcccagcccagcccggcgctcgcagcctccgccgcttccgggcagataggtgccttttcttgctccttgctcttggagttcttctcttagtccctgttccctggatgaaagcatcgctccgagcctcatgggaggaatgaaggaagaatcgagactagatatccaactaaggcttcgggacatgttttgagcgaagatgggtgtttctgcccggatagtataaatcgaggatccaggtctgggcagattcaaccatgggagcgaacacttcaagaaaaccaccagtgtttgatgaaaatgaagatgtcaactttgaccactttgaaattttgcgagccattgggaaaggcagttttgggaaggtctgcattgtacagaagaatgataccaagaagatgtacgcaatgaagtacatgaataaacaaaagtgcgtggagcgcaatgaagtgagaaatgtcttcaaggaactccagatcatgcagggtctggagcaccctttcctggttaatttgtggtattccttccaagatgaggaagacatgttcatggtggtggacctcctgctgggtggagacctgcgttatcacctgcaacagaacgtccacttcaaggaagaaacagtgaagctcttcatctgtgagctggtcatggccctggactacctgcagaaccagcgcatcattcacagggatatgaagcctgacaatattttacttgacgaacatgggcacgtgcacatcacagatttcaacattgctgcgatgctgcccagggagacacagattaccaccatggctggcaccaagccttacatggcacctgagatgttcagctccagaaaaggagcaggctattcctttgctgttgactggtggtccctgggagtgacggcatatgaactgctgagaggccggagaccgtatcatattcgctccagtacttccagcaaggaaattgtacacacgtttgagacgactgttgtaacttacccttctgcctggtcacaggaaatggtgtcacttcttaaaaagctactcgaacctaatccagaccaacgattttctcagttatctgatgtccagaacttcccgtatatgaatgatataaactgggatgcagtttttcagaagaggctcattccaggtttcattcctaataaaggcaggctgaattgtgatcctacctttgaacttgaggaaatgattttggagtccaaacctctacataagaaaaaaaagcgtctggcaaagaaggagaaggatatgaggaaatgcgattcttctcaggtaagcaggtccccaccaaactcagggtcatgggtatccccatgatggctgcaatatcttcgagagcttctactgggaggtcatttcagcttcctgcttttgctgcttagtgaaataggagaagtagatcagccgggtttctaaaagggcagaccagagctcctctgaggatcctagcagcaacattttacttgtaggctttccgtctagagttctgccattaacttgactcagttatttctctcttccagttctcaattcaaaatttacaaatttcctgggagaggaactgtcattggccaagcttaggtcaggggatgattcataaaattatggtaaaggggcaggtttcaaagtacacacatggttgttttggacctcactcctgctttgaggagtttctgggagcagccaaccctagagatgatgtctgttctttgccacaagcagaattttatgatatcaagcctcacagaagagtgtctgttcacaggaatgacggaattctaacatggtggagcactattgctggatttcaggctgagttaaattaactttgtaactaagtatattattctctgtcagagtcagagctcagatttcagtgaagtaacttgcaaacactcagtaggattttatactcacatgtggctctatgaattataatgatgatgaagtaataaagttactttgcctct

SEQ ID NO: 20843 - DNA, 5393 bp, Homo sapiens
  misc_feature 1..5393: note = ENST00000397936
  source 1..5393: mol_type = unassigned DNA
gtgcgctgggcggcgctcggaccccttggcagccgcaggtgcctccccagcccagcccagctcagtccagcgcagcccagcccagcccagcccggcgctcgcagcctccgccgcttccgggcagataggtgccttttcttgctccttgctcttggagttcttctcttagtccctgttccctggatgaaagcatcgctccgagcctcatgggaggaatgaaggaagaatcgagactagatatccaactaaggcttcgggacatgttttgagcgaagatgggtgtttctgcccggatagtataaatcgaggatccaggtctgggcagattcaaccatgggagcgaacacttcaagaaaaccaccagtgtttgatgaaaatgaagatgtcaactttgaccactttgaaattttgcgagccattgggaaaggcagttttgggaaggtctgcattgtacagaagaatgataccaagaagatgtacgcaatgaagtacatgaataaacaaaagtgcgtggagcgcaatgaagtgagaaatgtcttcaaggaactccagatcatgcagggtctggagcaccctttcctggttaatttgtggtattccttccaagatgaggaagacatgttcatggtggtggacctcctgctgggtggagacctgcgttatcacctgcaacagaacgtccacttcaaggaagaaacagtgaagctcttcatctgtgagctggtcatggccctggactacctgcagaaccagcgcatcattcacagggatatgaagcctgacaatattttacttgacgaacatgggcacgtgcacatcacagatttcaacattgctgcgatgctgcccagggagacacagattaccaccatggctggcaccaagccttacatggcacctgagatgttcagctccagaaaaggagcaggctattcctttgctgttgactggtggtccctgggagtgacggcatatgaactgctgagaggccggagaccgtatcatattcgctccagtacttccagcaaggaaattgtacacacgtttgagacgactgttgtaacttacccttctgcctggtcacaggaaatggtgtcacttcttaaaaagctactcgaacctaatccagaccaacgattttctcagttatctgatgtccagaacttcccgtatatgaatgatataaactgggatgcagtttttcagaagaggctcattccaggtttcattcctaataaaggcaggctgaattgtgatcctacctttgaacttgaggaaatgattttggagtccaaacctctacataagaaaaaaaagcgtctggcaaagaaggagaaggatatgaggaaatgcgattcttctcagacatgtcttcttcaagagcaccttgactctgtccagaaggagttcataattttcaacagagaaaaagtaaacagggactttaacaaaagacaaccaaatctagccttggaacaaaccaaagacccacaaggtgaggatggtcagaataacaacttgtaaaggcctcatgtcttcttcttgggacaatctcatgccagaaacttctaattacatatgtcaagaaaagctgacagtagttcttgccactccacacaccatgacttagaaaatgtgaatgaatatatttcaaaaaaggcagcacaacacagtgaagggtcctgggcctgagctcctgggatgtcatttcacatcaatcaactgtgtgatctagagcaagtcacttagccactttctgtgctttactttatttatctaaaatgagagggttatactagacgagccataccctgcctttttagtgctatagttgttattctaaaccgcctttatttttattttaaaattaatatatgaatatagatttatttttccactccttctaattatgcagtgacaaatggacaaatggacacaggactcagtgagacttttcagacctcgaaagtttcataaagtggtcagaatgccccaggctacttggataaagataaggaattctatcagggaggcatgaatggaatcagattaaaagtaacagagatggatgagggccttccagtgatatgcgtgaatcagcattagatccgcttatctcagctggcaggagcctgctgtgcacaccacttcccagctccctcttcaacaatgtgaaagtggtaacttgaaattggtaataatgggagcatttacaccacggaaactggtaaatgctcgttttttccctcctaacaagtgaattgctaaatattagcccaccactccttccaagaagcatgttccttgagggctaattgtcctctgaagattagcagagacctgtatctggagaggatcagaaaagaatgtcatcacactgaaagtatgtccaccttgcagttcagaaaagttgcatcttatatggggtttattgtctaagttagaaatgaatttagaagatagtaaaatttaccgttgaaaaaccccttaaattacccataaagtatatgggaagtatcttttctcagtaaagcccaatacagtgtcacctttcactaatgaaacaagccattgcttttgttttgttttgacttagttatttttatttttggtctcattttggctaataccagatgagctaaaatgttgaacaaattatacttgtttttatagactagaattactcttttttttcttttcaggcagagtctcactctgtcacccaggctggagtgcagtggcatgatctctgctcactacatctgcctcccgggttcaagtgattcttgtgtctcagcctcctaagtagctgggatcgcatgtgtgtgccaccatgtgtagctaattttttgtatttttagtagagataggattttgctaagctggccaggttggtttcaaactcctggtctcaagtgatccgcccaccttggcctcccaaagtgctgggattacaggcgtgagccaccaaacctggccttagaattactcttagaacagtggaatgcccacacatccaagacaggcaagttcatggagactaagggaacagtggtatcatgtctcccttctcccttgtgcttactacaagaatggcaggcagaattccctacttatttaaaatatcactgatgtctcactctttttctttatattttatttattgatttgccacaaagtttaattcacctaagtgagacgtgcatatgatgtaactccactgtacagatacacagatctttacagaagaactatttttggcaacccctatgcccctgggtagggtccagaagtgaacaggcttggtgggggattgttttcacctcttggctactcagagtacctaaacctgtccttacttatggagagcatgtgtcacaccaagatggcagtaagctggcaactgcgaagacctgactgatgcccatttgggaagccaggcaagtgaaaatggaccgaagaaacagagatggctgtcttttatgcagggcttttccataaagaggttacactggggcaaccaagtatgtgtagaaagccagagctaaacttcagcttggcattcacagttttctcttcactgagctaataggcccagagtttcgggcagagctgtgaaatagtgcttctctaatagcaaccatattattgttacataattaaaagccagctcttttgttgtttgtttgattccttttccctacagttcccacatcatttgtctgtgctattctgtttttctccaaacactataaacttgaagcaattgccctgactcgatttcagagaaggggatgtgttggaaagagcaagaataagaaagtgaccagattctgctgcagtctggtaaccccacgagtgtcagggactacttgcatgtttacttctatccttcatttgttttgattcaagcctttatgtgctgtggactcacctccctaagtaaccaggttcctcctctcgctgcaaccttgtttgcatccttcccaagaagaggctttgggaaatttttctgtaattacacttaccaaagagccatggaaccattaggatctccactgtgatgagagttaagccatagtgccatttcacacgtatacatttatgatgggatgggaacccgatacaatctctgtaggctgaatccctagttttatttccagtgagctgcttctgtgactgaagcacctctgtgggcttttgggaaccatggatgcacagatgagagagcacaggctcagagagtaagatggatttctagtgctagccaggtgaatgacacacagtgtatttcaagtttgaaaagcaaaaccatggtatctgacagtgctgattgtaatcacctcccaccactgtgcattttaaacatgagaacaaaaaacttttccaaaatttaaacttttcctaaatctttgtggtcattgctagttgttgacatcagatcctttggttttattctataacttgggctaaacgttaatatcccactaggtggaacatgtctcttccggagttgtgacaaccgaggctcagagctgtgatttttagaaaacaagatgactattaaatcctttggcctggtattcttgaatgtttttctcccagtgcttcccttgcctgtatggagcatctgcaaagtctgagcaggttttgaagtccaagagcatcccagctataaggctcttgcactgtgacagagctgcccacctccagtacaccctcagtgacctcgagtagatgcgtagggcagtcaaacccggcaacttatgccacaaccctaattccaggaagtcgtctgctaatggctaacccactgccatggtggcactggttttgcctgaggtcattgctagggcaggaatgaacagcaaccagcacagagcattgctaaattaattacagtaatctaattaattagtagctaggcttcttctgataggaaagtttcaaccagaaaccactagatgttctattatcatagcttttgtagattggatggaagaataagtaggaagaaagagtattaatgtagctagtagggaccagtgttgctgcttgtggctgaggcagtaatgctaaggctttagctcttcaaaagcagaatgaaaaggcacaaaaagcacttcaagcttgtttctgtacccagttgtccctgtattgtctacataaaatcctgtttcctgctatctgtctgtgattcctgtttattacaaattcagtgtgtctgactgatattaaacactgatattaaaatttcaaacttcacttatctgtgctgttgtgaacaggcagctgatctggcagccctcgaatgggaaacaagtgcttctgttgagctgtagcatatataatataaatgtgcctatgtgtattaaaatgtcttctgtaaacaa

SEQ ID NO: 20844 - DNA, 766 bp, Homo sapiens
  misc_feature 1..766: note = ENST00000503975
  source 1..766: mol_type = unassigned DNA
cggcgctcgcagcctccgccgcttccgggcagataggtgccttttcttgctccttgctcttggagttcttctcttagtccctgttccctggatgaaagcatcgctccgagcctcatgggaggaatgaaggaagaatcgagactagatatccaactaaggcttcgggacatgttttgagcgaagatgggtgtttctgcccggatagtataaatcgaggatccaggtctgggcagattcaaccatgggagcgaacacttcaagaaaaccaccagtgtttgatgaaaatgaagatggtaagaaatatgggatagtggcatataaaaaatagaattttgcaaaattcaagtatatgcttctagtttcataagttaagcataagcatggtctgtagggccttgaaggaaaaaggcaaagctgcatgagtgagtctgaggactttgtaggctcatagctaggttttaccttccactttccatgggacctttggcagctttcctaatctccactataccaatgtcctttgtccaaagggagctgcagttgggcatgtggtggatagttaaatgatttgtttgtcctctgtgctgttccttggcagttgaagttacccccattgctcattgttacagaaaatacattatcaacatgtacatgaatgataaccagtgctcataatattatagaatgaagctgtgccttctgaatttccaactgccaagcttttgtgtactagacaaatcccataatgctacgtcatagaaaaaag

SEQ ID NO: 20845 - DNA, 798 bp, Homo sapiens
  misc_feature 1..798: note = ENST00000626951
  source 1..798: mol_type = unassigned DNA
ccttgctcttggagttcttctcttagtccctgttccctggatgaaagcatcgctccgagcctcatgggaggaatgaaggaagaatcgagactagatatccaactaaggcttcgggacatgttttgagcgaagatgggtgtttctgcccggatagtataaatcgaggatccaggtctgggcagattcaaccatgggagcgaacacttcaagaaaaccaccagtgtttgatgaaaatgaagatgtcaactttgaccactttgaaattttgcgagccattgggaaaggcagttttgggaaggtctgcattgtacagaagaatgataccaagaagatgtacgcaatgaagtacatgaataaacaaaagtgcgtggagcgcaatgaagtgagaaatgtcttcaaggaactccagatcatgcagggtctggagcaccctttcctggttaatttgtggtattccttccaagatgaggaagacatgttcatggtggtggacctcctgctgggtggagacctgcgttatcacctgcaacagaacgtccacttcaaggaagaaacagtgaagctcttcatctgtgagctggtcatggccctggactacctgcagaaccagcgcatcattcacagggatatgaagcctgacaatattttacttgacgaacatgatacctggctctcctacaagtcccactgaattggagtttcaggagaccgaagcccaggcacatgtattttgcaaaactacactgaagtttctgataatgacggatatcaacaattaaacgcttacttcttgccaaa

SEQ ID NO: 20846 - DNA, 1637 bp, Homo sapiens
  misc_feature 1..1637: note = ENST00000398523
  source 1..1637: mol_type = unassigned DNA
ctcttagtccctgttccctggatgaaagcatcgctccgagcctcatgggaggaatgaaggaagaatcgagactagatatccaactaaggcttcgggacatgttttgagcgaagatgggtgtttctgcccggatagtataaatcgaggatccaggtctgggcagattcaaccatgggagcgaacacttcaagaaaaccaccagtgtttgatgaaaatgaagatgtcaactttgaccactttgaaattttgcgagccattgggaaaggcagttttgggaaggtctgcattgtacagaagaatgataccaagaagatgtacgcaatgaagtacatgaataaacaaaagtgcgtggagcgcaatgaagtgagaaatgtcttcaaggaactccagatcatgcagggtctggagcaccctttcctggttaatttgtggtattccttccaagatgaggaagacatgttcatggtggtggacctcctgctgggtggagacctgcgttatcacctgcaacagaacgtccacttcaaggaagaaacagtgaagctcttcatctgtgagctggtcatggccctggactacctgcagaaccagcgcatcattcacagggatatgaagcctgacaatattttacttgacgaacatgggcacgtgcacatcacagatttcaacattgctgcgatgctgcccagggagacacagattaccaccatggctggcaccaagccttacatggcacctgagatgttcagctccagaaaaggagcaggctattcctttgctgttgactggtggtccctgggagtgacggcatatgaactgctgagaggccggagaccgtatcatattcgctccagtacttccagcaaggaaattgtacacacgtttgagacgactgttgtaacttacccttctgcctggtcacaggaaatggtgtcacttcttaaaaagctactcgaacctaatccagaccaacgattttctcagttatctgatgtccagaacttcccgtatatgaatgatataaactgggatgcagtttttcagaagaggctcattccaggtttcattcctaataaaggcaggctgaattgtgatcctacctttgaacttgaggaaatgattttggagtccaaacctctacataagaaaaaaaagcgtctggcaaagaaggagaaggatatgaggaaatgcgattcttctcagacatgtcttcttcaagagcaccttgactctgtccagaaggagttcataattttcaacagagaaaaagtaaacagggactttaacaaaagacaaccaaatctagccttggaacaaaccaaagacccacaagtgacaaatggacaaatggacacaggactcagtgagacttttcagacctcgaaagtttcataaagtggtcagaatgccccaggctacttggataaagataaggaattctatcagggaggcatgaatggaatcagattaaaagtaacagagatggatgagggccttccagtgatatgcgtgaatcagcattagatccgcttatctcagctggcaggagcctgctgtgcacaccacttcccagctccctcttcaacaatgtgaaagtggtaacttgaaattggtaataatgggagcatttacaccac

SEQ ID NO: 20847 - DNA, 659 bp, Homo sapiens
  misc_feature 1..659: note = ENST00000503384
  source 1..659: mol_type = unassigned DNA
ggactctaatttaggcaaagcaacagcaggtgtggatgtgaggaggcaaaaggagacagggggtggttatataactacattatcaaccatatttttcccatttatagtctttaagctcacatcatctgtgcaattctagagttacacaagaaaatgatgcttaatactactaacattactttatggcaatgtaaatgctttatatgatccaatggaccaatatctacatgcttagatacaacatgctataggaagtttagagtctgagtttttgaatgagagaggccttggttcagagcccatttcttccatttactagcctgtgaccttgggttaagcttcagttttctgatttaaaaattggggattttctgtctcataaatttactgtgagaattgaatgagaagatgagtattgagaagctagtacactgtttcaactccagttagctttcttaagcctttttgcccctaccccttagttctgttcgttttattgtgagcaactttcttttttctttttactcctctagggatatgaagcctgacaatattttacttgacgaacatgggcacgtgcacatcacagatttcaacattgctgcgatgctgcccagggagacacagattaccaccatggctggcaccaagccttacat

SEQ ID NO: 20848 - DNA, 668 bp, Homo sapiens
  misc_feature 1..668: note = ENST00000515832
  source 1..668: mol_type = unassigned DNA
gcaacaacaatggccatcaagcattttgtttgcacctctgtgatcagaagcagcagtgtcggaagcacagatcctcagaatttggagaacacagttcttgctttccaccctgactctcacaggctgtgtgcaaactgctccggaacatgtgtgtgctcagctccctcccatggggctggaggatgagggatgggtagctgctgctgtgctaagagcttaagttggtcataattaactgcgctttgccacccaagccttccctgaaagttgcaagctttcaatagactccagagttctaaaatagtgacattagacagattctgccagtgcaatcgctgtctaggaggggagacagattcctggtgcttcctgttttgccagcttcccggaatcttcttcacatagcatccattttgaagatactacttacttctcaatttggggctattcattgaatagactgtcaccaggttattggctgtttgaagattctcatttgtctgctaactatacctctattttttttctacgttcacctggaagacatgtcttcttcaagagcaccttgactctgtccagaaggagttcataattttcaacagagaaaaagtaaacagggactttaacaaaagacaaccaaatctagccttggaacaaaccaaagaccc

SEQ ID NO: 20849 - DNA, 545 bp, Homo sapiens
  misc_feature 1..545: note = ENST00000506091
  source 1..545: mol_type = unassigned DNA
ctcaatttggggctattcattgaatagactgtcaccaggttattggctgtttgaagattctcatttgtctgctaactatacctctattttttttctacgttcacctggaagacatgtcttcttcaagagcaccttgactctgtccagaaggagttcataattttcaacagagaaaatgacaaatggacaaatggacacaggactcagtgagacttttcagacctcgaaagtttcataaagtggtcagaatgccccaggctacttggataaagataaggaattctatcagggaggcatgaatggaatcagattaaaagtaacagagatggatgagggccttccagtgatatgcgtgaatcagcattagatccgcttatctcagctggcaggagcctgctgtgcacaccacttcccagctccctcttcaacaatgtgaaagtggtaacttgaaattggtaataatgggagcatttacaccacggaaactggtaaatgctcgttttttccctcctaacaagtgaattgctaaatattagcccaccact

SEQ ID NO: 20850 - DNA, 294 bp, Homo sapiens
  misc_feature 1..294: note = ENST00000510953
  source 1..294: mol_type = unassigned DNA
ttgaatagactgtcaccaggttattggctgtttgaagattctcatttgtctgctaactatacctctattttttttctacgttcacctggaagacatgtcttcttcaagagcaccttgactctgtccagaaggagttcataattttcaacagagaaaaagtaaacagggactttaacaaaagacaaccaaatctagccttggaacaaaccaaagacccacaagtgacaaatggacaaatggacacaggactcagtgagacttttcagacctcgaaagtttcataaagtggtcaga

SEQ ID NO: 20851 - DNA, 3582 bp, Homo sapiens
  misc_feature 1..3582: note = ENST00000282908
  source 1..3582: mol_type = unassigned DNA
ctgcgtgctgccttcgtccgtcccctcctcccccgctccttcccctccttcccctgctcccgcgccgcctcgcgtctcccgcccgctgtagccggcgaggagcgccgcacgttggccccggcgcgaggagctcccgggttcccgggcgggcactggagtaaggagctgcgagcgcagcccgaggcggggcacggcggaaggcgcggcgagagcggggtccctgcgagcgcagtcggaagggcgtccaggagaagggggacgccgtccccgcccctgcacggtgctcggccccctcgggctccgcgcgcggctacaacccggactgggcgcgcccccggcatcccgcatctctgcgcgcgtcccacatcccgcatccggcatcccagcggccgggcatgtagcagcggcagcaacggcggaatatgggcgggaaccactcccacaagccccccgtgtttgacgagaatgaggaagtcaactttgaccattttcagattctgcgggccattggtaaagggagttttggaaaggtatgcatcgtgcagaagcgagacactaagaaaatgtatgcaatgaagtacatgaacaagcagaagtgcatcgagagggatgaggttcggaatgttttccgggagctgcagatcatgcaagggctggagcaccccttcctggtcaatctgtggtactccttccaggatgaggaggacatgttcatggtggtggacctgctcctgggaggcgacctgcgctaccatctgcagcagaatgtgcatttcacagaggggactgtgaaactctacatctgtgagctggcactggccctggagtatcttcagaggtaccacatcatccacagagacatcaagccagacaatatcctgctggatgaacacggacatgttcacattacagacttcaacatagcgacggtagtgaaaggagcagaaagggcttcctccatggctggcaccaagccctacatggctccagaagtattccaggtgtacatggacagaggccccggatactcgtaccctgtcgactggtggtccctgggcatcacagcctatgagctgctgcggggctggaggccgtacgaaatccactcggtcacgcccatcgatgaaatcctcaacatgttcaaggtggagcgtgtccactactcctccacgtggtgcaaggggatggtggccctgctgaggaagctcctgaccaaggatcctgagagccgcgtgtccagccttcatgacatacagagcgtgccctacttggccgacatgaactgggacgcggtgttcaagaaggcactgatgcccggctttgtgcccaataaagggaggttgaactgcgatcccacatttgagcttgaagagatgattctagaatccaagccacttcacaaaaagaagaagcgattggcaaagaacagatccagggatggcacaaaggacagctgcccgctgaatggacacctgcagcactgtttggagactgtccgggaggaattcatcatattcaacagagagaagctcaggaggcagcagggacagggcagccagctcttggacaccgacagccgagggggaggccaggcccaaagcaagctccaggacgggtgcaacaacaacctcctcacccacacctgcacccgtggctgcagcagctgagcccacacttgttgctgctcaacaggactgcactcgtctctgccctgcccacccagagcccctctttgtgccctgatggtccctgtctcacccctgaaaacatcagatgcagaaaaagccctggacttggagctgggaagcctgggttctggtcccatctccatgactgattcacgtgtgacctcagacaagtcacgccctctctgtgcctccgttttctgcatctgccaaaggggttaaacacttctgccccacttcaaattacaagattatggggagaacccaattaggtaggaaacatgaaaaacctttgatatttataaaatcatttttacgtgcaaaatataaccttaatatttgaagtgacccccattccccaaagcaatcaaaccgtcatgactttgcaatttggcacatcctagcttgttagagggcacttccgaaaaacacagccctgacagcaaaataaaggtctgatatgttggccccttctatggaaacaacgctgccaaatcctggagcaaaacctgaagtgtcttcatgtgcattctctggcaggccacagtcctgagcttgtaagatggtgcagcatgcagaccagacttgtccccaaggtctcagcgctgcggtctcactcctcccctcatttaagaagactatccttaccttttagtttcagcagtcctcaccaccaccatatccccagtgctgggatggcacacaggtgtccattcagatgagagttgggtcgctgagcattggttactcctgcagagtgtaatcagcaccccatccaactggcccgaaagcccagacctgcagcagaactctccaactctctatcagctttcagggttttctctcctgggaagggtgtaaaatcagcttgtcagattcttcttacagagagtatccaatcggtattggtggagcggctccctatttatacaataggaagcatgggtgcttagaaagtttatttcaggaggaaaatgggttcacacaaaaagcaaactacattctggtctgctcagggagaagcttgcctttgaactggaagatgttgggatgagcagggaaagcttagactttggagtcaggtttgtgttcagaatccagccctgctggctactaactaactgggagaccttaggcaaagcatgcaatcgctctgaatggcagtttcctcatttttaaacagggataataaaactaatattgcaggggagttacagggttaaataagatcctgtgtgtaaccccaagcattggatgactcatagaatggccttttttgtcagcataatcgtcatcattatttagatactttcttccttcactcacccagcaggtcagttttctgtgcaaacaaacctgtttaggattcttccaaatgttcttcctggggtctttgatatttgtttgttacatcctgctgaagttcgactgtgtttttattttttcatccaacttccatttttcactttttacatgattactcaatccttggggctgtccatgtcatctcttagatttcttaaaagacattttaatgtatggttaggttttatatttttattttttaaaaaagaaatagtcagtgttttcctcctttcaaccgagactatttctggattgtgtgctcctcgtcagttgacttgttttgcacacttttctttacttcatgtccccatcaacaaccgtcctgctccccacctcccccaggaaataaggggcctgctcctctccctactgtgaccctggaggctcttaagatgatgatggttttttttattgggctgagttcacgaattaggggcaggagctggaagtcgccctaggaacaccagatttcctggttctgttcaagttggcatttcttgtttggaataaactatttcttggacattccttc

SEQ ID NO: 20852 - DNA, 1989 bp, Homo sapiens
  misc_feature 1..1989: note = ENST00000512018
  source 1..1989: mol_type = unassigned DNA
ggagtaaggagctgcgagcgcagcccgaggcggggcacggcggaaggcgcggcgagagcggggtccctgcgagcgcagtcggaagggcgtccaggagaagggggacgccgtccccgcccctgcacggtgctcggccccctcgggctccgcgcgcggctacaacccggactgggcgcgcccccggcatcccgcatctctgcgcgcgtcccacatcccgcatccggcatcccagcggccgggcatgtagcagcggcagcaacggcggaatatgggcgggaaccactcccacaagccccccgtgtttgacgagaatgaggaagtcaactttgaccattttcagattctgcgggccattggtaaagggagttttggaaaggattgccaatgccgtttgttccttgagaatctaagtgaggaaagttgaaaaaaaacccataaacatcacaaaggcagctctttccagcaacatagacgtttgttgttttggtatgcatcgtgcagaagcgagacactaagaaaatgtatgcaatgaagtacatgaacaagcagaagtgcatcgagagggatgaggttcggaatgttttccgggagctgcagatcatgcaagggctggagcaccccttcctggtcaatctgtggtactccttccaggatgaggaggacatgttcatggtggtggacctgctcctgggaggcgacctgcgctaccatctgcagcagaatgtgcatttcacagaggggactgtgaaactctacatctgtgagctggcactggccctggagtatcttcagaggtaccacatcatccacagagacatcaagccagacaatatcctgctggatgaacacggacatgttcacattacagacttcaacatagcgacggtagtgaaaggagcagaaagggcttcctccatggctggcaccaagccctacatggctccagaagtattccaggtgtacatggacagaggccccggatactcgtaccctgtcgactggtggtccctgggcatcacagcctatgagctgctgcggggctggaggccgtacgaaatccactcggtcacgcccatcgatgaaatcctcaacatgttcaaggtggagcgtgtccactactcctccacgtggtgcaaggggatggtggccctgctgaggaagctcctgaccaaggatcctgagagccgcgtgtccagccttcatgacatacagagcgtgccctacttggccgacatgaactgggacgcggtgttcaagaaggcactgatgcccggctttgtgcccaataaagggaggttgaactgcgatcccacatttgagcttgaagagatgattctagaatccaagccacttcacaaaaagaagaagcgattggcaaagaacagatccagggatggcacaaaggacagctgcccgctgaatggacacctgcagcactgtttggagactgtccgggaggaattcatcatattcaacagagagaagctcaggaggcagcagggacagggcagccagctcttggacaccgacagccgagggggaggccaggcccaaagcaagctccaggacgggtgcaacaacaacctcctcacccacacctgcacccgtggctgcagcagctgagcccacacttgttgctgctcaacaggactgcactcgtctctgccctgcccacccagagcccctctttgtgccctgatggtccctgtctcacccctgaaaacatcagatgcagaaaaagccctggacttggagctgggaagcctgggttctggtcccatctccatgactgattcacgtgtgacctcagacaagtcacgccctctctgtgcctccgttttctgcatctgccaaaggggttaaacacttctgccccacttcaaattacaagattatggggagaacccaattaggtaggaaacatgaaaaacctttgatatttataaaatcatttttacgtgcaaaatataaccttaatatttgaagtga

SEQ ID NO: 20853 - DNA, 3272 bp, Homo sapiens
  misc_feature 1..3272: note = ENST00000512636
  source 1..3272: mol_type = unassigned DNA
gggatttactggcaaggccgtacattgttgacctgtcttggtgtagggaaacatgtagaagccaggcagaagtggggtagagagtgaagcagcaagactgcagagcctcatcaagaagtgtggagtgaagggaaggcttcagatggacaatttgtgtgctggggaaaaaatggaatgtgctgcaaattcccctgtggataagggtggacggctgctctggcaagtatagtgcacctgacccaagagcctttggaatagtcaactttgaccattttcagattctgcgggccattggtaaagggagttttggaaaggtatgcatcgtgcagaagcgagacactaagaaaatgtatgcaatgaagtacatgaacaagcagaagtgcatcgagagggatgaggttcggaatgttttccgggagctgcagatcatgcaagggctggagcaccccttcctggtcaatctgtggtactccttccaggatgaggaggacatgttcatggtggtggacctgctcctgggaggcgacctgcgctaccatctgcagcagaatgtgcatttcacagaggggactgtgaaactctacatctgtgagctggcactggccctggagtatcttcagaggtaccacatcatccacagagacatcaagccagacaatatcctgctggatgaacacgctccagaagtattccaggtgtacatggacagaggccccggatactcgtaccctgtcgactggtggtccctgggcatcacagcctatgagctgctgcggggctggaggccgtacgaaatccactcggtcacgcccatcgatgaaatcctcaacatgttcaaggtggagcgtgtccactactcctccacgtggtgcaaggggatggtggccctgctgaggaagctcctgaccaaggatcctgagagccgcgtgtccagccttcatgacatacagagcgtgccctacttggccgacatgaactgggacgcggtgttcaagaaggcactgatgcccggctttgtgcccaataaagggaggttgaactgcgatcccacatttgagcttgaagagatgattctagaatccaagccacttcacaaaaagaagaagcgattggcaaagaacagatccagggatggcacaaaggacagctgcccgctgaatggacacctgcagcactgtttggagactgtccgggaggaattcatcatattcaacagagagaagctcaggaggcagcagggacagggcagccagctcttggacaccgacagccgagggggaggccaggcccaaagcaagctccaggacgggtgcaacaacaacctcctcacccacacctgcacccgtggctgcagcagctgagcccacacttgttgctgctcaacaggactgcactcgtctctgccctgcccacccagagcccctctttgtgccctgatggtccctgtctcacccctgaaaacatcagatgcagaaaaagccctggacttggagctgggaagcctgggttctggtcccatctccatgactgattcacgtgtgacctcagacaagtcacgccctctctgtgcctccgttttctgcatctgccaaaggggttaaacacttctgccccacttcaaattacaagattatggggagaacccaattaggtaggaaacatgaaaaacctttgatatttataaaatcatttttacgtgcaaaatataaccttaatatttgaagtgacccccattccccaaagcaatcaaaccgtcatgactttgcaatttggcacatcctagcttgttagagggcacttccgaaaaacacagccctgacagcaaaataaaggtctgatatgttggccccttctatggaaacaacgctgccaaatcctggagcaaaacctgaagtgtcttcatgtgcattctctggcaggccacagtcctgagcttgtaagatggtgcagcatgcagaccagacttgtccccaaggtctcagcgctgcggtctcactcctcccctcatttaagaagactatccttaccttttagtttcagcagtcctcaccaccaccatatccccagtgctgggatggcacacaggtgtccattcagatgagagttgggtcgctgagcattggttactcctgcagagtgtaatcagcaccccatccaactggcccgaaagcccagacctgcagcagaactctccaactctctatcagctttcagggttttctctcctgggaagggtgtaaaatcagcttgtcagattcttcttacagagagtatccaatcggtattggtggagcggctccctatttatacaataggaagcatgggtgcttagaaagtttatttcaggaggaaaatgggttcacacaaaaagcaaactacattctggtctgctcagggagaagcttgcctttgaactggaagatgttgggatgagcagggaaagcttagactttggagtcaggtttgtgttcagaatccagccctgctggctactaactaactgggagaccttaggcaaagcatgcaatcgctctgaatggcagtttcctcatttttaaacagggataataaaactaatattgcaggggagttacagggttaaataagatcctgtgtgtaaccccaagcattggatgactcatagaatggccttttttgtcagcataatcgtcatcattatttagatactttcttccttcactcacccagcaggtcagttttctgtgcaaacaaacctgtttaggattcttccaaatgttcttcctggggtctttgatatttgtttgttacatcctgctgaagttcgactgtgtttttattttttcatccaacttccatttttcactttttacatgattactcaatccttggggctgtccatgtcatctcttagatttcttaaaagacattttaatgtatggttaggttttatatttttattttttaaaaaagaaatagtcagtgttttcctcctttcaaccgagactatttctggattgtgtgctcctcgtcagttgacttgttttgcacacttttctttacttcatgtccccatcaacaaccgtcctgctccccacctcccccaggaaataaggggcctgctcctctccctactgtgaccctggaggctcttaagatgatgatggttttttttattgggctgagttcacgaattaggggcaggagctggaagtcgccctaggaacaccagatttcctggttctgttcaagttggcatttcttgtttggaataaactatttcttggacattc

SEQ ID NO: 20854 - DNA, 3241 bp, Homo sapiens
  misc_feature 1..3241: note = ENST00000510398
  source 1..3241: mol_type = unassigned DNA
gtagagagtgaagcagcaagactgcagagcctcatcaagaagtgtggagtgaagggaaggcttcagatggacaatttgtgtgctggggaaaaaatggaatgtgctgcaaattcccctgtggataagggtggacggctgctctgtcaactttgaccattttcagattctgcgggccattggtaaagggagttttggaaaggtatgcatcgtgcagaagcgagacactaagaaaatgtatgcaatgaagtacatgaacaagcagaagtgcatcgagagggatgaggttcggaatgttttccgggagctgcagatcatgcaagggctggagcaccccttcctggtcaatctgtggtactccttccaggatgaggaggacatgttcatggtggtggacctgctcctgggaggcgacctgcgctaccatctgcagcagaatgtgcatttcacagaggggactgtgaaactctacatctgtgagctggcactggccctggagtatcttcagaggtaccacatcatccacagagacatcaagccagacaatatcctgctggatgaacacggacatgttcacattacagacttcaacatagcgacggtagtgaaaggagcagaaagggcttcctccatggctggcaccaagccctacatggctccagaagtattccaggtgtacatggacagaggccccggatactcgtaccctgtcgactggtggtccctgggcatcacagcctatgagctgctgcggggctggaggccgtacgaaatccactcggtcacgcccatcgatgaaatcctcaacatgttcaaggtggagcgtgtccactactcctccacgtggtgcaaggggatggtggccctgctgaggaagctcctgaccaaggatcctgagagccgcgtgtccagccttcatgacatacagagcgtgccctacttggccgacatgaactgggacgcggtgttcaagaaggcactgatgcccggctttgtgcccaataaagggaggttgaactgcgatcccacatttgagcttgaagagatgattctagaatccaagccacttcacaaaaagaagaagcgattggcaaagaacagatccagggatggcacaaaggacagctgcccgctgaatggacacctgcagcactgtttggagactgtccgggaggaattcatcatattcaacagagagaagctcaggaggcagcagggacagggcagccagctcttggacaccgacagccgagggggaggccaggcccaaagcaagctccaggacgggtgcaacaacaacctcctcacccacacctgcacccgtggctgcagcagctgagcccacacttgttgctgctcaacaggactgcactcgtctctgccctgcccacccagagcccctctttgtgccctgatggtccctgtctcacccctgaaaacatcagatgcagaaaaagccctggacttggagctgggaagcctgggttctggtcccatctccatgactgattcacgtgtgacctcagacaagtcacgccctctctgtgcctccgttttctgcatctgccaaaggggttaaacacttctgccccacttcaaattacaagattatggggagaacccaattaggtaggaaacatgaaaaacctttgatatttataaaatcatttttacgtgcaaaatataaccttaatatttgaagtgacccccattccccaaagcaatcaaaccgtcatgactttgcaatttggcacatcctagcttgttagagggcacttccgaaaaacacagccctgacagcaaaataaaggtctgatatgttggccccttctatggaaacaacgctgccaaatcctggagcaaaacctgaagtgtcttcatgtgcattctctggcaggccacagtcctgagcttgtaagatggtgcagcatgcagaccagacttgtccccaaggtctcagcgctgcggtctcactcctcccctcatttaagaagactatccttaccttttagtttcagcagtcctcaccaccaccatatccccagtgctgggatggcacacaggtgtccattcagatgagagttgggtcgctgagcattggttactcctgcagagtgtaatcagcaccccatccaactggcccgaaagcccagacctgcagcagaactctccaactctctatcagctttcagggttttctctcctgggaagggtgtaaaatcagcttgtcagattcttcttacagagagtatccaatcggtattggtggagcggctccctatttatacaataggaagcatgggtgcttagaaagtttatttcaggaggaaaatgggttcacacaaaaagcaaactacattctggtctgctcagggagaagcttgcctttgaactggaagatgttgggatgagcagggaaagcttagactttggagtcaggtttgtgttcagaatccagccctgctggctactaactaactgggagaccttaggcaaagcatgcaatcgctctgaatggcagtttcctcatttttaaacagggataataaaactaatattgcaggggagttacagggttaaataagatcctgtgtgtaaccccaagcattggatgactcatagaatggccttttttgtcagcataatcgtcatcattatttagatactttcttccttcactcacccagcaggtcagttttctgtgcaaacaaacctgtttaggattcttccaaatgttcttcctggggtctttgatatttgtttgttacatcctgctgaagttcgactgtgtttttattttttcatccaacttccatttttcactttttacatgattactcaatccttggggctgtccatgtcatctcttagatttcttaaaagacattttaatgtatggttaggttttatatttttattttttaaaaaagaaatagtcagtgttttcctcctttcaaccgagactatttctggattgtgtgctcctcgtcagttgacttgttttgcacacttttctttacttcatgtccccatcaacaaccgtcctgctccccacctcccccaggaaataaggggcctgctcctctccctactgtgaccctggaggctcttaagatgatgatggttttttttattgggctgagttcacgaattaggggcaggagctggaagtcgccctaggaacaccagatttcctggttctgttcaagttggcatttcttgtttggaataaactatttcttgg

SEQ ID NO: 20855 - DNA, 460 bp, Homo sapiens
  misc_feature 1..460: note = ENST00000513705
  source 1..460: mol_type = unassigned DNA
tcttcaggaagcactccttaataaattgcttgcagatgaagcctcatctcaaagtctgcatctggaagaactcaactaagaaagctgcactttcgaaagagcagaatcgtgggtagaattgtattaatagatctctcgagctggctggagtcctacaggtactccttccaggatgaggaggacatgttcatggtggtggacctgctcctgggaggcgacctgcgctaccatctgcagcagaatgtgcatttcacagaggggactgtgaaactctacatctgtgagctggcactggccctggagtatcttcagaggtaccacatcatccacagcattttcatgaatttaaagcagatgcttcaaactctgtctttaaattcctcgttcctgttcccatggaccacttaattttaaaatgttaactcactaaaaggcaaataaacgatacactaaaagcaca

SEQ ID NO: 20856 - DNA, 798 bp, Homo sapiens
  misc_feature 1..798: note = ENST00000505508
  source 1..798: mol_type = unassigned DNA
ctcccctgctgccatgtgtaaatgcgtttacttctcctttgccttccgccatgattgtactccttccaggatgaggaggacatgttcatggtggtggacctgctcctgggaggcgacctgcgctaccatctgcagcagaatgtgcatttcacagaggggactgtgaaactctacatctgtgagctggcactggccctggagtatcttcagaggtaccacatcatccacagagacatcaagccagacaatatcctgctggatgaacacggacatgttcacattacagacttcaacatagcgacggtagtgaaaggagcagaaagggcttcctccatggctggcaccaagccctacatggaggccgtacgaaatccactcggtcacgcccatcgatgaaatcctcaacatgttcaaggtggagcgtgtccactactcctccacgtggtgcaaggggatggtggccctgctgaggaagctcctgaccaaggatcctgagagccgcgtgtccagccttcatgacatacagagcgtgccctacttggccgacatgaactgggacgcggtgttcaagaaggcactgatgcccggctttgtgcccaataaagggaggttgaactgcgatcccacatttgagcttgaagagatgattctagaatccaagccacttcacaaaaagaagaagcgattggcaaagaacagatccagggatggcacaaaggacagctgcccgctgaatggacacctgcagcactgtttggagactgtccgggaggaattcatcatattcaacagagagaa

SEQ ID NO: 20857 - DNA, 973 bp, Homo sapiens
  misc_feature 1..973: note = ENST00000511959
  source 1..973: mol_type = unassigned DNA
aactacatgctaatccctttgaatctggagctgacttagtcatgtttctgccttcagagagctacccagtgggggagatggacatgcaggggatgaggcaccagagagaacacaacactctctgccctcaaggagcttggagtcaagagaaaagggagacaactaagcaaaaatgcatgaggagatgaagagcatgggggaaatgaggaagcccctgtctagcctgggcaggagggagatggtaaggaagtgataatagcagaggcctattctgaggagtccactgtacctgtgaagagccttgtctggcacatgctccagaagtattccaggtgtacatggacagaggccccggatactcgtaccctgtcgactggtggtccctgggcatcacagcctatgagctgctgcggggctgggtaagacaggcacctgtgcggtacacacgaggggctgtgcagtgggggctcacgttgtacctggacgggcagagtcggcagggcccgcggtgcaggaaggagcactgggggagtcactgccccccaggtttcagtcctgatgcctgtgtgccgcctatgaacgccctgaacttctggtccaacccactcattgtacagatgggaaagaggcattcagtgggggagggtcttacacaaaggcccacagcggatcagtgacaagtcaaacatcaaagcgccttggcctcgtggtttcaaacactgtcctctttgaacccacaacacaaggtcttcatgtctgattttctagctgattggaaaatctttaaaggtgaagaccatgcttcttttttctctttgtttcacatcttccctgaatatctaactcagtgtcctataaaaatgggacattcaatcaatacgtatttgtattttattgcatttaaatttacaagctgaagatgattaatggggctatttggtggctgtaataacacatttttttgtttgagcag

SEQ ID NO: 20858 - DNA, 877 bp, Homo sapiens
  misc_feature 1..877: note = ENST00000508728
  source 1..877: mol_type = unassigned DNA
gttctaccatcagctccaagtgtgtgggggaggagggaatgtcaccttctctaggactgcagacatttgtcgcttgtctgatcatgacagccaggacaggatcactctgctgctgcttctaccctgagttctgaatggacttggggctgccaggcatgacaagctccagaagtattccaggtgtacatggacagaggccccggatactcgtaccctgtcgactggtggtccctgggcatcacagcctatgagctgctgcggggctggaggccgtacgaaatccactcggtcacgcccatcgatgaaatcctcaacatgttcaaggtggagcgtgtccactactcctccacgtggtgcaaggggatggtggccctgctgaggaagctcctgaccaaggatcctgagagccgcgtgtccagccttcatgacatacagagcgtgccctacttggccgacatgaactgggacgcggtgttcaagaaggcactgatgcccggctttgtgcccaataaagggaggttgaactgcgatcccacatttgagcttgaagagatgattctagaatccaagccacttcacaaaaagaagaagcgattggcaaagaacagatccagggatggcacaaaggacagctgcccgctgaatggacacctgcagcactgtttggagactgtccgggaggaattcatcatattcaacagagagaagctcaggaggcagcagggacagggcagccagctcttggacaccgacagccgagggggaggccaggcccaaagcaagctccaggacgggtgcaacaacaacctcctcacccacacctgcacccgtggctgcagcagctgagcccacacttgttgctgctcaacaggactgc

SEQ ID NO: 20859 - DNA, 1325 bp, Homo sapiens
  misc_feature 1..1325: note = ENST00000473980
  source 1..1325: mol_type = unassigned DNA
gtgactgattttggcttagcggtgaagaagcaaagtaggagtgaagccatgctgcaggccacatgtgggactcctatctatatggattacgtggagaaccaccctttttggcaagctcagaagagaagctttttgagttaataagaaaaggagaactacattttgaaaatgcagtctggaattccataagtgactgtgctaaaagtgttttgaaacaacttatgaaagtagatcctgctcacagaatcacagctaaggaactactagataaccagtggttaacaggcaataaactttcttcggtgagaccaaccaatgtattagagatgatgaaggaatggaaaaataacccagaaagtgttgaggaaaacacaacagaagagaagaataagccgtccactgaagaaaagttgaaaagttaccaaccctggggaaatgtccctgatgccaattacacttcagatgaagaggaggaaaaacagtctactgcttatgaaaagcaatttcctgcaaccagtaaggacaactttgatatgtgcagttcaagtttcacatctagcaaactccttccagctgaaatcaagggagaaatggagaaaacccctgtgactccaagccaaggaacagcaaccaagtaccctgctaaatccggcgccctgtccagaaccaaaaagaaactctaaggttccctccagtgttggacagtacaaaaacaaagctgctcttgttagcactttgatgagggggtaggaggggaagaagacagccctatgctgagcttgtagccttttagctccacagagccccgccatgtgtttgcaccagcttaaaattgaagctgcttatctccaaagcagcataagctgcacatggcattaaaggacagccaccagtaggcttggcagtgggctgcagtggaaatcaactcaagatgtacacgaaggttttttaggggggcagataccttcaatttaaggctgtgggcacacttgctcatttttacttcaaattcttatgtttaggcacagctatttataggggaaaacaagaggccaaatatagtaatggaggtgccaaataattatgtgcactttgcactagaagactttgttagaaaattactaataaacttgccatacgtattacagcagaagtgcttcagtcattcacatgtgttcgtgagattttaggttgctatagattgtttaagacagcttattttaaatgtagaaaaataggagattttgtaactgcttgccattaacttgctgctaaattcccaatgtattgattaaatcaataaaaaacagatgttactcagcaca

SEQ ID NO: 20860 - DNA, 4677 bp, Homo sapiens
  misc_feature 1..4677: note = ENST00000486305
  source 1..4677: mol_type = unassigned DNA
ttggaactgggtaatagacagaggttggaacagtttggagggctcagaacaagacaggaaaatgtgggacagtttggagctccctagagacttgttgaatgtctttgaacaaaatgctgataatgatatggatgatgaaattcaggctgaggtgctttcagatggagatgaggaacttcttgggaactggagcaaaggtgactcttgttacgttttactaaagcaactggcagcattttgcccctgccttagagatttgtggaactttaaacttgagagagatgatttagggtatctggtggaagaaatttctaagcagcaaagcattcaagaggcaacttgggtgctgttaaaggcattcagttttataagggaagcagagcataaaaatttggaaaatttgcagcctgacaatgcaatagaaaagaaaatcccattttctgaggagaaattcaagctggctgcagaaatttgcataagcaaccaggaggcaaatgttaatccccaagacaatgagaaaaatgtctccagggcatgtcagaggtcttcacagcagcccctcccattacccagagtactaggaggaaaaagtggtttcgtgggctgggcccaggattctcatgctgtgtgcagtctagagacttggtgccctgcatcctagccactccagccatggctgaaagggcccaacatagagctcgggccatggcctcagagggtgcaagcctcaagccttggctgctttaatgtggtgttgagtctgcgagtgcacagaagtgaagaattagggtttgggaacctccacatagatttcagaagatatatggaaacgcctggatgcgcaggcagtagtttgctgcaggggcaggatcttcagggagaacctcttctagggcagtgcagaagggaaatatggggtgggagcccccacacagagtccctactggggcactgcctagtggaactgtgagaagagggccaccattctccagaccctagaatagtagatccaccgacagcttgcaccatgcacctggaaaggccacagacacttaatgtcagcctgtgaaagcagccaggagggaggctgtaccttgcaaagctacagggacagagctgcccaagactatgggaacctacctcttgcatcagcgtgacctggatgtgagacatggagtcaaaggaggtcattttggagctttaagatttgactgccccactggattttggacttgcattgggcctgtagcctttttgttttggccaatttctcccatttgtaatggctatatttacccaatgcctatacccccattgtatctaggaagtaactaacttgcttttgattttacgggctcataggcagaagggacttaccttgtctcagatgtggacttttgagttaatgctgaaatgagttgagactttgggggactgttgggaaggcatgattggttttgaaatgtgaacatatgtgatttgggaagggccagagttggaatgatatggtttggctctatgtccccacccaaatttcaccttgtagctcccataattcccatgtgtcatgggagggaaccactgggagatgattgaatcagaagggtgggtcttttccatgttgttctaatgatagtgaatgggtctcacgagatctgatggttttaaaaacaggagtttctgtgtacaagccctctctttgcctgcttccatccatgtaagatgtgacatgctcctccttgccttctgacatgattgtgaagcttccccagtcatgtggaactgtaaatccaataaacctctttcttttgtaaattgcccagtctcagatatgtctttatcagcagcgtgaaaacggactaatacacatggtgaatgtgaaagtgatcacacatacagagagagagagagtggcattttgagagtggcatttctatggaaggctttgactagctgacccaaccagggcattacctagtggcattagttcagctgctctcccatgttctggttcctatgcacgatgggtccagaaactcttgttaattccctggagttgatttggatcagggagactgactcccccaaaaccaaattgataagaaatgaaggtgtaaatgagtttagctgtttattatttacaatgcaaaccaaaatggtgatgttggcaaaaccaatgtattctttctttataagcagaagttaaatgataagaggatggattcttggtttggatgatggttttatgggtagtggttatttttttctcagtgctgatctgtgttgaaatttttgtcacatattgcttttttttttttaaagcaaaaggaatcaaaagtgatttttcataagatacaggaaaagcattagttgttaaataaagaaacatttgttcagtagttactatgtgtcgattttgtagtatagctctcagaaatttgggatgttttggggtgaatgtattttatatctacacacacttatgtgtgtgtatatatataaatcatttctcctttttcttatgaagatatttcattaatatattatagtttgaaagagattcatttttatacttttgagtttttccacatttcaccattaggatttttatggttttcctccaaaggacacttaataaaattcatcaacgcttattttggttaattaagatgtgtttattaatattgaagcaaatatatagtgtcttctatttgattttaacttggagcagaatctcttttcccttgggtgagtatctgtcagtattatatgttcatttttaatagctgatgaatggcatagagagacaactctttttttttttttctccaggaaatctatacctttggaagaatattgggaaaagggagctttggaatagtcattgaagcgacagacaaggaaacagaaacgaagtgggcaattaaaaaagtgaacaaagaaaaggctggaagctctgctgtgaagttacttgaacgagaggtgaacattctgaaaagtgtaaaacatgaacacatcatacatctggaacaagtatttgaaacgccaaagaaaatgtaccttgtgatggagctttgtgaggatggagaactcaaagaaattctggataggaaagggcatttctcagagaatgagacaaggtggatcattcaaagtctcgcatcagctatagcatatcttcacaataatgatattgtacatagagatctgaaactggaaaatataatggttaaaagcagtcttattgatgataacaatgaaataaacttaaacataaaggtgactgattttggcttagcggtgaagaagcaaagtaggagtgaagccatgctgcaggccacatgtgggactcctatctatatggcccctgaagttatcagtgcccacgactatagccagcagtgtgacatttggagcataggcgtcgtaatgtacatgttattacgtggagaaccaccctttttggcaagctcagaagagaagctttttgagttaataagaaaaggagaactacattttgaaaatgcagtctggaattccataagtgactgtgctaaaagtgttttgaaacaacttatgaaagtagatcctgctcacagaatcacagctaaggaactactagataaccagtggttaacaggcaataaactttcttcggtgagaccaaccaatgtattagagatgatgaaggaatggaaaaataacccagaaagtgttgaggaaaacacaacagaagagaagaataagccgtccactgaagaaaagttgaaaagttaccaaccctggggaaatgtccctgatgccaattacacttcagatgaagaggaggaaaaacagtctactgcttatgaaaagcaatttcctgcaaccagtaaggacaactttgatatgtgcagttcaagtttcacatctagcaaactccttccagctgaaatcaagggagaaatggagaaaacccctgtgactccaagccaaggaacagcaaccaagtaccctgctaaatccggcgccctgtccagaaccaaaaagaaactctaaggttccctccagtgttggacagtacaaaaacaaagctgctcttgttagcactttgatgagggggtaggaggggaagaagacagccctatgctgagcttgtagccttttagctccacagagccccgccatgtgtttgcaccagcttaaaattgaagctgcttatctccaaagcagcataagctgcacatggcattaaaggacagccaccagtaggcttggcagtgggctgcagtggaaatcaactcaagatgtacacgaaggttttttaggggggcagataccttcaatttaaggctgtgggcacacttgctcatttttacttcaaattcttatgtttaggcacagctatttataggggaaaacaagaggccaaatatagtaatggaggtgccaaataattatgtgcactttgcactagaagactttgttagaaaattactaataaacttgccatacgtattacagcagaagtgcttcagtcattcacatgtgttcgtgagattttaggttgctatagattgtttaagacagcttattttaaatgtagaaaaataggagattttgtaactgcttgccattaacttgctgctaaattcccaatgtattgattaaatcaataaaaaacagatgttactcagc

SEQ ID NO: 20861 - DNA, 3103 bp, Homo sapiens
  misc_feature 1..3103: note = ENST00000447869
  source 1..3103: mol_type = unassigned DNA
atgtactcccaattacttctggaagtttctcaaagtactcctttatatgtactgcagagtgtatttttcttcctcctcaactgagatctttccaacttgccaccatgcagctgccaatggtcctagttaagtaaaatgctgccatacctattttagactcagggaaaaatagcacccactcatttttatttttgctcaatataaaaatgaggatacttatgaggatacttaaacttttaggattagctagttttctaaaaatcgaattattcactcctttgtaaagtatgtaataggaatttgctctaataatcaatagattaaggtttaaaatttgaaaccatagtaatgtatgtttaacaccaatattttaagcctttttaaaaaccacaacccacattaagaaatacatttcatactgtgatcaagtacacacgcacacacacactctatacatatatgtctgtccaattaaaagtttcacagaaatttccaaggaggtatgctaaatattatctctttgattctactttatttttaaaaagtggtatcaacccacaaaatggatttcataacccactacgcagtttgataagatgctgttttagaccatgcttttcaccagttttgtggtcctattttgtccttttcatgtctatacaggatgcttctagtgctagttgctagcttttctctgatttccaggatggtaataggttaagaatttctctaaatggttatttcttttctttctgcagctctcacgtgtgaatatgtgtctagtgcatccttaacctgaggacttcaccagttcgaaattacagttttcaccatcaactaccttatcctttttggcctggttttcttcctcaaacagtggaaacatttttaaagttgcttttgttgcagagttaaacaaatggctgatagtggcttagataaaaaatccacaaaatgccccgactgttcatctgcttctcagaaagatgtactttgtgtatgttccagcaaaacaagggttcctccagttttggtggtggaaatgtcacagacatcaagcattggtagtgcagaatctttaatttcactggagagaaaaaaagaaaaaaatatcaacagagatataacctccaggaaagatttgccctcaagaacctcaaatgtagagagaaaagcatctcagcaacaatggggtcggggcaactttacagaaggaaaagttcctcacataaggattgagaatggagctgctattgaggaaatctatacctttggaagaatattgggaaaagggagctttggaatagtcattgaagcgacagacaaggaaacagaaacgaagtgggcaattaaaaaagtgaacaaagaaaaggctggaagctctgctgtgaagttacttgaacgagaggtgaacattctgaaaagtgtaaaacatgaacacatcatacatctggaacaagtatttgaaacgccaaagaaaatgtaccttgtgatggagctttgtgaggatggagaactcaaagaaattctggataggaaagggcatttctcagagaatgagacaaggtggatcattcaaagtctcgcatcagctatagcatatcttcacaataatgatattgtacatagagatctgaaactggaaaatataatggttaaaagcagtcttattgatgataacaatgaaataaacttaaacataaaggtgactgattttggcttagcggtgaagaagcaaagtaggagtgaagccatgctgcaggccacatgtgggactcctatctatatggcccctgaagttatcagtgcccacgactatagccagcagtgtgacatttggagcataggcgtcgtaatgtacatgttattacgtggagaaccaccctttttggcaagctcagaagagaagctttttgagttaataagaaaaggagaactacattttgaaaatgcagtctggaattccataagtgactgtgctaaaagtgttttgaaacaacttatgaaagtagatcctgctcacagaatcacagctaaggaactactagataaccagtggttaacaggcaataaactttcttcggtgagaccaaccaatgtattagagatgatgaaggaatggaaaaataacccagaaagtgttgaggaaaacacaacagaagagaagaataagccgtccactgaagaaaagttgaaaagttaccaaccctggggaaatgtccctgatgccaattacacttcagatgaagaggaggaaaaacagtctactgcttatgaaaagcaatttcctgcaaccagtaaggacaactttgatatgtgcagttcaagtttcacatctagcaaactccttccagctgaaatcaagggagaaatggagaaaacccctgtgactccaagccaaggaacagcaaccaagtaccctgctaaatccggcgccctgtccagaaccaaaaagaaactctaaggttccctccagtgttggacagtacaaaaacaaagctgctcttgttagcactttgatgagggggtaggaggggaagaagacagccctatgctgagcttgtagccttttagctccacagagccccgccatgtgtttgcaccagcttaaaattgaagctgcttatctccaaagcagcataagctgcacatggcattaaaggacagccaccagtaggcttggcagtgggctgcagtggaaatcaactcaagatgtacacgaaggttttttaggggggcagataccttcaatttaaggctgtgggcacacttgctcatttttacttcaaattcttatgtttaggcacagctatttataggggaaaacaagaggccaaatatagtaatggaggtgccaaataattatgtgcactttgcactagaagactttgttagaaaattactaataaacttgccatacgtattacagcagaagtgcttcagtcattcacatgtgttcgtgagattttaggttgctatagattgtttaagacagcttattttaaatgtagaaaaataggagattttgtaactgcttgccattaacttgctgctaaattcccaatgtattgattaaatcaataaaaaacagatgttactcagc

SEQ ID NO: 20862 - DNA, 2707 bp, Homo sapiens
  misc_feature 1..2707: note = ENST00000315204
  source 1..2707: mol_type = unassigned DNA
gccggccggctggtaaccccccagcggagggaccgggccgagcccgcggacccctccgagtgtctcctggggcccagccgttggtaccccatttcccccgggtccggtatttggggtggtctctgtctgccccggttcatctccaccgtctcaccttcaccccatcttgggacgtgaaactttttgaaagtttagaagcgaacttactgtggggaccttcctctggggttagttctctggtgccaccttcagtgatctgtgtggcagctctgctgctcacttctggctttactgggttttggtatttaactgttgcttacgcacactggaaattttcacctgcagtttttcttctgcctaagctctcacgtgtgaatatgtgtctagtgcatccttaacctgaggacttcaccagttcgaaattacagttttcaccatcaactaccttatcctttttggcctggttttcttcctcaaacagtggaaacatttttaaagttgcttttgttgcagagttaaacaaatggctgatagtggcttagataaaaaatccacaaaatgccccgactgttcatctgcttctcagaaagatgtactttgtgtatgttccagcaaaacaagggttcctccagttttggtggtggaaatgtcacagacatcaagcattggtagtgcagaatctttaatttcactggagagaaaaaaagaaaaaaatatcaacagagatataacctccaggaaagatttgccctcaagaacctcaaatgtagagagaaaagcatctcagcaacaatggggtcggggcaactttacagaaggaaaagttcctcacataaggattgagaatggagctgctattgaggaaatctatacctttggaagaatattgggaaaagggagctttggaatagtcattgaagcgacagacaaggaaacagaaacgaagtgggcaattaaaaaagtgaacaaagaaaaggctggaagctctgctgtgaagttacttgaacgagaggtgaacattctgaaaagtgtaaaacatgaacacatcatacatctggaacaagtatttgaaacgccaaagaaaatgtaccttgtgatggagctttgtgaggatggagaactcaaagaaattctggataggaaagggcatttctcagagaatgagacaaggtggatcattcaaagtctcgcatcagctatagcatatcttcacaataatgatattgtacatagagatctgaaactggaaaatataatggttaaaagcagtcttattgatgataacaatgaaataaacttaaacataaaggtgactgattttggcttagcggtgaagaagcaaagtaggagtgaagccatgctgcaggccacatgtgggactcctatctatatggcccctgaagttatcagtgcccacgactatagccagcagtgtgacatttggagcataggcgtcgtaatgtacatgttattacgtggagaaccaccctttttggcaagctcagaagagaagctttttgagttaataagaaaaggagaactacattttgaaaatgcagtctggaattccataagtgactgtgctaaaagtgttttgaaacaacttatgaaagtagatcctgctcacagaatcacagctaaggaactactagataaccagtggttaacaggcaataaactttcttcggtgagaccaaccaatgtattagagatgatgaaggaatggaaaaataacccagaaagtgttgaggaaaacacaacagaagagaagaataagccgtccactgaagaaaagttgaaaagttaccaaccctggggaaatgtccctgatgccaattacacttcagatgaagaggaggaaaaacagtctactgcttatgaaaagcaatttcctgcaaccagtaaggacaactttgatatgtgcagttcaagtttcacatctagcaaactccttccagctgaaatcaagggagaaatggagaaaacccctgtgactccaagccaaggaacagcaaccaagtaccctgctaaatccggcgccctgtccagaaccaaaaagaaactctaaggttccctccagtgttggacagtacaaaaacaaagctgctcttgttagcactttgatgagggggtaggaggggaagaagacagccctatgctgagcttgtagccttttagctccacagagccccgccatgtgtttgcaccagcttaaaattgaagctgcttatctccaaagcagcataagctgcacatggcattaaaggacagccaccagtaggcttggcagtgggctgcagtggaaatcaactcaagatgtacacgaaggttttttaggggggcagataccttcaatttaaggctgtgggcacacttgctcatttttacttcaaattcttatgtttaggcacagctatttataggggaaaacaagaggccaaatatagtaatggaggtgccaaataattatgtgcactttgcactagaagactttgttagaaaattactaataaacttgccatacgtattacagcagaagtgcttcagtcattcacatgtgttcgtgagattttaggttgctatagattgtttaagacagcttattttaaatgtagaaaaataggagattttgtaactgcttgccattaacttgctgctaaattcccaatgtattgattaaatcaataaaaaacagatgttactcagc

SEQ ID NO: 20863 - DNA, 2558 bp, Homo sapiens
  misc_feature 1..2558: note = ENST00000396672
  source 1..2558: mol_type = unassigned DNA
gccggccggctggtaaccccccagcggagggaccgggccgagcccgcggacccctccgagtgtctcctggggcccagccgttggtaccccatttcccccgggtccggtatttggggtggtctctgtctgccccggttcatctccaccgtctcaccttcaccccatcttgggacgtgaaactttttgaaagtttagaagcgaacttactgtgggctctcacgtgtgaatatgtgtctagtgcatccttaacctgaggacttcaccagttcgaaattacagttttcaccatcaactaccttatcctttttggcctggttttcttcctcaaacagtggaaacatttttaaagttgcttttgttgcagagttaaacaaatggctgatagtggcttagataaaaaatccacaaaatgccccgactgttcatctgcttctcagaaagatgtactttgtgtatgttccagcaaaacaagggttcctccagttttggtggtggaaatgtcacagacatcaagcattggtagtgcagaatctttaatttcactggagagaaaaaaagaaaaaaatatcaacagagatataacctccaggaaagatttgccctcaagaacctcaaatgtagagagaaaagcatctcagcaacaatggggtcggggcaactttacagaaggaaaagttcctcacataaggattgagaatggagctgctattgaggaaatctatacctttggaagaatattgggaaaagggagctttggaatagtcattgaagcgacagacaaggaaacagaaacgaagtgggcaattaaaaaagtgaacaaagaaaaggctggaagctctgctgtgaagttacttgaacgagaggtgaacattctgaaaagtgtaaaacatgaacacatcatacatctggaacaagtatttgaaacgccaaagaaaatgtaccttgtgatggagctttgtgaggatggagaactcaaagaaattctggataggaaagggcatttctcagagaatgagacaaggtggatcattcaaagtctcgcatcagctatagcatatcttcacaataatgatattgtacatagagatctgaaactggaaaatataatggttaaaagcagtcttattgatgataacaatgaaataaacttaaacataaaggtgactgattttggcttagcggtgaagaagcaaagtaggagtgaagccatgctgcaggccacatgtgggactcctatctatatggcccctgaagttatcagtgcccacgactatagccagcagtgtgacatttggagcataggcgtcgtaatgtacatgttattacgtggagaaccaccctttttggcaagctcagaagagaagctttttgagttaataagaaaaggagaactacattttgaaaatgcagtctggaattccataagtgactgtgctaaaagtgttttgaaacaacttatgaaagtagatcctgctcacagaatcacagctaaggaactactagataaccagtggttaacaggcaataaactttcttcggtgagaccaaccaatgtattagagatgatgaaggaatggaaaaataacccagaaagtgttgaggaaaacacaacagaagagaagaataagccgtccactgaagaaaagttgaaaagttaccaaccctggggaaatgtccctgatgccaattacacttcagatgaagaggaggaaaaacagtctactgcttatgaaaagcaatttcctgcaaccagtaaggacaactttgatatgtgcagttcaagtttcacatctagcaaactccttccagctgaaatcaagggagaaatggagaaaacccctgtgactccaagccaaggaacagcaaccaagtaccctgctaaatccggcgccctgtccagaaccaaaaagaaactctaaggttccctccagtgttggacagtacaaaaacaaagctgctcttgttagcactttgatgagggggtaggaggggaagaagacagccctatgctgagcttgtagccttttagctccacagagccccgccatgtgtttgcaccagcttaaaattgaagctgcttatctccaaagcagcataagctgcacatggcattaaaggacagccaccagtaggcttggcagtgggctgcagtggaaatcaactcaagatgtacacgaaggttttttaggggggcagataccttcaatttaaggctgtgggcacacttgctcatttttacttcaaattcttatgtttaggcacagctatttataggggaaaacaagaggccaaatatagtaatggaggtgccaaataattatgtgcactttgcactagaagactttgttagaaaattactaataaacttgccatacgtattacagcagaagtgcttcagtcattcacatgtgttcgtgagattttaggttgctatagattgtttaagacagcttattttaaatgtagaaaaataggagattttgtaactgcttgccattaacttgctgctaaattcccaatgtattgattaaatcaataaaaaacagatgttactcagc

SEQ ID NO: 20864 - DNA, 1991 bp, Homo sapiens
  misc_feature 1..1991: note = ENST00000358872
  source 1..1991: mol_type = unassigned DNA
gctgtttgtcctcgcgcggcccccgtccactgccctgcggttgctctgcgggctgaaaagtttctcccggtgcagaattccgggctcagcgacagcctgcgccgagtgtgcgcacctgtcggagacccgccagtccgccggccgcggaaatctatacctttggaagaatattgggaaaagggagctttggaatagtcattgaagcgacagacaaggaaacagaaacgaagtgggcaattaaaaaagtgaacaaagaaaaggctggaagctctgctgtgaagttacttgaacgagaggtgaacattctgaaaagtgtaaaacatgaacacatcatacatctggaacaagtatttgaaacgccaaagaaaatgtaccttgtgatggagctttgtgaggatggagaactcaaagaaattctggataggaaagggcatttctcagagaatgagacaaggtggatcattcaaagtctcgcatcagctatagcatatcttcacaataatgatattgtacatagagatctgaaactggaaaatataatggttaaaagcagtcttattgatgataacaatgaaataaacttaaacataaaggtgactgattttggcttagcggtgaagaagcaaagtaggagtgaagccatgctgcaggccacatgtgggactcctatctatatggcccctgaagttatcagtgcccacgactatagccagcagtgtgacatttggagcataggcgtcgtaatgtacatgttattacgtggagaaccaccctttttggcaagctcagaagagaagctttttgagttaataagaaaaggagaactacattttgaaaatgcagtctggaattccataagtgactgtgctaaaagtgttttgaaacaacttatgaaagtagatcctgctcacagaatcacagctaaggaactactagataaccagtggttaacaggcaataaactttcttcggtgagaccaaccaatgtattagagatgatgaaggaatggaaaaataacccagaaagtgttgaggaaaacacaacagaagagaagaataagccgtccactgaagaaaagttgaaaagttaccaaccctggggaaatgtccctgatgccaattacacttcagatgaagaggaggaaaaacagtctactgcttatgaaaagcaatttcctgcaaccagtaaggacaactttgatatgtgcagttcaagtttcacatctagcaaactccttccagctgaaatcaagggagaaatggagaaaacccctgtgactccaagccaaggaacagcaaccaagtaccctgctaaatccggcgccctgtccagaaccaaaaagaaactctaaggttccctccagtgttggacagtacaaaaacaaagctgctcttgttagcactttgatgagggggtaggaggggaagaagacagccctatgctgagcttgtagccttttagctccacagagccccgccatgtgtttgcaccagcttaaaattgaagctgcttatctccaaagcagcataagctgcacatggcattaaaggacagccaccagtaggcttggcagtgggctgcagtggaaatcaactcaagatgtacacgaaggttttttaggggggcagataccttcaatttaaggctgtgggcacacttgctcatttttacttcaaattcttatgtttaggcacagctatttataggggaaaacaagaggccaaatatagtaatggaggtgccaaataattatgtgcactttgcactagaagactttgttagaaaattactaataaacttgccatacgtattacagcagaagtgcttcagtcattcacatgtgttcgtgagattttaggttgctatagattgtttaagacagcttattttaaatgtagaaaaataggagattttgtaactgcttgccattaacttgctgctaaattcccaatgtattgattaaatcaataaaaaacagatgttactcagc

SEQ ID NO: 20865 - DNA, 1243 bp, Homo sapiens
  misc_feature 1..1243: note = ENST00000444064
  source 1..1243: mol_type = unassigned DNA
gttaaaagcagtcttattgatgataacaatgaaataaacttaaacataaaggtgactgattttggcttagcggtgaagaagcaaagtaggagtgaagccatgctgcaggccacatgtgggactcctatctatatggcccctgaagttatcagtgcccacgactatagccagcagtgtgacatttggagcataggcgtcgtaatgtacatgttattacgtggagaaccaccctttttggcaagctcagaagagaagctttttgagttaataagaaaaggagaactacattttgaaaatgcagtctggaattccataagtgactgtgctaaaagtgttttgaaacaacttatgaaagtagatcctgctcacagaatcacagctaaggaactactagataaccagtggttaacatctactgcttatgaaaagcaatttcctgcaaccagtaaggacaactttgatatgtgcagttcaagtttcacatctagcaaactccttccagctgaaatcaagggagaaatggagaaaacccctgtgactccaagccaaggaacagcaaccaagtaccctgctaaatccggcgccctgtccagaaccaaaaagaaactctaaggttccctccagtgttggacagtacaaaaacaaagctgctcttgttagcactttgatgagggggtaggaggggaagaagacagccctatgctgagcttgtagccttttagctccacagagccccgccatgtgtttgcaccagcttaaaattgaagctgcttatctccaaagcagcataagctgcacatggcattaaaggacagccaccagtaggcttggcagtgggctgcagtggaaatcaactcaagatgtacacgaaggttttttaggggggcagataccttcaatttaaggctgtgggcacacttgctcatttttacttcaaattcttatgtttaggcacagctatttataggggaaaacaagaggccaaatatagtaatggaggtgccaaataattatgtgcactttgcactagaagactttgttagaaaattactaataaacttgccatacgtattacagcagaagtgcttcagtcattcacatgtgttcgtgagattttaggttgctatagattgtttaagacagcttattttaaatgtagaaaaataggagattttgtaactgcttgccattaacttgctgctaaattcccaatgtattgattaaatcaataaaaaacagatgt

SEQ ID NO: 20866 - DNA, 1895 bp, Homo sapiens
  misc_feature 1..1895: note = ENST00000534493
  source 1..1895: mol_type = unassigned DNA
agaattccgggctcagcgacagcctgcgccgagtgtgcgcacctgtcggagacccgccagtccgccggccgcgatggggagccagataaacgttacataactagaaagtggcagagcaaaacaagggttcctccagttttggtggtggaaatgtcacagacatcaagcattggtagtgcagaatctttaatttcactggagagaaaaaaagaaaaaaatatcaacagagatataacctccaggaaagatttgccctcaagaacctcaaatgtagagagaaaagcatctcagcaacaatggggtcggggcaactttacagaaggaaaagttcctcacataaggattgagaatggagctgctattgaggaaatctatacctttggaagaatattgggaaaagggagctttggaatagtcattgaagcgacagacaaggaaacagaaacgaagtgggcaattaaaaaagtgaacaaagaaaaggctggaagctctgctgtgaagttacttgaacgagaggtgaacattctgaaaagtgtaaaacatgaacacatcatacatctggaacaagtatttgaaacgccaaagaaaatgtaccttgtgatggagctttgtgaggatggagaactcaaagaaattctggataggaaagggcatttctcagagaatgagacaaggtggatcattcaaagtctcgcatcagctatagcatatcttcacaataatgatattgtacatagagatctgaaactggaaaatataatggttaaaagcagtcttattgatgataacaatgaaataaacttaaacataaaggtgactgattttggcttagcggtgaagaagcaaagtaggagtgaagccatgctgcaggccacatgtgggactcctatctatatggcccctgaagttatcagtgcccacgactatagccagcagtgtgacatttggagcataggcgtcgtaatgtacatgttattacgtggagaaccaccctttttggcaagctcagaagagaagctttttgagttaataagaaaaggagaactacattttgaaaatgcagtctggaattccataagtgactgtgctaaaagtgttttgaaacaacttatgaaagtagatcctgctcacagaatcacagctaaggaactactagataaccagtggttaacaggcaataaactttcttcggtgagaccaaccaatgtattagagatgatgaaggaatggaaaaataacccagaaagtgttgaggaaaacacaacagaagagaagaataagccgtccactgaagaaaagttgaaaagttaccaaccctggggaaatgtccctgatgccaattacacttcagatgaagaggaggaaaaacagtctactgcttatgaaaagcaatttcctgcaaccagtaaggacaactttgatatgtgcagttcaagtttcacatctagcaaactccttccagctgaaatcaagggagaaatggagaaaacccctgtgactccaagccaaggaacagcaaccaagtaccctgctaaatccggcgccctgtccagaaccaaaaagaaactctaaggttccctccagtgttggacagtacaaaaacaaagctgctcttgttagcactttgatgagggggtaggaggggaagaagacagccctatgctgagcttgtagccttttagctccacagagccccgccatgtgtttgcaccagcttaaaattgaagctgcttatctccaaagcagcataagctgcacatggcattaaaggacagccaccagtaggcttggcagtgggctgcagtggaaatcaactcaagatgtacacgaaggttttttaggggggcagataccttcaatttaaggctgtgggcacacttgctcatttttacttc

SEQ ID NO: 20867 - DNA, 921 bp, Homo sapiens
  misc_feature 1..921: note = ENST00000526517
  source 1..921: mol_type = unassigned DNA
ggcttggagaaggggctttgcacccgccgccgctgtttgtcctcgcgcggcccccgtccactgccctgcggttgctctgcgggctgaaaagtttctcccggtgcagaattccgggctcagcgacagcctgcgccgagtgtgcgcacctgtcggagacccgccagtccgccggccgcggtgactgattttggcttagcggtgaagaagcaaagtaggagtgaagccatgctgcaggccacatgtgggactcctatctatatggcccctgaagttatcagtgcccacgactatagccagcagtgtgacatttggagcataggcgtcgtaatgtacatgttattacgtggagaaccaccctttttggcaagctcagaagagaagctttttgagttaataagaaaaggagaactacattttgaaaatgcagtctggaattccataagtgactgtgctaaaagtgttttgaaacaacttatgaaagtagatcctgctcacagaatcacagctaaggaactactagataaccagtggttaacaacggagtctcgctctgtcaccaggctggagtgcagtgacacaatctcggctcactgcaacctctgcctcctgggttcaagtcaactgcaacctctgcctcctgggttcaagtgattctcctgcctcagcctcctgagggactaaaggcatgcaccaccatgcccagcaattttttgtatttttagtagacacagaatttcaccatattggccaggatggtctcgatctcttggcctcatcatctgcccggctcggcctcccaaagtgctgggattacaggtgtgagccaccatgcccggccgataatattcttaaaagatcactctgactattggggtgggggggagtggcttggaaatagggaattagatagatgttgaagta

SEQ ID NO: 20868 - DNA, 635 bp, Homo sapiens
  misc_feature 1..635: note = ENST00000524760
  source 1..635: mol_type = unassigned DNA
gcagaatctttaatttcactggagagaaaaaaagaaaaaaatatcaacagagatataacctccaggaaagatttgccctcaagaacctcaaatgtagagagaaaagcatctcagcaacaatggggtcggggcaactttacagaaggaaaagttcctcacataaggattgagaatggagctgctattgaggctggaagctctgctgtgaagttacttgaacgagaggtgaacattctgaaaagtgtaaaacatgaacacatcatacatctggaacaagtatttgaaacgccaaagaaaatgtaccttgtgatggagctttgtgaggatggagaactcaaagaaattctggataggaaagggcatttctcagagaatgagacaaggtggatcattcaaagtctcgcatcagctatagcatatcttcacaataatgatattgtacatagagatctgaaactggaaaatataatggttaaaagcagtcttattgatgataacaatgaaataaacttaaacataaaggtgactgattttggcttagcggtgaagaagcaaagtaggagtgaagccatgctgcaggccacatgtgggactcctatctatatggcccctgaagttatcagtgcccacgacta

SEQ ID NO: 20869 - DNA, 946 bp, Homo sapiens
  misc_feature 1..946: note = ENST00000418597
  source 1..946: mol_type = unassigned DNA
aggccgttgctatggcaacgcggtggaaaaacgggcctctgggtatctcgctgccggccggctggtaaccccccagcggagggaccgggccgagcccgcggacccctccgagtgtctcctggggcccagccgttggtaccccatttcccccgggtccggtatttggggtggtctctgtctgccccggttcatctccaccgtctcaccttcaccccatcttgggacgtgaaactttttgaaagtttagaagcgaacttactgtgggcaaaacaagggttcctccagttttggtggtggaaatgtcacagacatcaagcattggtagtgcagaatctttaatttcactggagagaaaaaaagaaaaaaatatcaacagagatataacctccaggaaagatttgccctcaagaacctcaaatgtagagagaaaagcatctcagcaacaatggggtcggggcaactttacagaaggaaaagttcctcacataaggattgagaatggagctgctattgaggaaatctatacctttggaagaatattgggaaaagggagctttggaatagtcattgaagcgacagacaaggaaacagaaacgaagtgggcaattaaaaaagtgaacaaagaaaaggctggaagctctgctgtgaagttacttgaacgagaggtgaacattctgaaaagtgtaaaacatgaacacatcatacatctggaacaagtatttgaaacgccaaagaaaatgtaccttgtgatggagctttgtgaggatggagaactcaaagaaattctggataggaaagggcatttctcagagaatgagacaaggtggatcattcaaagtctcgcatcagctatagcatatcttcacaataatgatattgtacatagagatctgaaactggaaaatataatggttaaaagcagtcttattgatgataacaatgaaat

SEQ ID NO: 20870 - DNA, 767 bp, Homo sapiens
  misc_feature 1..767: note = ENST00000422559
  source 1..767: mol_type = unassigned DNA
ggtgcagaattccgggctcagcgacagcctgcgccgagtgtgcgcacctgtcggagacccgccagtccgccggccgcggcagggccactacttctcagcacatccggccttctggctcatctcctccctgcatctcactacgcccctccccactccaggcaaaacaagggttcctccagttttggtggtggaaatgtcacagacatcaagcattggtagtgcagaatctttaatttcactggagagaaaaaaagaaaaaaatatcaacagagatataacctccaggaaagatttgccctcaagaacctcaaatgtagagagaaaagcatctcagcaacaatggggtcggggcaactttacagaaggaaaagttcctcacataaggattgagaatggagctgctattgaggaaatctatacctttggaagaatattgggaaaagggagctttggaatagtcattgaagcgacagacaaggaaacagaaacgaagtgggcaattaaaaaagtgaacaaagaaaaggctggaagctctgctgtgaagttacttgaacgagaggtgaacattctgaaaagtgtaaaacatgaacacatcatacatctggaacaagtatttgaaacgccaaagaaaatgtaccttgtgatggagctttgtgaggatggagaactcaaagaaattctggataggaaagggcatttctcagagaatgagacaaggtggatcattcaaagtctcgcatcagctatagcatatcttcacaataatg

SEQ ID NO: 20871 - DNA, 709 bp, Homo sapiens
  misc_feature 1..709: note = ENST00000457885
  source 1..709: mol_type = unassigned DNA
gcctgaagttaaatcattttggaaagtgatacagctctcacgtgtgaatatgtgtctagtgcatccttaacctgaggacttcaccagttcgaaattacagttttcaccatcaactaccttatcctttttggcctggttttcttcctcaaacagtggaaacatttttaaagttgcttttgttgcagagttaaacaaatggctgatagtggcttagataaaaaatccacaaaatgccccgactgttcatctgcttctcagaaagatgtactttgtgtatgttccagcaaaacaagggttcctccagttttggtggtggaaatgtcacagacatcaagcattggtagtgcagaatctttaatttcactggagagaaaaaaagaaaaaaatatcaacagagatataacctccaggaaagatttgccctcaagaacctcaaatgtagagagaaaagcatctcagcaacaatggggtcggggcaactttacagaaggaaaagttcctcacataaggattgagaatggagctgctattgaggaaatctatacctttggaagaatattgggaaaagggagctttggaatagtcattgaagcgacagacaaggaaacagaaacgaagtgggcaattaaaaaagtgaacaaagaaaaggctggaagctctgctgtgaagttacttgaacgagaggtgaacattctgaaaagtgtaaaac

SEQ ID NO: 20872 - DNA, 808 bp, Homo sapiens
  misc_feature 1..808: note = ENST00000532336
  source 1..808: mol_type = unassigned DNA
tggaaaaacgggcctctgggtatctcgctgccggccggctggtaaccccccagcggagggaccgggccgagcccgcggacccctccgagtgtctcctggggcccagccgttggtaccccatttcccccgggtccggtatttggggtggtctctgtctgccccggttcatctccaccgtctcaccttcaccccatcttgggacgtgaaactttttgaaagtttagaagcgaacttactgtgggaccaacttgcttccagattgcttacacctggggagacaataccaccatgaagatgacagataacccacgatgaagtgctaagttgtttgctatggtagtagctggaattcagaggggagagacttatggctaccagatccaagatagctctcacgtgtgaatatgtgtctagtgcatccttaacctgaggacttcaccagttcgaaattacagttttcaccatcaactaccttatcctttttggcctggttttcttcctcaaacagtggaaacatttttaaagttgcttttgttgcagagttaaacaaatggctgatagtggcttagataaaaaatccacaaaatgccccgactgttcatctgcttctcagaaagatgtactttgtgtatgttccagcaaaacaagggttcctccagttttggtggtggaaatgtcacagacatcaagcattggtagtgcagaatctttaatttcactggagagaaaaaaagaaaaaaatatcaacagagatataacctccaggaaagatttggtaaatatcaaagattccacatctaagcacaag

SEQ ID NO: 20873 - DNA, 758 bp, Homo sapiens
  misc_feature 1..758: note = ENST00000431279
  source 1..758: mol_type = unassigned DNA
tgggtatctcgctgccggccggctggtaaccccccagcggagggaccgggccgagcccgcggacccctccgagtgtctcctggggcccagccgttggtaccccatttcccccgggtccggtatttggggtggtctctgtctgccccggttcatctccaccgtctcaccttcaccccatcttgggacgtgaaactttttgaaagtttagaagcgaacttactgtggggcagggccactacttctcagcacatccggccttctggctcatctcctccctgcatctcactacgcccctccccactccagggcctgaagttaaatcattttggaaagtgatacaggagaggactctgctatgaaacttcctgagtgaaatgataagtggcatgaagaaaaacaaagcaagctctcacgtgtgaatatgtgtctagtgcatccttaacctgaggacttcaccagttcgaaattacagttttcaccatcaactaccttatcctttttggcctggttttcttcctcaaacagtggaaacatttttaaagttgcttttgttgcagagttaaacaaatggctgatagtggcttagataaaaaatccacaaaatgccccgactgttcatctgcttctcagaaagatgtactttgtgtatgttccagcaaaacaagggttcctccagttttggtggtggaaatgtcacagacatcaagcattggtagtgcagaatctttaatttcactggagagaaaaaaagaaaaaaa

SEQ ID NO: 20874 - DNA, 562 bp, Homo sapiens
  misc_feature 1..562: note = ENST00000454443
  source 1..562: mol_type = unassigned DNA
gtgcagccggcacctcccggccaaccccgcggcttggagaaggggctttgcacccgccgccgctgtttgtcctcgcgcggcccccgtccactgccctgcggttgctctgcgggctgaaaagtttctcccggtgcagaattccgggctcagcgacagcctgcgccgagtgtgcgcacctgtcggagacccgccagtccgccggccgcggcagggccactacttctcagcacatccggccttctggctcatctcctccctgcatctcactacgcccctccccactccaggctctcacgtgtgaatatgtgtctagtgcatccttaacctgaggacttcaccagttcgaaattacagttttcaccatcaactaccttatcctttttggcctggttttcttcctcaaacagtggaaacatttttaaagttgcttttgttgcagagttaaacaaatggctgatagtggcttagataaaaaatccacaaaatgccccgactgttcatctgcttctcagaaagatgtactttgtgtatgttccagcaaaacaagggttcctccagtttt

SEQ ID NO: 20875 - DNA, 582 bp, Homo sapiens
  misc_feature 1..582: note = ENST00000526360
  source 1..582: mol_type = unassigned DNA
acacaggagggatgggtcggcagagtttgtaagtttggatgggtaataacttaacccaggggattgttggtggaggaacgagggagtcctgtagctagagataggcagaagcagacaggatatttgggttctaggtaagcaaggtgcatctaagacctaagaagtcttcagaggcagcagagacgaacaaatgaacgtgaaggcagggccactacttctcagcacatccggccttctggctcatctcctccctgcatctcactacgcccctccccactccagggtaaattccaataatgctgctctgttccagatggagttcatgttgactgagctctcacgtgtgaatatgtgtctagtgcatccttaacctgaggacttcaccagttcgaaattacagttttcaccatcaactaccttatcctttttggcctggttttcttcctcaaacagtggaaacatttttaaagttgcttttgttgcagagttaaacaaatggctgatagtggcttagataaaaaatccacaaaatgccccgactgttcatctgcttctcagaaagatgtactttgtgtatgttcc

SEQ ID NO: 20876 - DNA, 545 bp, Homo sapiens
  misc_feature 1..545: note = ENST00000541191
  source 1..545: mol_type = unassigned DNA
acggcagtgaggtgaggctggtgagaggggaagtggcgacagttcagtcaactccctcaaaaccagtctggccttcaccaggcggagatgggtggggccgggaagacgggcgttgacgacagaaggctacttccggctgtgtttccgttactatggcaatgacggcagggactacaacaacctttcctatgagcaaccatacccgggaaagagtgactgtagccaagctcacattggagaatttttatagcaacctaattttacagcatgaagagagagaaaccaggcagaagaaattagaagtggccatggaagaagaaggattagcagatgaagagaaaaagttacgtcgatcacaacacgctcgcaaagaaacagagttcttacggctcaaaaggaccagacttggcttggatgactttgagtctctgaaagttataggaagaggagcttttggagaggtgcggttggtccagaagaaagatacaggccatatctatgcaatgaagatattgagaaagtctgatatgcttgaaaaagagcag

SEQ ID NO: 20877 - DNA, 5068 bp, Homo sapiens
  misc_feature 1..5068: note = ENST00000389032
  source 1..5068: mol_type = unassigned DNA
gagagttcagggaggccgccctgagattccggcgaggccgcgggtcccacctcccgggggcggggcgagggcggagcggggagaagggagctgacgggcgcccggccggctgcggtccgtgcggaggctgagccggccgcgggcgcgaccggaggcagtttccgttactatggcaatgacggcagggactacaacaacctttcctatgagcaaccatacccgggaaagagtgactgtagccaagctcacattggagaatttttatagcaacctaattttacagcatgaagagagagaaaccaggcagaagaaattagaagtggccatggaagaagaaggattagcagatgaagagaaaaagttacgtcgatcacaacacgctcgcaaagaaacagagttcttacggctcaaaaggaccagacttggcttggatgactttgagtctctgaaagttataggaagaggagcttttggagaggtgcggttggtccagaagaaagatacaggccatatctatgcaatgaagatattgagaaagtctgatatgcttgaaaaagagcaggtggcccatatccgagcagaaagagatattttggtagaagcagatggtgcctgggtggtgaagatgttttacagttttcaggataagaggaatctttatctaatcatggaatttctccctggaggtgacatgatgacattgctaatgaagaaagacaccttgacagaagaggaaacacagttctacatttcagagactgttctggcaatagatgcgatccaccagttgggtttcatccatcgggatattaagccagacaaccttttattggatgccaagggtcatgtaaaattatctgattttggtttatgtacgggattaaagaaagctcacaggactgaattttatagaaatctcacacacaacccaccaagtgacttctcatttcagaacatgaactcaaagaggaaagcagaaacttggaagaagaacaggagacaactggcatattccacagttgggacaccagattacattgctccagaagtattcatgcagactggttacaacaaattgtgtgactggtggtctttgggagtgattatgtatgaaatgctaataggatatccacctttctgctctgaaacacctcaagaaacgtacagaaaagtgatgaactggaaagaaactctggtatttcctccagaggtacctatatctgagaaagccaaggacttaattctcagattttgtattgattctgaaaacagaattggaaatagtggagtagaagaaataaaaggtcatcccttttttgaaggtgtcgactgggagcacataagggaaaggccagcagcaatccctatagaaatcaaaagcattgatgatacttcaaattttgatgacttccctgaatctgatattttacaaccagtgccaaataccacagaaccggactacaaatccaaagactgggtttttctcaattatacctataaaaggtttgaagggttgactcaacgtggctctatccccacctacatgaaagctgggaagttatgaatgaagataacattcacccataaccaagagaactcaggtagctgcatcaccaggcttgcttggcgtagataacaatacactgaaatactcctgaagatggtggtgcttattgactacaagaggaaattctacaggattaggatttctaagactactataggaattggttggcagtgccagctggctcttttttttaatattttattatttttgttaactttattatatgaaggtactggaataaaaggaacagacatccctttctaactgcactgcctacatgcgtattaaggtccattctgcctgtgtgtgctgtggctttgaactgtaacacctctaatcaattcaggagaaacacatatcatttaaagcaacataggctaacctgtaggtaacactgcagtattgatgttttactgcaaatcttatgggtctagataatcagtaaaagccatcttccatagttggtgttagaacattgccctattggtttggacatctgtagaatatatatgaagacaatttctgtaatggttttaagagatttaaaaagaaattcactggttctttacaaaatagaatttatcatcaagttattacacaaacttcacagtaaggagtgacaagtttataataaggaagacaaagtttaacaccttcactcaagcactccactaatatatttacgttgcattcagaaatactgatgaccttcatatacgtagtctgtatactcatagggagatgtactgtattatataacatgtaaagttgattttcttgtgacaagagaacttctttttttaacaagaggacatggcattattttaatttgattatggtgagttgaatttaagacatgaccatgaaggctgcttgtagaattagtgtatttttattaaactatttttttaaatgtcaaacttctatcatgtaaatggacttatagagaacaaaaagctatttactttggttttctagaaagttgttacatatcatggctggttaacttttatttcttttgatgaaaatttttcctttgatagtacttgtattattgtgccattattttcttatgctccaaatgtaccaaagatcttgaacagagtggatgttcacaactgagtagaattttcctttcctgtgggcatgctgtattcagacctgacagatctttgatagaggtcagcttattaaagggcaatattgttcttgtttagctacatcactgtggtgaatatagatggaattaaggaagtaaatgcaggccagggggttgtgatgagaggataggggagataatatcagcatcaaattctttgggtatctctctaagaattaaataatcttttctagcttaatattttaattctaattcaaacaactctgaggttttggtttcattagtaatagttgaggaataatatactagcaaagaatggcctaatgtttgtcataactgttaatggatgaaattttttaaagatacaaccatgataaccattataaatgatctatgatcaaaatctaaagtgatgaattatttgtaggaatgtcttcctaatggggaagaattgcataggagcattatgcaaatctacacaagcttttataaatgttgctgctgggtagctccacagtgtttcataaggccatcctgtttcccccaactcccccatttttggtttgtttctttttaaatatttgttgagtacttacgtgtttatctaacagttcacttccatttttctagtctggattttttgagtatttaggaaagagagctattaaaaactggggatttctcaatgtgactaactctaatttttctaattataactgcctttaattaacataatattaacttttgctgaggtttatgagattttctcaccccacatcgctcccctttttttaaaaaggactgttttgctagtgtgataatgaataggtaagatatgagataattgcaacattgtctagttctagtatggtaactattcttgaaatggtattgaaaaataccgttaattcaaattgacagagattgataaaaagaaactgatttacctaagtttactttttaattgcataatagagcattttttgttttgagttccctcattcttattaccagaaagagcttgcaaatagttttactttcttggcactggaagggtagttctggaaagctactttgttgagagtctcattcttccctggagttaatagagtgattcacaatctttggggttttctcctcatcaaaagcatttcttaagtgcctatctaaaagcaattaaagactgtgtctgccctttagaagctaagaatttgattcatgatgcaaattaactagataatttgcaaagtacccttgagattgaattttctctattatatatttcccatatttcaggtgaataatttaatttaaatgacaaaaccctatctagtcaactgggcataatgacattttctttaaattagactctattttgaattaaaagagttttattataaaccgtgtgtttttggtttttctaagtatatagaaagcttgtataattcagatttatcaatttcctgatttaatgtagactttgacttttttattaaaaacctttgtattaaagcaagttatgttatttttcttttatgcatttattactaacatagctttaaatctttaaatgtattgaagcattgtgctgtctgaaaataaggaattgcttataaaccagccacttctgaatacaatatgtagctgatttaataagctagttagtgaatggaaaataagtgtggagtattaaaaatgttctttggttggtaaggcctaagatagggtttcatttatttctatactttttctgttttttaaacacctgcatatttttatgtaaatctctaaatttaaaatattttaagtacatttatttttggtgttttattgtataaaaccttagacaatcaatcagtcagtctttactgacaggagcagcagctatctgtcttttgctgatctacaaataaatgaattgagaatttagtccatagaggtccctggctaccaaacacattctcctttgaattgttaaaattcagaacattcaaaataactgttttgctacaacccatgattattttcctgttgtgtttatttaaatttactttctctttagaagtgcacttatttctgaaaaatcttaatgaaacaaacgcttagaacaaatataaatatgagacacttgggactactagagatattttagatttttatgaaaaaaatgtgaggggatattgctgctttaaaaaggaataaagtaataaaaatatatctcagctatttttttaaagcaatataattcagcaattgtctagaaaagtaatcatgaggctactgagtttggtgttcagttactgagtttcaaaaatgttttggtggcatgaggacaaaatttcattgaaggtaagataagaataaaaactatgtttacaaaa

SEQ ID NO: 20878 - DNA, 752 bp, Homo sapiens
  misc_feature 1..752: note = ENST00000545470
  source 1..752: mol_type = unassigned DNA
ggcggggcgagggcggagcggggagaagggagctgacgggcgcccggccggctgcggtccgtgcggaggctgagccggccgcgggcgcgaccggaggcagtttccgttactatggcaatgacggcagggactacaacaacctttcctatgagcaaccatacccgggaaagagtgactgtagccaagctcacattggagaatttttatagcaacctaattttacagcatgaagagagagaaaccaggcagaagaaattagaagtggccatggaagaagaaggattagcagatgaagaggtgcggttggtccagaagaaagatacaggccatatctatgcaatgaagatattgagaaagtctgatatgcttgaaaaagagcaggtggcccatatccgagcagaaagagatattttggtagaagcagatggtgcctgggtggtgaagatgttttacagttttcaggataagaggaatctttatctaatcatggaatttctccctggaggtgacatgatgacattgctaatgaagaaagacaccttgacagaagaggaaacacagttctacatttcagagactgttctggcaatagatgcgatccaccagttgggtttcatccatcgggatattaagccagacaaccttttattggatgccaagggtcatgtaaaattatctgattttggtttatgtacgggattaaagaaagctcacaggactgaattttatagaaatctcacacacaacccacc

SEQ ID NO: 20879 - DNA, 664 bp, Homo sapiens
  misc_feature 1..664: note = ENST00000544367
  source 1..664: mol_type = unassigned DNA
gagaagggagctgacgggcgcccggccggctgcggtccgtgcggaggctgagccggccgcgggcgcgaccggaggcagtttccgttactatggcaatgacggcagggactacaacaacctttcctatgagcaaccatacccgggaaagagtgactgtagccaagctcacattggagaatttttatagcaacctaattttacagcatgaagagagagaaaccaggcagaagaaattagaagtggccatggaagaagaaggattagcagatgaagaggtaatgtaattacctataattactgtacaaaagcacccccagtgacttttcattcatttgacatcagaaaaagttacgtcgatcacaacacgctcgcaaagaaacagagttcttacggctcaaaaggaccagacttggcttggatgactttgagtctctgaaagttataggaagaggagcttttggagaggtgcggttggtccagaagaaagatacaggccatatctatgcaatgaagatattgagaaagtctgatatgcttgaaaaagagcaggtggcccatatccgagcagaaagagatattttggtagaagcagatggtgcctgggtggtgaagatgttttacagttttcaggataagaggaatctttatctaatcatggaatttc

SEQ ID NO: 20880 - DNA, 581 bp, Homo sapiens
  misc_feature 1..581: note = ENST00000539863
  source 1..581: mol_type = unassigned DNA
gacgggcgcccggccggctgcggtccgtgcggaggctgagccggccgcgggcgcgaccggaggcagtttccgttactatggcaatgacggcagggactacaacaacctttcctatgagcaaccatacccgggaaagagtgactgtagccaagctcacattggagaatttttatagcaacctaattttacagcatgaagagagagaaaccaggcagaagaaattagaagtggccatggaagaagaaggattagcagatgaagaggtaatgtaattacctataattactgtacaaaagcacccccagtgacttttcattcatttgacatcaggtattttataacttaaataatgtggattttatcatttgaatatgggcttctttgttgctgtcatggatatcttttattgatatctttagaaggaggcagttttgtttttttcttaaattccaagaacacgtatttaagagaacattgccaagtgtattttaggtgtgtggaatgagaaaggcaagctccgggaggaattaatcaatcgttagcttttctaaaattttttctaaatattcttttaaagctat

SEQ ID NO: 20881 - DNA, 757 bp, Homo sapiens
  misc_feature 1..757: note = ENST00000434385
  source 1..757: mol_type = unassigned DNA
gcggtccgtgcggaggctgagccggccgcgggcgcgaccggaggcagtttccgttactatggcaatgacggcagggactacaacaacctttcctatgagcaaccatacccgggaaagagtgactgtagccaagctcacattggagaatttttatagcaacctaattttacagcatgaagagagagaaaccaggtatagtaagggctaatcaaaactttttttagttaaataagctgttgtgctgtgagtggaatagaaacttgtttaccatgaatgatatgaatattatggatccctgcatgctgtttttgagtttcctgtactgacagtgcacatagacatgtgttttattttcacagagtagtttcctgaggtgccccaagtcttgtgcatctatatacccgtatgacatgccaattaacgttttaaacaaaccttttccaaacatgaaattatgatatgtctttacattttcttttaaagggatgcctggcttggtgtggtgtggctcatgcctataatcccagcactttgggaagccgaggtgggcagatcacctgaggtcaggagttcaagaccagcctggccaacatggtgaaaccccatctctactgaaaatacaaaaaattagccgggtgtggtggcgggtgcctgtaatcccagctactcaggaggctgaggcaggagaattgcttgaaggcagcagtgagccaaggctgcagtgagccaagatcacaccactgcactccagcctggg

SEQ ID NO: 20882 - DNA, 463 bp, Homo sapiens
  misc_feature 1..463: note = ENST00000540996
  source 1..463: mol_type = unassigned DNA
gtgcggaggctgagccggccgcgggcgcgaccggaggcaggcatctgaatttcatttgaaaatgaaatgggctgcacagtctggagaagtgtactataccttgttatagcacgttttggaatgacccagaattcagaatgaaatgggcagctatgagccccatccaaagtttccgttactatggcaatgacggcagggactacaacaacctttcctatgagcaaccatacccgggaaagagtgactgtagccaagctcacattggagaatttttatagcaacctaattttacagcatgaagagagagaaaccaggcagaagaaattagaagtggccatggaagaagaaggattagcagatgaagagaaaaagttacgtcgatcacaacacgctcgcaaagaaacagagttcttacggctcaaaaggaccagacttggcttggatgactttgagtctctgaaag

SEQ ID NO: 20883 - DNA, 477 bp, Homo sapiens
  misc_feature 1..477: note = ENST00000546286
  source 1..477: mol_type = unassigned DNA
cggccgcgggcgcgaccggaggcagtttccgttactatggcaatgacggcagggactacaacaacctttcctatgagcaaccatacccgggaaagagtgactgtagccaagctcacattggagaatttttatagcaacctaattttacagcatgaagagagagaaaccagaggagaaaactggaaatcattcaacaagcagcactgaagtgcctaggggcagaagaaattagaagtggccatggaagaagaaggattagcagatgaagagaaaaagttacgtcgatcacaacacgctcgcaaagaaacagagttcttacggctcaaaaggaccagacttggcttggatgactttgagtctctgaaagttataggaagaggagcttttggagaggtgcggttggtccagaagaaagatacaggccatatctatgcaatgaagatattgagaaagtctgatatgcttgaaaaagagcag

SEQ ID NO: 20884 - DNA, 548 bp, Homo sapiens
  misc_feature 1..548: note = ENST00000543246
  source 1..548: mol_type = unassigned DNA
attgtatgtgaattagccacccttgtgactatttgaggagagagaagttagtctaaaatattatgttaaattatgatattacataattttattgcataagttcatcaaactacttccatctgaaaaatcctgatctcaaaatagtttccgttactatggcaatgacggcagggactacaacaacctttcctatgagcaaccatacccgggaaagagtgactgtagccaagctcacattggagaatttttatagcaacctaattttacagcatgaagagagagaaaccaggcagaagaaattagaagtggccatggaagaagaaggattagcagatgaagagaaaaagttacgtcgatcacaacacgctcgcaaagaaacagagttcttacggctcaaaaggaccagacttggcttggatgactttgagtctctgaaagttataggaagaggagcttttggagaggtgcggttggtccagaagaaagatacaggccatatctatgcaatgaagatattgagaaagtctgatatgcttgaaaaagagcag

SEQ ID NO: 20885 - DNA, 526 bp, Homo sapiens
  misc_feature 1..526: note = ENST00000544969
  source 1..526: mol_type = unassigned DNA
agggcagcctgctcgacaaggccccttggcagacagtcagctccctccaaggccaaaccccaagttcaacatacatctttctctcccatttctgcaagcataactgtgaacagcataattcttttccgttactatggcaatgacggcagggactacaacaacctttcctatgagcaaccatacccgggaaagagtgactgtagccaagctcacattggagaatttttatagcaacctaattttacagcatgaagagagagaaaccaggcagaagaaattagaagtggccatggaagaagaaggattagcagatgaagagaaaaagttacgtcgatcacaacacgctcgcaaagaaacagagttcttacggctcaaaaggaccagacttggcttggatgactttgagtctctgaaagttataggaagaggagcttttggagaggtgcggttggtccagaagaaagatacaggccatatctatgcaatgaagatattgagaaagtctgatatgcttgaaaaagagcag

SEQ ID NO: 20886 - DNA, 580 bp, Homo sapiens
  misc_feature 1..580: note = ENST00000407753
  source 1..580: mol_type = unassigned DNA
ggcagaagaaattagaagtggccatggaagaagaaggattagcagatgaagagaaaaagttacgtcgatcacaacacgctcgcaaagaaacagagttcttacggctcaaaaggaccagacttggcttggatgactttgagtctctgaaagttataggaagaggagcttttggagaggtgcggttggtccagaagaaagatacaggccatatctatgcaatgaagatattgagaaagtctgatatgcttgaaaaagagcaggtgacatgatgacattgctaatgaagaaagacaccttgacagaagaggaaacacagttctacatttcagagactgttctggcaatagatgcgatccaccagttgggtttcatccatcgggatattaagccagacaaccttttattggatgccaagggtcatgtaaaattatctgattttggtttatgtacgggattaaagaaagctcacaggactgaattttatagaaatctcacacacaacccaccaagtgacttctcatttcagaacatgaactcaaagaggaaagcagaaacttggaagaagaacaggagacaactg

SEQ ID NO: 20887 - DNA, 1369 bp, Homo sapiens
  misc_feature 1..1369: note = ENST00000536093
  source 1..1369: mol_type = unassigned DNA
tacatttcagagactgttctggcaatagatgcgatccaccagttgggtttcatccatcgggatattaagccagacaaccttttattggatgccaagggtcatgtaaaattatctgattttggtttatgtacgggattaaagaaagctcacaggactgaattttatagaaatctcacacacaacccaccaagtgacttctatgtatatgtattttctttttgtggagagcatttttccctcgtgattacaattccatattgttgaaattagcatttcagaacatgaactcaaagaggaaagcagaaacttggaagaagaacaggagacaactggcatattccacagttgggacaccagattacattgctccagaagtattcatgcagactggttacaacaaattgtgtgactggtggtctttgggagtgattatgtatgaaatgctaataggatatccacctttctgctctgaaacacctcaagaaacgtacagaaaagtgatgaactggaaagaaactctggtatttcctccagaggtacctatatctgagaaagccaaggacttaattctcagattttgtattgattctgaaaacagaattggaaatagtggagtagaagaaataaaaggtcatcccttttttgaaggtgtcgactgggagcacataagggaaaggccagcagcaatccctatagaaatcaaaagcattgatgatacttcaaattttgatgacttccctgaatctgatattttacaaccagtgccaaataccacagaaccggactacaaatccaaagactgggtttttctcaattatacctataaaaggtttgaagggttgactcaacgtggctctatccccacctacatgaaagctgggaagttatgaatgaagataacattcacccataaccaagagaactcaggtagctgcatcaccaggcttgcttggcgtagataacaatacactgaaatactcctgaagatggtggtgcttattgactacaagaggaaattctacaggattaggatttctaagactactataggaattggttggcagtgccagctggctcttttttttaatattttattatttttgttaactttattatatgaaggtactggaataaaaggaacagacatccctttctaactgcactgcctacatgcgtattaaggtccattctgcctgtgtgtgctgtggctttgaactgtaacacctctaatcaattcaggagaaacacatatcatttaaagcaacataggctaacctgtaggtaacactgcagtattgatgttttactgcaaatcttatgggtctagataatcagtaaaagccatcttccatagttggtgttagaacat

SEQ ID NO: 20888 - DNA, 982 bp, Homo sapiens
  misc_feature 1..982: note = ENST00000543992
  source 1..982: mol_type = unassigned DNA
tgttaaatacatactgatcaataccagtgagctccccacggatcctgtttcaggaaggtgggtatttaacccaaactcccacgtataaaagtggttatctacatagcttttcaggtaaaaggggaggcagtgctttcaatcctttattttattgactttattagcaacgtgattgtaaattgatgaatggtggcatttttgactgttaaatagagcactcagggttgtttggtttcttgtcgcacatgtttggtgggtataaacttcactgctcacaaagctgatgaaacatttttgatttatttgatacataggatatccacctttctgctctgaaacacctcaagaaacgtacagaaaagtgatgaactggaaagaaactctggtatttcctccagaggtacctatatctgagaaagccaaggacttaattctcagattttgtattgattctgaaaacagaattggaaatagtggagtagaagaaataaaaggtcatcccttttttgaaggtgtcgactgggagcacataagggaaaggccagcagcaatccctatagaaatcaaaagcattgatgatacttcaaattttgatgacttccctgaatctgatattttacaaccagtgccaaataccacagaaccggactacaaatccaaagactgggtttttctcaattatacctataaaaggtttgaagggttgactcaacgtggctctatccccacctacatgaaagctgggaagttatgaatgaagataacattcacccataaccaagagaactcaggtagctgcatcaccaggcttgcttggcgtagataacaatacactgaaatactcctgaagatggtggtgcttattgactacaagaggaaattctacaggattaggatttctaagactactataggaattggttggcagtgccagctggctcttttttttaatattttattatttttgttaactttattatat

SEQ ID NO: 20889 - DNA, 2288 bp, Homo sapiens
  misc_feature 1..2288: note = ENST00000350889
  source 1..2288: mol_type = unassigned DNA
gaggaagagagcagctcgcttctaactggactgcacgttggtgacagcgtcccaagctggtgacagacccactctgtaactttcagctagattcagccaccagatcccagaaacatgacccttgctgcctacaaagagaagatgaaggagctcccgctggtgtccttgttctgctcctgcttcctggccgatcccctgaataagtcgtcctacaaatatgaaggctggtgtgggagacagtgtaggaggaaggatgaaagccagcggaaagacagtgctgactggagagaaagaagagctcaggcagacacggtggacctgaattggtgcgtcatttccgacatggaagtcatcgagctgaacaaatgcacctcgggccaatcctttgaagtcatcctgaagccaccctcctttgatggggttcccgagttcaacgcctccctgccaaggcggcgagacccatccctggaagagatccagaagaaactagaagcggctgaggagcgaaggaagtaccaggaagcggagctcctgaaacacctagcagagaaacgggaacatgagagagaggtgatccaaaaggccattgaggaaaacaacaacttcatcaagatggctaaggaaaaactggcccagaagatggaatccaacaaggagaacagggaggcccacctcgccgccatgttggaacggctgcaagagaaggacaagcacgccgaggaggtgcggaaaaacaaggagctgaaggaagaggcctccaggtaaagcctagaggccaaagaactttccaggtcagccggacagctccagcagctccacgttccaggcagcctcgcccgccggctgcgctcccagcactggggtttggggggaggggggtggccaaggggcgtttcctctgcttttggtgtttgtacatgttaagaattgaccagtgaagccatcctatttgtttccggggaacaatgacggggtgggagaggggagaggagagagtttgggaaagggagatggagaagaactcaaggacattgcaaccctgcccggcgcagatctgattttcacatctctacctggacattgagcctccaggcaccatgttgaggagagatgaaaaccagggcggtagaacttcagggtgaaggacagagtcctgggtggggcagcggctgcagggcgcaccagagaacccagccagaggggttgtgagtaccagtggtgttgcttccaccctgcagcaggtgggatgaggtctgtgtgtgtgtgtgaaccatcattttttgatcatcatgaccaatgaaacattgactccaagtgtccagttctttatttcccaaatgtgtcctttgggtaattgttaaaaagttctcgaaacctggctttcatccatctgatggcagatgcccctttgcttccttaattctgccattcaagcatctggagcctgggtgaggtgggttgaatcaggccagcctttggcataattgaaaggttttctcttctgttttttaaaatcccctctgtgggctaatctttattggatagcatgcactaaattgatgagaaaagaaactcaatcttcctttcaatgaactgacatcctaatatggtccccaagatgcactgtaagaaggaatttgtcttagtcacaaccgttcagactgctgtaacaaaataccttagactaagtaattgataacagaaattgattgctcacagttttggaggctgggaagtccaatatcaaggtgccagcagattcagtgtctggtgagggcttgccatctgcttcaaagatgatgcctttttgctgcatcctcacatggcagaagggaagggcaaaagggcttccttgagccttttctttaaggcactaatcccattcatgaaggtggagtcctcatgatctcacctcttaaggccctatctcttaattctgtagtgtcgggattaggattcaacctgtatattgggggagacagcaacattcacaccatagcagaagtcctccatgctttgggggtttgagattctaggtagattagaaaatacgagcaaggaaataaagtgtttgctagtagaaggcaaaggaggcatccagacccagcagtcttggtctccaggacactgaaccatggctggaaaagaagctctcctcctcccttcccctgcaaacatgagtgcaggggctgcctgtgttaaccgggtcccaggacctcttcccactctgctctgcacactgtgtagttttttacagctttgcaaataaaccctttggtatagccttt

SEQ ID NO: 20890 - DNA, 1623 bp, Homo sapiens
  misc_feature 1..1623: note = ENST00000519997
  source 1..1623: mol_type = unassigned DNA
actaattgagggagtgaggaagagagcagctcgcttctaactggactgcaccctacaaagagaagatgaaggagctcccgctggtgtccttgttctgctcctgcttcctggccgatcccctgaataagtcgtcctacaaatatgaagcagacacggtggacctgaattggtgcgtcatttccgacatggaagtcatcgagctgaacaaatgcacctcgggccaatcctttgaagtcatcctgaagccaccctcctttgatggggttcccgagttcaacgcctccctgccaaggcggcgagacccatccctggaagagatccagaagaaactagaagcggctgaggagcgaaggaagtaccaggaagcggagctcctgaaacacctagcagagaaacgggaacatgagagagaggtgatccaaaaggccattgaggaaaacaacaacttcatcaagatggctaaggaaaaactggcccagaagatggaatccaacaaggagaacagggaggcccacctcgccgccatgttggaacggctgcaagagaaggaaccgcctgctgcgcggtgactcccgggacctgatcggtggcctcgtcccatggacaagcacgccgaggaggtgcggaaaaacaaggagctgaaggaagaggcctccaggtaaagcctagaggccaaagaactttccaggtcagccggacagctccagcagctccacgttccaggcagcctcgcccgccggctgcgctcccagcactggggtttggggggaggggggtggccaaggggcgtttcctctgcttttggtgtttgtacatgttaagaattgaccagtgaagccatcctatttgtttccggggaacaatgacggggtgggagaggggagaggagagagtttgggaaagggagatggagaagaactcaaggacattgcaaccctgcccggcgcagatctgattttcacatctctacctggacattgagcctccaggcaccatgttgaggagagatgaaaaccagggcggtagaacttcagggtgaaggacagagtcctgggtggggcagcggctgcagggcgcaccagagaacccagccagaggggttgtgagtaccagtggtgttgcttccaccctgcagcaggtgggatgaggtctgtgtgtgtgtgtgaaccatcattttttgatcatcatgaccaatgaaacattgactccaagtgtccagttctttatttcccaaatgtgtcctttgggtaattgttaaaaagttctcgaaacctggctttcatccatctgatggcagatgcccctttgcttccttaattctgccattcaagcatctggagcctgggtgaggtgggttgaatcaggccagcctttggcataattgaaaggttttctcttctgttttttaaaatcccctctgtgggctaatctttattggatagcatgcactaaattgatgagaaaagaaactcaatcttcctttcaatgaactgacatcctaatatggtccccaagatgcactgtaagaaggaatttgtcttagtcacaaccgttcagactgctgtaacaaaataccttagactaagtaattgataacagaaattgattgctcacagttttgga

SEQ ID NO: 20891 - DNA, 1250 bp, Homo sapiens
  misc_feature 1..1250: note = ENST00000265770
  source 1..1250: mol_type = unassigned DNA
agggtaccactaattgagggagtgaggaagagagcagctcgcttctaactggactgcacgttggtgacagcgtcccaagctggtgacagacccactctgtaactttcagctagattcagccaccagatcccagaaacatgacccttgctgcctacaaagagaagatgaaggagctcccgctggtgtccttgttctgctcctgcttcctggccgatcccctgaataagtcgtcctacaaatatgaagcagacacggtggacctgaattggtgcgtcatttccgacatggaagtcatcgagctgaacaaatgcacctcgggccaatcctttgaagtcatcctgaagccaccctcctttgatggggttcccgagttcaacgcctccctgccaaggcggcgagacccatccctggaagagatccagaagaaactagaagcggctgaggagcgaaggaagtaccaggaagcggagctcctgaaacacctagcagagaaacgggaacatgagagagaggtgatccaaaaggccattgaggaaaacaacaacttcatcaagatggctaaggaaaaactggcccagaagatggaatccaacaaggagaacagggaggcccacctcgccgccatgttggaacggctgcaagagaaggacaagcacgccgaggaggtgcggaaaaacaaggagctgaaggaagaggcctccaggtaaagcctagaggccaaagaactttccaggtcagccggacagctccagcagctccacgttccaggcagcctcgcccgccggctgcgctcccagcactggggtttggggggaggggggtggccaaggggcgtttcctctgcttttggtgtttgtacatgttaagaattgaccagtgaagccatcctatttgtttccggggaacaatgacggggtgggagaggggagaggagagagtttgggaaagggagatggagaagaactcaaggacattgcaaccctgcccggcgcagatctgattttcacatctctacctggacattgagcctccaggcaccatgttgaggagagatgaaaaccagggcggtagaacttcagggtgaaggacagagtcctgggtggggcagcggctgcagggcgcaccagagaacccagccagaggggttgtgagtaccagtggtgttgcttccaccctgcagcaggtgggatgaggtctgtgtgtgtgtgtgaaccatcattttttgatcatcatgaccaatgaaacattga

SEQ ID NO: 20892 - DNA, 1224 bp, Homo sapiens
  misc_feature 1..1224: note = ENST00000523048
  source 1..1224: mol_type = unassigned DNA
gagagaagcccagggtaccactaattgagggagtgaggaagagagcagctcgcttctaactggactgcacgttggtgacagcgtcccaagctggtgacagacccactctgtaactttcagctagattcagccaccagatcccagaaacatgacccttgctgcctacaaagagaagatgaaggagctcccgctggtgtccttgttctgctcctgcttcctggccgatcccctgaataagtcgtcctacaaatatgaaggctggtgtgggagacagtgtaggaggaaggatgaaagccagcggaaagacagtgctgactggagagaaagaagagctcaggcagacacggtggacctgaattggtgcgtcatttccgacatggaagtcatcgagctgaacaaatgcacctcgggccaatcctttgaagtcatcctgaagccaccctcctttgatggggttcccgagttcaacgcctccctgccaaggcggcgagacccatccctggaagagatccagaagaaactagaagcggctgaggagcgaaggaagtaccaggaagcggagctcctgaaacacctagcagagaaacgggaacatgagagagaggtgatccaaaaggccattgaggaaaacaacaacttcatcaagatggctaaggaaaaactggcccagaagatggaatccaacaaggagaacagggaggcccacctcgccgccatgttggaacggctgcaagagaaggaaccgcctgctgcgcggtgactcccgggacctgatcggtggcctcgtcccatggacaagcacgccgaggaggtgcggaaaaacaaggagctgaaggaagaggcctccaggtaaagcctagaggccaaagaactttccaggtcagccggacagctccagcagctccacgttccaggcagcctcgcccgccggctgcgctcccagcactggggtttggggggaggggggtggccaaggggcgtttcctctgcttttggtgtttgtacatgttaagaattgaccagtgaagccatcctatttgtttccggggaacaatgacggggtgggagaggggagaggagagagtttgggaaagggagatggagaagaactcaaggacattgcaaccctgcccggcgcagatctgattttcacatctctacctggacattgagcctccaggcaccatgttgaggagagatgaaaaccagggcggtagaacttca

SEQ ID NO: 20893 - DNA, 1273 bp, Homo sapiens
  misc_feature 1..1273: note = ENST00000519614
  source 1..1273: mol_type = unassigned DNA
accactaattgagggagtgaggaagagagcagctcgcttctaactggactgcacgttggtgacagcgtcccaagctggtgacagacccactctgtaactttcagctagattcagccaccagatcccagaaacatgacccttgctgcctacaaagagaagatgaaggagctcccgctggtgtccttgttctgctcctgcttcctggccgatcccctgaataagtcgtcctacaaatatgaagcagacacggtggacctgaattggtgcgtcatttccgacatggaagtcatcgagctgaacaaatgcacctcgggccaatcctttgaagtcatcctgaagccaccctcctttgatggggttcccgagttcaacgcctccctgccaaggcggcgagacccatccctggaagagatccagaagaaactagaagcggctgaggagcgaaggaagtaccaggaagcggagctcctgaaacacctagcagagaaacgggaacatgagagagaggtgatccaaaaggccattgaggaaaacaacaacttcatcaagatggctaaggaaaaactggcccagaagatggaatccaacaaggagaacagggaggcccacctcgccgccatgttggaacggctgcaagagaaggtgaggggtccctggctagagaggagtttcctgggacatgctgttttccttctgcagcaagtatgcggggacctgctgatcatctcagggaggaagcagcctcaggcaaaaatcaggatctttttcttaggcaggatctttagagagttccgaaggatgatcagggaagtcagaggcaagaaataggaaccagactcagggtttccttgggggatattctgcacagttacacaattaaaatccttcattgccttagggagcatatatgtctgattttctagaagaagcctgtctaatacaaaggagtagagatagacaagcaggtatgcattcctagcttcatccctgaatggattgatttgatggaaggaaagatgctttcttgagctcttggctctaagtcacgggtatgatgagctgagattcccactgagcaggaaacatgattctctctaaacctcttgacacagacccagtgagtcacaggtctttccaatatgttgccttttgtcaataaatggaacggtgtcacctaaatatgagaaacatgaggccggggttggttctgtgtgtcagcagaataccggcccgttctgctgagaacacgctggcctcatttcctgagtctcaa

SEQ ID NO: 20894 - DNA, 1004 bp, Homo sapiens
  misc_feature 1..1004: note = ENST00000522908
  source 1..1004: mol_type = unassigned DNA
accactaattgagggagtgaggaagagagcagctcgcttctaactggactgcacgttggtgacagcgtcccaagctggtgacagacccactctgtaactttcagctagattcagccaccagatcccagaaacatgacccttgctgcctacaaagagaagatgaaggagctcccgctggtgtccttgttctgctcctgcttcctggccgatcccctgaataagtcgtcctacaaatatgaaggctggtgtgggagacagtgtaggaggaaggatgaaagccagcggaaagacagtgctgactggagagaaagaagagctcaggcagacacggtggacctgaattggtgcgtcatttccgacatggaagtcatcgagctgaacaaatgcacctcgggccaatcctttgaagtcatcctgaagccaccctcctttgatggggttcccgagttcaacgcctccctgccaaggcggcgagacccatccctggaagagatccagaagaaactagaagcggctgaggagcgaaggaagtaccaggaagcggagctcctgaaacacctagcagagaaacgggaacatgagagagaggtgatccaaaaggccattgaggaaaacaacaacttcatcaagatggctaaggaaaaactggcccagaagatggaatccaacaaggagaacagggaggcccacctcgccgccatgttggaacggctgcaagagaaggtgaggggtccctggctagagaggagtttcctgggacatgctgttttccttctgcagcaagtatgcggggacctgctgatcatctcagggaggaagcagcctcaggcaaaaatcaggatctttttcttaggcaggatctttagagagttccgaaggatgatcagggaagtcagaggcaagaaataggaaccagactcagggtttccttgggggatattctgcacagttacacaattaaaatccttcattgccttagggagcatatatgtctgattttctag

SEQ ID NO: 20895 - DNA, 698 bp, Homo sapiens
  misc_feature 1..698: note = ENST00000522750
  source 1..698: mol_type = unassigned DNA
aattgagggagtgaggaagagagcagctcgcttctaactggactgcacgttggtgacagcgtcccaagctggtgacagacccactctgtaactttcagctagattcagccaccagatcccagaaacatgacccttgctgcctacaaagagaagatgaaggagctcccgctggtgtccttgttctgctcctgcttcctggccgatcccctgaataagtcgtcctacaaatatgaaggtcagtgaaggctcagccaggaaagtgaggggcgggggggccctgtgtcctgtcctcataggtcctgcaccccgaccccagtcccgtgaatctctcctcccgagacagtttccttcccagtgccgatgaaatcacagcgggtgagcccgagggtctgagctgcagtggtccagcctgggcactagggggaggccatgaaggtctgcatcaggcgccccccagagtgcactcgatcttgtcacctctgtgcatgcatccagcaaatcgagactggggggtatgcaaaggctggtgtgggagacagtgtaggaggaaggatgaaagccagcggaaagacagtgctgactggagagaaagaagagctcaggcagacacggtggacctgaattggtgcgtcatttccgacatggaagtcatcgagctgaacaaatgcacctcgggccaatcctttgaagtcatcctg

SEQ ID NO: 20896 - DNA, 2243 bp, Homo sapiens
  misc_feature 1..2243: note = ENST00000484110
  source 1..2243: mol_type = unassigned DNA
tttgccagcaggcgatggaatagggactacgagacaccctgcagcctctcctgggaggacaacgccccttctccctctccatgcactcttgaggcagcaaagaggaggcatctggacgcgtttacctcctccccacccccacagcttggccctcactaaactatcttgtgtccttcctcctgctatgattgattcgcccaggaaggagggagcgctctcccctcctctgggaggctggagactcggggacagaagatgcgctggagggaagagaacggagcgtcggacaccagaaaaactttgggggattcggggtgagaaagaaggcgtgaagagagaagggaggctcagcaggggaggaggggcgggggcgggggcgggagcgggaggagtcactgcgccgcggccgcccctccccgccctccactcggcggccccgggtcttcctccccctcctcctccccctcctcctccccctcctcttcctccgcctcctggtgtggctggctgcggccagaatcggagccccaaccgcgctgccggtgagtgaccagccccaggggacagagacgggaggcctgggaccccccctctccagggtggggcctcccgccgtgtctgggaaagtttgcgggcgccccgggacgcgggcatctccagggccgctcggcgcctccccatctccccgcgcccgccctggccgcccccaggggcgccctggggcccgcagagggatggcctcccggcagggactcctcggctcccctctgttctgagactgctgctgggaccggggtccgactctaaagagaaaactcaaacagcaaaaaaaggaatatcgactcagttccgagggcgggggccggggctcgttctcacccgcgcgcggcccctcgacctctcggacccgggccaccagctctgcgcccctcacgcctccctcggggtctctgtgtctctctcccgctcccggactccctcctccttctgactgctgttatttgggctgttgtccctccccgctccctggtacctcagctcggaccttagcctgtgcctgcagcccggagtcccctcctgccctggaaggcaaggagccaggccacggggccacagccgcgggggccaccacactggcccaaatatttcctgcaggtatgaccattcactgggtattggggttgggtcccttggacccacaaactgaacctcgtgggtacagggaaaaattaaaatatattcctccttaggattgtactgcttctgttggtttggcatctttttatttttaacccttctaactgtgctttcttcgaataataatgatacttcatgtaattagcgtttctaatatctaaagacagaagaaggaagaaaataaacggaagagagagaatgcttgctaaaaatactcatttttgacttcagtccacactcgactgttttcctgggagatagaagttcagtgtagcttgttttcagactaaccgcaaacacgattacagcctcctccaggctagaagttttaatttgcctgacatgcagcacactgtttgttggtattcccagcctggcattcccgtctgcatagctctagtctccctcccaactcccccacccccactttctttctcataaaagggagctgtgaaaacaaggcaatgggagaggctcaaacgagctggaccacataataaaaacagccctacttattttaatcctgaggctatggactcccctggactctgattgggtggaagaattgtttagttcatttgtgtggtttttctgtcagtagttattatggttgaatcagtgtttccatgacagtcttgcttctgtgggcacgatggggagcctgttaattctcggatgggtctggacagatcaagtctggagtctggagagatttttcagggcttgacctgggctgatattgcaaacctctgcacactcactcagaaccagagcagccgggagcagcctgagctggggttttcttccacatgatctgggaagaaaaagctctaccaaggagcgaactgtgtgagcatggttgctgggggatgttgaatgttttacgtttttaggaagaacacacttctcaaaactttagccattcctgtttccatacaaacaataaatgtggttgtaacaaatgtagtagatcagattctgaacaaccccttaaaaaacaggtccaagtattgaaccatttggaaataaagattttattttatttg

SEQ ID NO: 20897 - DNA, 5511 bp, Homo sapiens
  misc_feature 1..5511: note = ENST00000404752
  source 1..5511: mol_type = unassigned DNA
ggtgtggctggctgcggccagaatcggagccccaaccgcgctgccgagtcaacctatttgatttcttgacaagaccacaatctgatcccaaagatgtgctccacaaatccaggcaaatgggtcacctttgatgatgatcctgctgttcaatcttctcaaaagtcaaagaattttcctctggagaatcaaggtgtctgtagaccaaatggactgaagctgaaccttcctggcctcagggaatttcccagtggatcttcctccaccagcagcactcctctctcctcccccattgtagatttttatttcagtccaggacctccaagtaactctcctctttctacacctaccaaagacttcccaggttttcctggcatccccaaagcagggactcatgtgctttatcctattccagaatcatcttcagacagcccactcgcaatatcaggaggagaatcttccttactgcctaccagaccaacatgtttatcccatgccttgttacccagtgaccactcatgtacacatccaactcccaaagtaggtcttccagatgaagttaatcctcaacaggctgaaagcctaggattccaaagtgatgatctcccccagtttcagtattttcgagaggactgtgctttttcaagtccattttggaaagatgaaggcagtgattcccatttcacccttgacccaccaggaagcaaaaagatgttctcatcaagaaacaaggagatgcctattgaccaaaaaagcctaaataagtgttcactcaactatatctgtgagaagcttgaacatctccagtcagctgagaaccaagactcacttagaagtttgtctatgcactgtctatgtgctgaagaaaatgcctcttcctttgtcccccacacactcttcaggagtcagccaaaatccggatggtctttcatgctgagaattcctgagaagaagaatatgatgtcttcccggcaatggggaccaatttttctgaaagttttgcctggaggaattttgcagatgtattatgaacagggattagaaaaaccatttaaagagatacagcttgatccatattgtaggctttctgaacccaaggttgagaacttcagtgtagcaggaaaaatccacactgtgaagattgaacatgtgtcttacacagaaaaaaggaaataccattctaagacagaagtagttcatgaacctgacatagagcagatgctgaagttggggtccacatcgtaccatgacttccttgactttctgactactgtggaggaggagctgatgaagttgccagctgtttcaaaaccaaaaaagaactacgaggagcaagaaatttccttggaaattgtggacaacttttggggtaaagtcacaaaagaaggaaaatttgttgaaagtgctgtgataactcaaatttattgcctctgctttgtgaatgggaacctggaatgctttttaaccttgaatgaccttgagttgccgaagcgagatgaatcctattatgagaaggactcagaaaaaaaggggattgatattcttgactaccattttcataagtgtgtgaatgtacaagaatttgagcaatcaagaatcattaagtttgtacctctggatgcctgccggtttgagctgatgcgtttcaagactttgtataatggggataatcttcccttttccttgaagtctgtagtggttgtccagggagcatacgtggaacttcaggcttttgtcaacatggcctcattggcgcagaggtcatcctatgctggttccttaaggtcctgtgacaatataaggatacactttcctgtcccatcgcagtggatcaaggccctttggaccatgaacctccagaggcagaagtctctgaaagctaaaatgaaccgccgagcatgtctggggagtttacaggaacttgaatctgaacctgtcattcaagtcactgtggggtcagcaaaatatgagagtgcctaccaggcagtggtatggaagatagatcggcttccagacaaaaattcaagtctagatcatccccattgtctgtcatacaaattagagcttggatcagaccaagaaattccctctgattggtatccatttgctactgttcagttttccgtgcctgacacctgtgcctcaaggacagaggtcaggtctctgggagtggagagtgatgtccagccacagaaacatgttcagcagcgagcttgctacaacatccaggttgaaatagaaaagaagtggattaaaatcgatggagaagacccagataaaattggtgactgcataactcagtaggagtagcaagagtttatgatgacagcccacttgtcaaatatgtaattcaccgaaaccacaccaagtcctgctactgtagagtggaaatgacttctgaatagcggttttaggacaggtctgatggctgtgtttagagaagtttagacctaaaaccgaacaatctgtattttttgcttttcatgtgtttttgtcctaggggttcgatctaaaatgtttctataattcgtgtgatgttttgcttcctattgaaactcaaaggcactgttactcgttgtgtgaccccgcagccagtatgatttttgattactcagtggctgactgttttgctctctggattactgaggtgccgtcttcatttcttcccatctcttcttgctgcttagtgtctgtactagagggtaagggaatcaaaggagacataaaccaaaatagttaattttccctctttcttgcctctgaaatgtggctaggtgtagaatgatgttgaaaccacaggctaaaatgtagatctggaagtatctgtgcttttgaattacttatttacctgtcctcttaccgttggtaaataataattggctatatttggtacctgtctctctcctactgtattgtcattttcaaaatgtgtttgttttctggcgcgtgctgcaaagaagctatttctgttgtcctacatattttagtataaatcactaagacatatttcctttcacttggcaggattcctttcaaaatggaatctgagtattagacactagttaacatatttgtgtatattaaatatgaatttttaaaatttataaatactattttccaaaagtacagactctaaggacatattttgataaagtattatttgtaatgaacacaagcctctcttgagtagaagtctaaatcacattatgattattttatactagttctgctatcatgctgttttatgctaattctgcttattttagagtatttttcattaaaaggtgagcaaagtgaaagatacttggtattttacccagatttctaagtggcaacatttttattcttcagagtcaggtaaatgactataatagtttggtttctaatgaaaagtcaatagcattagcagttataattctgtttataatttcctttcagcatttacagtgaaaagtgagaattttaaaatttatgaaatctatattccaggtattgtttttagtctgaaaaacaaactcccccatgtggtattaatataccttcaatttatgttgagtcttaaacataattaggagatatttttctctatttgctagatttgttttgagtcaaaactgatttagtgttcttccaaacaacatttatgtgttggcctacagagtttatttcatgtgttttttttaatatttaatattatattacattcattgaaatctgttcaaaaacagattaagacaaacatttatgatggtctgtatcaatcagcagattttattgcttttcattattttactgtaaaggcaaagaatgcaataggtgatggttggttgaaaggaattgttattgctgtttttattttttactttttttgagacagagtctcactctgttgcccagcctggagtgcagtgtgtcatcttggctcactgcaacctccgcctcctgggttcaagggattctcctgcctcagcctccaactagctgggattacaggcacaagccaccatgcctggctaaaattcttttgtatttttactacagacggagtttccccatgttggccgggctagtctcgaactcctgacctcaggtgatccaccagcctcggcctcccaaagttctgggattaaatgcgtgagccaccatgcccggccgctattgctctttttaacttcatttgatgccttgcttataatatcatatgcttgaggctcactgttgatgtagagtagggcaaatctgtgtgtgtatgtcattaaaaaaattctaccatctttctttatcatctggtgtgggcgcactctacagtgacttcagtctgctcagaacgaatgtggaggccggccgaaactgatgctgcccacagtcccagtgaagttaggtgggttaattactgccattcctttctaagtgtgttttatggcatcctgcccacaaagaactcacagtctgattaggatgaacttaatgactatttacacctcaaaatatattcagcaaagggttcacttagttgcccctcatgcttcacaggttgactagtatctgtgggtacctccctgcccaggttattcactcacaagccaccgggccttcaggacatctcaagattcagtcttgacaatataatagcaaaagctggactaaagcccaaatggattgtctgtggcaatgcagaagctgatagcattaacagcagggtgttacagcataattgttaattcgcacatctattaggatccttaaatattcattacttaatgttaaattaacattctgtgtagggaggggaggcttattcaattcttctgacctcagaactggcagaaggtcagatgtgactacagaactctaggtgaaaaatcaggtagggttcaaattaagtagaactgcccttgccggaatagtgatcttcaaaaaacccttgcttttaggggagggaagcggggaaggaaaggaatgagggaggaaatattcctttctagcattcattttgcttagatcactccattgtgagtttgaccattttggagtcaaatgagcagacttccaaggagttgaccagtttgtgactagtctggtcacctttccagttacaggatcatattaactgtgtaaatgaattcatgggtagatgatttgtgcagatctgaatttaagaacatttcctttttctgtgggaatcacaagagtttatccactaaaaaaagatatgtaaaaaagatactttccagcacataaataaaggctggaattttacaacctgatgtatatattagacagttctaggatgttagttcccttcattccagagctatgcttgtgatacagccccttttcttataaagtcagttagaaggacttccttaacaatgactattataatgtcttacttaaaatacagttttgtattctgtcaatgcaaatataagacaggttgagccttaatcatgtaacaaaatattttgtagattacatattgatttttcaaaaattaaaaatgtatttcaaact

SEQ ID NO: 20898 - DNA, 5614 bp, Homo sapiens
  misc_feature 1..5614: note = ENST00000406226
  source 1..5614: mol_type = unassigned DNA
ggccagaatcggagccccaaccgcgctgccgctcggaccttagcctgtgcctgcagcccggagtcccctcctgccctggaaggcaaggagccaggccacggggccacagccgcgggggccaccacactggcccaaatatttcctgcagagtcaacctatttgatttcttgacaagaccacaatctgatcccaaagatgtgctccacaaatccaggcaaatgggtcacctttgatgatgatcctgctgttcaatcttctcaaaagtcaaagaattttcctctggagaatcaaggtgtctgtagaccaaatggactgaagctgaaccttcctggcctcagggaatttcccagtggatcttcctccaccagcagcactcctctctcctcccccattgtagatttttatttcagtccaggacctccaagtaactctcctctttctacacctaccaaagacttcccaggttttcctggcatccccaaagcagggactcatgtgctttatcctattccagaatcatcttcagacagcccactcgcaatatcaggaggagaatcttccttactgcctaccagaccaacatgtttatcccatgccttgttacccagtgaccactcatgtacacatccaactcccaaagtaggtcttccagatgaagttaatcctcaacaggctgaaagcctaggattccaaagtgatgatctcccccagtttcagtattttcgagaggactgtgctttttcaagtccattttggaaagatgaaggcagtgattcccatttcacccttgacccaccaggaagcaaaaagatgttctcatcaagaaacaaggagatgcctattgaccaaaaaagcctaaataagtgttcactcaactatatctgtgagaagcttgaacatctccagtcagctgagaaccaagactcacttagaagtttgtctatgcactgtctatgtgctgaagaaaatgcctcttcctttgtcccccacacactcttcaggagtcagccaaaatccggatggtctttcatgctgagaattcctgagaagaagaatatgatgtcttcccggcaatggggaccaatttttctgaaagttttgcctggaggaattttgcagatgtattatgaacagggattagaaaaaccatttaaagagatacagcttgatccatattgtaggctttctgaacccaaggttgagaacttcagtgtagcaggaaaaatccacactgtgaagattgaacatgtgtcttacacagaaaaaaggaaataccattctaagacagaagtagttcatgaacctgacatagagcagatgctgaagttggggtccacatcgtaccatgacttccttgactttctgactactgtggaggaggagctgatgaagttgccagctgtttcaaaaccaaaaaagaactacgaggagcaagaaatttccttggaaattgtggacaacttttggggtaaagtcacaaaagaaggaaaatttgttgaaagtgctgtgataactcaaatttattgcctctgctttgtgaatgggaacctggaatgctttttaaccttgaatgaccttgagttgccgaagcgagatgaatcctattatgagaaggactcagaaaaaaaggggattgatattcttgactaccattttcataagtgtgtgaatgtacaagaatttgagcaatcaagaatcattaagtttgtacctctggatgcctgccggtttgagctgatgcgtttcaagactttgtataatggggataatcttcccttttccttgaagtctgtagtggttgtccagggagcatacgtggaacttcaggcttttgtcaacatggcctcattggcgcagaggtcatcctatgctggttccttaaggtcctgtgacaatataaggatacactttcctgtcccatcgcagtggatcaaggccctttggaccatgaacctccagaggcagaagtctctgaaagctaaaatgaaccgccgagcatgtctggggagtttacaggaacttgaatctgaacctgtcattcaagtcactgtggggtcagcaaaatatgagagtgcctaccaggcagtggtatggaagatagatcggcttccagacaaaaattcaagtctagatcatccccattgtctgtcatacaaattagagcttggatcagaccaagaaattccctctgattggtatccatttgctactgttcagttttccgtgcctgacacctgtgcctcaaggacagaggtcaggtctctgggagtggagagtgatgtccagccacagaaacatgttcagcagcgagcttgctacaacatccaggttgaaatagaaaagaagtggattaaaatcgatggagaagacccagataaaattggtgactgcataactcagtaggagtagcaagagtttatgatgacagcccacttgtcaaatatgtaattcaccgaaaccacaccaagtcctgctactgtagagtggaaatgacttctgaatagcggttttaggacaggtctgatggctgtgtttagagaagtttagacctaaaaccgaacaatctgtattttttgcttttcatgtgtttttgtcctaggggttcgatctaaaatgtttctataattcgtgtgatgttttgcttcctattgaaactcaaaggcactgttactcgttgtgtgaccccgcagccagtatgatttttgattactcagtggctgactgttttgctctctggattactgaggtgccgtcttcatttcttcccatctcttcttgctgcttagtgtctgtactagagggtaagggaatcaaaggagacataaaccaaaatagttaattttccctctttcttgcctctgaaatgtggctaggtgtagaatgatgttgaaaccacaggctaaaatgtagatctggaagtatctgtgcttttgaattacttatttacctgtcctcttaccgttggtaaataataattggctatatttggtacctgtctctctcctactgtattgtcattttcaaaatgtgtttgttttctggcgcgtgctgcaaagaagctatttctgttgtcctacatattttagtataaatcactaagacatatttcctttcacttggcaggattcctttcaaaatggaatctgagtattagacactagttaacatatttgtgtatattaaatatgaatttttaaaatttataaatactattttccaaaagtacagactctaaggacatattttgataaagtattatttgtaatgaacacaagcctctcttgagtagaagtctaaatcacattatgattattttatactagttctgctatcatgctgttttatgctaattctgcttattttagagtatttttcattaaaaggtgagcaaagtgaaagatacttggtattttacccagatttctaagtggcaacatttttattcttcagagtcaggtaaatgactataatagtttggtttctaatgaaaagtcaatagcattagcagttataattctgtttataatttcctttcagcatttacagtgaaaagtgagaattttaaaatttatgaaatctatattccaggtattgtttttagtctgaaaaacaaactcccccatgtggtattaatataccttcaatttatgttgagtcttaaacataattaggagatatttttctctatttgctagatttgttttgagtcaaaactgatttagtgttcttccaaacaacatttatgtgttggcctacagagtttatttcatgtgttttttttaatatttaatattatattacattcattgaaatctgttcaaaaacagattaagacaaacatttatgatggtctgtatcaatcagcagattttattgcttttcattattttactgtaaaggcaaagaatgcaataggtgatggttggttgaaaggaattgttattgctgtttttattttttactttttttgagacagagtctcactctgttgcccagcctggagtgcagtgtgtcatcttggctcactgcaacctccgcctcctgggttcaagggattctcctgcctcagcctccaactagctgggattacaggcacaagccaccatgcctggctaaaattcttttgtatttttactacagacggagtttccccatgttggccgggctagtctcgaactcctgacctcaggtgatccaccagcctcggcctcccaaagttctgggattaaatgcgtgagccaccatgcccggccgctattgctctttttaacttcatttgatgccttgcttataatatcatatgcttgaggctcactgttgatgtagagtagggcaaatctgtgtgtgtatgtcattaaaaaaattctaccatctttctttatcatctggtgtgggcgcactctacagtgacttcagtctgctcagaacgaatgtggaggccggccgaaactgatgctgcccacagtcccagtgaagttaggtgggttaattactgccattcctttctaagtgtgttttatggcatcctgcccacaaagaactcacagtctgattaggatgaacttaatgactatttacacctcaaaatatattcagcaaagggttcacttagttgcccctcatgcttcacaggttgactagtatctgtgggtacctccctgcccaggttattcactcacaagccaccgggccttcaggacatctcaagattcagtcttgacaatataatagcaaaagctggactaaagcccaaatggattgtctgtggcaatgcagaagctgatagcattaacagcagggtgttacagcataattgttaattcgcacatctattaggatccttaaatattcattacttaatgttaaattaacattctgtgtagggaggggaggcttattcaattcttctgacctcagaactggcagaaggtcagatgtgactacagaactctaggtgaaaaatcaggtagggttcaaattaagtagaactgcccttgccggaatagtgatcttcaaaaaacccttgcttttaggggagggaagcggggaaggaaaggaatgagggaggaaatattcctttctagcattcattttgcttagatcactccattgtgagtttgaccattttggagtcaaatgagcagacttccaaggagttgaccagtttgtgactagtctggtcacctttccagttacaggatcatattaactgtgtaaatgaattcatgggtagatgatttgtgcagatctgaatttaagaacatttcctttttctgtgggaatcacaagagtttatccactaaaaaaagatatgtaaaaaagatactttccagcacataaataaaggctggaattttacaacctgatgtatatattagacagttctaggatgttagttcccttcattccagagctatgcttgtgatacagccccttttcttataaagtcagttagaaggacttccttaacaatgactattataatgtcttacttaaaatacagttttgtattctgtcaatgcaaatataagacaggttgagccttaatcatgtaacaaaatattttgtagattacatattgatttttcaaaaattaaaaatgtatttcaaacta

SEQ ID NO: 20899 - DNA, 1006 bp, Homo sapiens
  misc_feature 1..1006: note = ENST00000444932
  source 1..1006: mol_type = unassigned DNA
aggtcatcctatgctggttccttaaggtcctgtgacaatataaggatacactttcctgtcccatcgcagtggatcaaggccctttggaccatgaacctccagaggcagaagtctctgaaagctaaaatgaaccgccgagcatgtctggggagtttacaggaacttgaatctgaacctgtcattcaagtcactgtggggtcagcaaaatatgagagtgcctaccaggcagtggtatggaagatagatcggcttccagacaaaaattcaattttccgtgcctgacacctgtgcctcaaggacagaggtcaggtctctgggagtggagagtgatgtccagccacagaaacatgttcagcagcgagcttgctacaacatccaggttgaaatagaaaagaagtggattaaaatcgatggagaagacccagataaaattggtgactgcataactcagtaggagtagcaagagtttatgatgacagcccacttgtcaaatatgtaattcaccgaaaccacaccaagtcctgctactgtagagtggaaatgacttctgaatagcggttttaggacaggtctgatggctgtgtttagagaagtttagacctaaaaccgaacaatctgtattttttgcttttcatgtgtttttgtcctaggggttcgatctaaaatgtttctataattcgtgtgatgttttgcttcctattgaaactcaaaggcactgttactcgttgtgtgaccccgcagccagtatgatttttgattactcagtggctgactgttttgctctctggattactgaggtgccgtcttcatttcttcccatctcttcttgctgcttagtgtctgtactagagggtaagggaatcaaaggagacataaaccaaaatagttaattttccctctttcttgcctctgaaatgtggctaggtgtagaatgatgttgaaaccacaggctaaaatgtagatctggaagtatctgtgcttttgaattacttatttacctgtcctc

SEQ ID NO: 20900 - DNA, 4302 bp, Homo sapiens
  misc_feature 1..4302: note = ENST00000555447
  source 1..4302: mol_type = unassigned DNA
cttggctggtcacagcacagtgctcctgggcccaggggctgtgatctcctgtcatttggttgccattttcctgtgaagagggtagagaatatgcacccagtcaggaaaacaactcacgaggcaaaaaagtacatctcgtggatggagcagggcgaagtggttacaagtacagactctggagccagactgcctgggtttgaattgtgcggtttcagatttctgcctggcagattaaccaacggcaagagaggctgatctgtctacattctgagtactgcccttggcaagacacctagaacagaccctggacccaagtctaccgtactaccatacccctactccagcccaccccagacagtattctggggttcacctgaggtcagcagtgtgaagatgaccagtgcctttttagcatgacgactttggaccatgtgattgccacccaccagtcagaatgggtctccttcaatgaagagccaccctttcctgcccactcgcaggggggcacggaagagcacctcccaggactgtcatcttccccagaccagtccgagagctcctccggggagaaccatgtggtggatggaggctctcaagaccattcccactcggagcaggatgactcctctgaaaagatgggcctcatctctgaagcagcttccccacctgggagccctgagcagcccccacctgacctggcctcggccatcagcaactgggttcagtttgaagatgacacaccctgggccagcacatctccacctcatcaggaaacagctgagacagccctaccattgaccatgccctgctggacatgcccttcctttgactccctggggagatgccctctgacttctgagagcagctggaccacccattctgaagacaccagcagtcctagctttggatgttcgtatacagatctgcagctcatcaatgctgaggagcagacgagtggccaggcttctggggctgactcaactgacaattcctcctcgcttcaagaagatgaagaagtagagatggaggccatcagctggcaggccagcagtccagccatgaatgggcaccctgcccctccagtgacctctgctcgttttcccagctgggtcacctttgatgacaatgaagtcagctgccctttaccaccagtcacctctcctctgaagccaaatacaccaccaagtgcatctgtgatcccagatgtaccttataattcaatgggatcatttaagaagagggaccgtcccaagagcactttgatgaacttctccaaagttcagaagctggatatttcctctttaaaccgcacgccttctgtaactgaggcttcaccttggagggcaaccaaccctttcctgaatgagactctgcaggatgtacagccctcccctatcaaccctttcagtgctttctttgaggagcaggagaggcgctcccaaaacagttccatttccagtaccacgggcaaaagccaaagagattccctcattgtcatctaccaggatgccatcagttttgatgattcaagcaaaacccagtcacactctgatgctgttgaaaaactcaaacaactccaaattgatgaccctgatcactttggcagtgcaactctacctgatgatgacccagtagcctggattgaactagatgctcacccgcctggatcagcacggtcccagcctcgtgacgggtggccaatgatgttgaggatccctgagaagaaaaacatcatgtcctccaggcactggggaccgatcttcgtcaaactgacagacactggttacctgcagctgtattatgagcagggcctagaaaaaccattccgtgagttcaagctggagatctgtcatgagatttcagaaccccggcttcaaaactatgatgagaatggcagaatccacagcttgcggatagaccgtgtcacctataaagagaagaagaaataccagcccaaacctgctgtggcccacacagcagagagggaacaggtgattaagctgggcaccaccaattacgatgacttcctgagtttcatccatgcagttcaggaccgtctcatggatctgccagtgttgtcaatggacttgagcacagttggcctcaactaccttgaagaggagattacagtggatgtcagagatgaattctctggcattgtgagcaaaggagacaaccagattctccagcaccatgtcttgacacggatccacatcctgagtttcctgtctgggctcgcagagtgccgcctgggcctcaatgacatcctcgtcaaagggaatgaaatagttttgaggcaggacatcatgcccaccaccaccacaaagtggatcaagctccatgagtgccgtttccatgggtgtgtggatgaggatgttttccacaactcacgggtcattctgttcaaccctttggatgcgtgccggtttgagctaatgcggttcaggacagtgtttgctgagaagaccttgcctttcacactcaggacggccacaagtgtcaatggggcagaggtggaggtgcagagctggctgaggatgtcaactggcttctccgccaatcgtgaccccctcactcaggttccctgtgagaatgtgatgatccgttaccctgtgcccagtgagtgggtgaaaaacttccgcagggaaagtgtcctgggggaaaagtctttgaaagccaaagtgaaccggggggcaagttttggctccactagtgtttctggctctgagcctgtcatgagagtaactctgggaactgccaagtacgagcatgccttcaactccattgtgtggaggataaaccgactgccggacaaaaactcagcttccggtcacccacactgtttcttttgccaccttgaactcggctctgaccgggaagtgccttccagatttgccaatcacgtgaatgtcgagttcagcatgcccacaacttctgcctccaaagccagcgtgagatctatctctgtagaagacaagactgacgtcaggaagtgggtcaattattctgcacactacagctaccagacaacagaaacagacaaccttccaaatcctctatattgcagttgccttccacacacagatttaaaaagaggatcaaagagggtggtgaagatcaggtggaatgcttctttggaagttccactggcatcatctatcagaacaatggtgtgagcatgaagaggcacagacaggtctccaaaatagatgttaggatttgggtgctacctgacacagaagtaggtctaaccctccaagtactggggatgataggataatcaatgaggtatatatatatttgtcattttgtataaaatattgtgaaaattgaaggaggacactcagtaaacatcctgggactatttgtaagttatggcaaaaccagatgagagaaaagggacagtcccctctgtatcctcgttgtctcttagtaacatcaaattgtagttaaaaaaattttaaactatgtacaagctacaaaatagcatctctttcatggtatgtttgagtgtgtaattttagtttcttttctggttgtatttgtggtagtcagatgtgttggattgattccaactggacagagtaaggaattccagcatcctcttcctgcttgctcgtgttaccccacagatcaaaccctcaattctagttggggatgctgtctagccccacaccatgactgaagccttaagcactgttgcgcctccatgtgctttggatcagcaaccccagtggtattctaccagagcattgtgggaaagcagatgtatagtcaggtcccaacagcaaattgttgggtgtgagagttctaaagtataggggtgagggaagagaaggatatgaactcctctgaccttaagccagcattcatttaacttttatgtctacttaacaagagaacctggagaaaactaccgtattcaagagattaatcaaaatcagtgttttagccaggcgatgacagagaagcaccattcctcaccctccattcttgtaatgtctgtaataaatttcagtgcgtcaggatggatgaacccaagatccagtgaatgattcagctgttccaagccttacattttccatcattcatcatccattctcattcagtgtaacctcttgcactattgtggttaattttatgtaaaaccagtttatgtttttttttttttaatatgtgcctatgtaataaagtctacacactggctatctctgtagaggtgaggttttgtttttagttgttctactgattatatccttttctgagctatgaaaatgaattattaataaaaaatttttgaac

SEQ ID NO: 20901 - DNA, 686 bp, Homo sapiens
  misc_feature 1..686: note = ENST00000553821
  source 1..686: mol_type = unassigned DNA
ggaggataaaccgactgccggacaaaaactcagcttccggtcacccacactgtttcttttgccaccttgaactcggctctgaccgggaagtgccttccagatttgccaatcacgtgaatgtcgagttcagcatgcccacaacttctgcctccaaagccagcgtgagatctatctctgtagaagacaagactgacgtcaggaagtgggtcaattattctgcacactacagctaccaggtggaaattgagcaaaaaaagagtttgaagccggactttgaaggagatgaaatggaaaatcccaaggagtgtggagtgcagtgacaaagccttgcggcaaggaatcctgatcccagagtcatgatagggtgtcttcctgagtcatgatagggtgtcttcctgagtagctgaagttgcagtcaatacctgctgtggccactgcatgttgggaacagtataccagatcttcctgtttgcagttacttgtattttaccaggaaaccctgagaatggtggcttttggagaggctctttgattctggtcatgcctaaagcacgaggttcacctgactgttggagcttactgtataattaagcctccttgtcttgtctctgcttatctcacagcactggtatgtggtttgttgtgactgttacagtcaggaaaagaacctcccacatcagtgttag

SEQ ID NO: 20902 - DNA, 2362 bp, Homo sapiens
  misc_feature 1..2362: note = ENST00000555284
  source 1..2362: mol_type = unassigned DNA
tccctcattcctatacttcagttttccttacctctagagcccctgaacagtagctcatatgttctccttttccttttagacaattcctcctcgcttcaagaagatgaagaagtagagatggaggccatcagctggcaggccagcagtccagccatgaatgggcaccctgcccctccagtgacctctgctcgttttcccagctgggtcacctttgatgacaatgaagtcagctgccctttaccaccagtcacctctcctctgaagccaaatacaccaccaagtgcatctgtgatcccagatgtaccttataattcaatgggatcatttaagaagagggaccgtcccaagagcactttgatgaacttctccaaagttcagaagctggatatttcctctttaaaccgcacgccttctgtaactgaggcttcaccttggagggcaaccaaccctttcctgaatgagactctgcaggatgtacagccctcccctatcaaccctttcagtgctttctttgaggagcaggagaggcgctcccaaaacagttccatttccagtaccacgggcaaaagccaaagagattccctcattgtcatctaccaggatgccatcagttttgatgattcaagcaaaacccagtcacactctgatgctgttgaaaaactcaaacaactccaaattgatgaccctgatcactttggcagtgcaactctacctgatgatgacccagtagcctggattgaactagatgctcacccgcctggatcagcacggtcccagcctcgtgacgggtggccaatgatgttgaggatccctgagaagaaaaacatcatgtcctccaggcactggggaccgatcttcgtcaaactgacagacactggttacctgcagctgtattatgagcagggcctagaaaaaccattccgtgagttcaagctggagatctgtcatgagatttcagaaccccggcttcaaaactatgatgagaatggcagaatccacagcttgcggatagaccgtgtcacctataaagagaagaagaaataccagcccaaacctgctgtggcccacacagcagagagggaacaggtgattaagctgggcaccaccaattacgatgacttcctgagtttcatccatgcagttcaggaccgtctcatggatctgccagtgttgtcaatggacttgagcacagttggcctcaactaccttgaagaggagattacagtggatgtcagagatgaattctctggcattgtgagcaaaggagacaaccagattctccagcaccatgtcttgacacggatccacatcctgagtttcctgtctgggctcgcagagtgccgcctgggcctcaatgacatcctcgtcaaagggaatgaaatagttttgaggcaggacatcatgcccaccaccaccacaaagtggatcaagctccatgagtgccgtttccatgggtgtgtggatgaggatgttttccacaactcacgggtcattctgttcaaccctttggatgcgtgccggtttgagctaatgcggttcaggacagtgtttgctgagaagaccttgcctttcacactcaggacggccacaagtgtcaatggggcagaggtggaggtgcagagctggctgaggatgtcaactggcttctccgccaatcgtgaccccctcactcaggttccctgtgagaatgtgatgatccgttaccctgtgcccagtgagtgggtgaaaaacttccgcagggaaagtgtcctgggggaaaagtctttgaaagccaaagtgaaccggggggcaagttttggctccactagtgtttctggctctgagcctgtcatgagagtaactctgggaactgccaagtacgagcatgccttcaactccattgtgtggaggataaaccgactgccggacaaaaactcagcttccggtcacccacactgtttcttttgccaccttgaactcggctctgaccgggaagtgccttccagatttgccaatcacgtgaatgtcgagttcagcatgcccacaacttctgcctccaaagccagcgtgagatctatctctgtagaagacaagactgacgtcaggaagtgggtcaattattctgcacactacagctaccaggtagccttgggaagcatctggctaatgcttccaactccatttgttcaccccactaccctccccctcttattccttttagccatgcttactatgttcgcctggtaacctcttactgccttagaggaagttcaccatacatagctgtgggtgcgtctgctctgatttaaatgcataatctggctagtggatgagagaaaggttggaaaaaaataaagaggctcatcaaagaggagaatataat

SEQ ID NO: 20903 - DNA, 2977 bp, Homo sapiens
  misc_feature 1..2977: note = ENST00000267540
  source 1..2977: mol_type = unassigned DNA
cagatttctgcctggcagattaaccaacggcaagagaggctgatctgtctacattctgagtactgcccttggcaagacacctagaacagaccctggacccaagtctaccgtactaccatacccctactccagcccaccccagacagtattctggggttcacctgaggtcagcagtgtgaagatgaccagtgcctttttagcatgacgactttggaccatgtgattgccacccaccagtcagaatgggtctccttcaatgaagagccaccctttcctgcccactcgcaggggggcacggaagagcacctcccaggactgtcatcttccccagaccagtccgagagctcctccggggagaaccatgtggtggatggaggctctcaagaccattcccactcggagcaggatgactcctctgaaaagatgggcctcatctctgaagcagcttccccacctgggagccctgagcagcccccacctgacctggcctcggccatcagcaactgggttcagtttgaagatgacacaccctgggccagcacatctccacctcatcaggaaacagctgagacagccctaccattgaccatgccctgctggacatgcccttcctttgactccctggggagatgccctctgacttctgagagcagctggaccacccattctgaagacaccagcagtcctagctttggatgttcgtatacagatctgcagctcatcaatgctgaggagcagacgagtggccaggcttctggggctgactcaactgacaattcctcctcgcttcaagaagatgaagaagtagagatggaggccatcagctggcaggccagcagtccagccatgaatgggcaccctgcccctccagtgacctctgctcgttttcccagctgggtcacctttgatgacaatgaagtcagctgccctttaccaccagtcacctctcctctgaagccaaatacaccaccaagtgcatctgtgatcccagatgtaccttataattcaatgggatcatttaagaagagggaccgtcccaagagcactttgatgaacttctccaaagttcagaagctggatatttcctctttaaaccgcacgccttctgtaactgaggcttcaccttggagggcaaccaaccctttcctgaatgagactctgcaggatgtacagccctcccctatcaaccctttcagtgctttctttgaggagcaggagaggcgctcccaaaacagttccatttccagtaccacgggcaaaagccaaagagattccctcattgtcatctaccaggatgccatcagttttgatgattcaagcaaaacccagtcacactctgatgctgttgaaaaactcaaacaactccaaattgatgaccctgatcactttggcagtgcaactctacctgatgatgacccagtagcctggattgaactagatgctcacccgcctggatcagcacggtcccagcctcgtgacgggtggccaatgatgttgaggatccctgagaagaaaaacatcatgtcctccaggcactggggaccgatcttcgtcaaactgacagacactggttacctgcagctgtattatgagcagggcctagaaaaaccattccgtgagttcaagctggagatctgtcatgagatttcagaaccccggcttcaaaactatgatgagaatggcagaatccacagcttgcggatagaccgtgtcacctataaagagaagaagaaataccagcccaaacctgctgtggcccacacagcagagagggaacaggtgattaagctgggcaccaccaattacgatgacttcctgagtttcatccatgcagttcaggaccgtctcatggatctgccagtgttgtcaatggacttgagcacagttggcctcaactaccttgaagaggagattacagtggatgtcagagatgaattctctggcattgtgagcaaaggagacaaccagattctccagcaccatgtcttgacacggatccacatcctgagtttcctgtctgggctcgcagagtgccgcctgggcctcaatgacatcctcgtcaaagggaatgaaatagttttgaggcaggacatcatgcccaccaccaccacaaagtggatcaagctccatgagtgccgtttccatgggtgtgtggatgaggatgttttccacaactcacgggtcattctgttcaaccctttggatgcgtgccggtttgagctaatgcggttcaggacagtgtttgctgagaagaccttgcctttcacactcaggacggccacaagtgtcaatggggcagaggtggaggtgcagagctggctgaggatgtcaactggcttctccgccaatcgtgaccccctcactcaggttccctgtgagaatgtgatgatccgttaccctgtgcccagtgagtgggtgaaaaacttccgcagggaaagtgtcctgggggaaaagtctttgaaagccaaagtgaaccggggggcaagttttggctccactagtgtttctggctctgagcctgtcatgagagtaactctgggaactgccaagtacgagcatgccttcaactccattgtgtggaggataaaccgactgccggacaaaaactcagcttccggtcacccacactgtttcttttgccaccttgaactcggctctgaccgggaagtgccttccagatttgccaatcacgtgaatgtcgagttcagcatgcccacaacttctgcctccaaagccagcgtgagatctatctctgtagaagacaagactgacgtcaggaagtgggtcaattattctgcacactacagctaccaggtagccttgggaagcatctggctaatgcttccaactccatttgttcaccccactaccctccccctcttattccttttagccatgcttactatgttcgcctggtaacctcttactgccttagaggaagttcaccatacatagctgtgggtgcgtctgctctgat

SEQ ID NO: 20904 - DNA, 564 bp, Homo sapiens
  misc_feature 1..564: note = ENST00000556280
  source 1..564: mol_type = unassigned DNA
gtggacattttaatagataggcacctctgactaattgaaatgtagcttaagtgtcaagatagctttgtaatagaccaaggtgatgttttgtctcaaaacaaacaaaaagagaccctttatttaaaggagttcagtgtggaacggaagatgcaaggtggggtttgaggaaaagagttacaagagccaatgagatgaaaatgccattgtttttcctaatgtggtgtcaaggcagaaccatctctggggatgtcaggaagtcatcctgcagtcgtgaaaggatgaggactgaaatccgtgaagacaattcctcctcgcttcaagaagatgaagaagtagagatggaggccatcagctggcaggccagcagtccagccatgaatgggcaccctgcccctccagtgacctctgctcgttttcccagctgggtcacctttgatgacaatgaagtcagctgccctttaccaccagtcacctctcctctgaagccaaatacaccaccaagtgcatctgtgatcccagatgtaccttataattcaatgggatcatttaagaagagggaccgtc

SEQ ID NO: 20905 - DNA, 1606 bp, Homo sapiens
  misc_feature 1..1606: note = ENST00000555226
  source 1..1606: mol_type = unassigned DNA
ctctctttgcctgctgccatccatgtaagatgtgacttgctcctccttcccttctgccatgattgtgaggcttccccagccatgtggaactatttctgcctggcagattaaccaacggcaagagaggctgatctgtctacattctgagtactgcccttggcaagacacctagaacagaccctggacccaagtctaccgtactaccatacccctactccagcccaccccagacagtattctggggttcacctgaggtcagcagtgtgaagatgaccagtgcctttttagcatgacgactttggaccatgtgattgccacccaccagtcagaatgggtctccttcaatgaagagccaccctttcctgcccactcgcaggggggcacggaagagcacctcccaggactgtcatcttccccagaccagtccgagagctcctccggggagaaccatgtggtggatggaggctctcaagaccattcccactcggagcaggatgactcctctgaaaagatgggcctcatctctgaagcagcttccccacctgggagccctgagcagcccccacctgacctggcctcggccatcagcaactgggttcagtttgaagatgacacaccctgggccagcacatctccacctcatcaggaaacagctgagacaggtgaggaggtaggaagggcccggcttgggtttgtggtcagcagggatgcttttcagtgagaggtctatagggctgccaggattccatttcatctgccccctaaccctgaagcactggtcgcataggggagagcagacggagttctcatctggtttaattctgtaacttgtttttgttgacataagcatacaaaagaatgtatgtgttctaggacatttctagtcctttactcttgtccctggctgttgacttgtctttaaaataatgcatatatatttttctattagggattggaattatatttactcagcccctaaactgtaagcaccttacatacagaaatgaatgtttctgctgggtgcggtggctcatgcctataatttcatcactttgagaggccgagaagggtggctcacttgaggtcaggagtttgagacccacctggctaacacggagaaaccccgtctctgccaaaaatacaaaaattagctgggcgtggtcgtgcacttctgtaatcccagccactcaggaggctgaggcatgtgaattgctgaacctgggagcggaggttgcagtaagctgaggtcgcgccactgcactccaggctgggtgacagagctagactctgtctccaaaaaataaaaacagaaatgaatgtgtgttaaagtgtggaccactgaccatgtctaaccaagtcaccaataggatttgttaaacatggatattctcacacttcagaactcttgaatccaaatcctcatgggtagggatggttgttcatgagaaatctcttattttgtggcatttcaatggccagaagctgcactggggagcttagtaaagctgtaggacttgttagtccccatcctggtgacctggctacttctttattgtgcactgaagtatgccacaggtgattggataagctttgggactgtattagt

SEQ ID NO: 20906 - DNA, 603 bp, Homo sapiens
  misc_feature 1..603: note = ENST00000557055
  source 1..603: mol_type = unassigned DNA
gagtctggagccggcgtcggcgctgcggccgggagggatcgtggcgagagcagtgcggccgggtgggtatcccgcggccagagaagccggctttgccgcggcgacctttcggcggacgccggggaccctgcggaccgcggcgcaggaaaacaactcacgaggcaaaaaagtacatctcgtggatggagcagggcgaagtggttacaagtacagactctggagccagactgcctgggtttgaattgtgcggtttcagatttctgcctggcagattaaccaacggcaagagaggctgatctgtctacattctgagtactgcccttggcaagacacctagaacagaccctggacccaagtctaccgtactaccatacccctactccagcccaccccagacagtattctggggttcacctgaggtcagcagtgtgaagatgaccagtgcctttttagcatgacgactttggaccatgtgattgccacccaccagtcagaatgggtctccttcaatgaagagccaccctttcctgcccactcgcaggggggcacggaagagcacctcccaggactgtcatcttccccagaccagtccgagagctcctc

SEQ ID NO: 20907 - DNA, 439 bp, Homo sapiens
  misc_feature 1..439: note = ENST00000554710
  source 1..439: mol_type = unassigned DNA
ctagcgccgctgtgccccctggcgcccccgagcctgcctggtcgagccacgcggaggcgcggcgtttccaccagccgcgggcgtcccggggtgggggaggacgaggggactctgcttaaggaaaacaactcacgaggcaaaaaagtacatctcgtggatggagcagggcgaagtggttacaagtacagactctggagccagactgcctgggtttgaattgtgcggtttcagatttctgcctggcagattaaccaacggcaagagaggctgatctgtctacattctgagtactgcccttggcaagacacctagaacagaccctggacccaagtctaccgtactaccatacccctactccagcccaccccagacagtattctggggttcacctgaggtcagcagtgtgaagatgaccagtgcctttttagcatgacgactt

SEQ ID NO: 20908 - DNA, 2964 bp, Homo sapiens
  misc_feature 1..2964: note = ENST00000614646
  source 1..2964: mol_type = unassigned DNA
cagatttctgcctggcagattaaccaacggcaagagaggctgatctgtctacattctgagtactgcccttggcaagacacctagaacagaccctggacccaagtctaccgtactaccatacccctactccagcccaccccagacagtattctggggttcacctgaggtcagcagtgtgaagatgaccagtgcctttttagcatgacgactttggaccatgtgattgccacccaccagtcagaatgggtctccttcaatgaagagccaccctttcctgcccactcgcaggggggcacggaagagcacctcccaggactgtcatcttccccagaccagtccgagagctcctccggggagaaccatgtggtggatggaggctctcaagaccattcccactcggagcaggatgactcctctgaaaagatgggcctcatctctgaagcagcttccccacctgggagccctgagcagcccccacctgacctggcctcggccatcagcaactgggttcagtttgaagatgacacaccctgggccagcacatctccacctcatcaggaaacagctgagacagccctaccattgaccatgccctgctggacatgcccttcctttgactccctggggagatgccctctgacttctgagagcagctggaccacccattctgaagacaccagcagtcctagctttggatgttcgtatacagatctgcagctcatcaatgctgaggagcagacgagtggccaggcttctggggctgactcaactgacaattcctcctcgcttcaagaagatgaagaagtagagatggaggccatcagctggcaggccagcagtccagccatgaatgggcaccctgcccctccagtgacctctgctcgttttcccagctgggtcacctttgatgacaatgaagtcagctgccctttaccaccagtcacctctcctctgaagccaaatacaccaccaagtgcatctgtgatcccagatgtaccttataattcaatgggatcatttaagaagagggaccgtcccaagagcactttgatgaacttctccaaagttcagaagctggatatttcctctttaaaccgcacgccttctgtaactgaggcttcaccttggagggcaaccaaccctttcctgaatgagactctgcaggatgtacagccctcccctatcaaccctttcagtgctttctttgaggagcaggagaggcgctcccaaaacagttccatttccagtaccacgggcaaaagccaaagagattccctcattgtcatctaccaggatgccatcagttttgatgattcaagcaaaacccagtcacactctgatgctgttgaaaaactcaaacaactccaaattgatgaccctgatcactttggcagtgcaactctacctgatgatgacccagtagcctggattgaactagatgctcacccgcctggatcagcacggtcccagcctcgtgacgggtggccaatgatgttgaggatccctgagaagaaaaacatcatgtcctccaggcactggggaccgatcttcgtcaaactgacagacactggttacctgcagctgtattatgagcagggcctagaaaaaccattccgtgagttcaagctggagatctgtcatgagatttcagaaccccggcttcaaaactatgatgagaatggcagaatccacagcttgcggatagaccgtgtcacctataaagagaagaagaaataccagcccaaacctgctgtggcccacacagcagagagggaacaggtgattaagctgggcaccaccaattacgatgacttcctgagtttcatccatgcagttcaggaccgtctcatggatctgccagtgttgtcaatggacttgagcacagttggcctcaactaccttgaagaggagattacagtggatgtcagagatgaattctctggcattgtgagcaaaggagacaaccagattctccagcaccatgtcttgacacggatccacatcctgagtttcctgtctgggctcgcagagtgccgcctgggcctcaatgacatcctcgtcaaagggaatgaaatagttttgaggcaggacatcatgcccaccaccaccacaaagtggatcaagctccatgagtgccgtttccatgggtgtgtggatgaggatgttttccacaactcacgggtcattctgttcaaccctttggatgcgtgccggtttgagctaatgcggttcaggacagtgtttgctgagaagaccttgcctttcacactcaggacggccacaagtgtcaatggggcagaggtggaggtgcagagctggctgaggatgtcaactggcttctccgccaatcgtgaccccctcactcaggttccctgtgagaatgtgatgatccgttaccctgtgcccagtgagtgggtgaaaaacttccgcagggaaagtgtcctgggggaaaagtctttgaaagccaaagtgaaccggggggcaagttttggctccactagtgtttctggctctgagcctgtcatgagagtaactctgggaactgccaagtacgagcatgccttcaactccattgtgtggaggataaaccgactgccggacaaaaactcagcttccggtcacccacactgtttcttttgccaccttgaactcggctctgaccgggaagtgccttccagatttgccaatcacgtgaatgtcgagttcagcatgcccacaacttctgcctccaaagccagcgtgagatctatctctgtagaagacaagactgacgtcaggaagtgggtcaattattctgcacactacagctaccagacaacagaaacagacaaccttccaaatcctctatattgcagttgccttccacacacagatttaaaaagaggatcaaagagggtggtgaagatcaggtggaatgcttctttggaagttccactggcatcatctatcagaacaatggtgtga

SEQ ID NO: 20909 - DNA, 807 bp, Homo sapiens
  misc_feature 1..807: note = ENST00000513034
  source 1..807: mol_type = unassigned DNA
atgcctgggaagatggagaagtttctgcagatcgcgcctcactccctggccatcgtcctgggcccggcagaggcgccggcgggggaaaggccaggggcagcccggcccgcgcccccggcccagccccgccagctcgcccggcaccacatcggctacgagatcttcgccgacttcaaagccgagaacatgcagcacttctggaacaagaaggtcacggccgcggtggccgagaccttcttcctgggctggatcgacgagcaggtcctgctgatccagggcaaggaggaacatctggaggcgctgcgcgaaggctggacgcgccgggccctgcggccgccctcgggcttccacatccgctgcctgggtgatgtatcacccatcagtatgtctcccatcagtcagtctcagtttattccactcggggagatcctctgcttggccatctcagcaatgaactcggcaagaaagcctgtcacccaagaagcactgatggagcacctgaccacgtgcttcccagtactcgggagagcctggcttccaacacatcaagcattgttgaaagtaaccgtcgtcagaaccccgctttgagcccggcccatggtggagctggtccagccttcaacttccgagcgagcgcggagcccccgacaaatgaagctgagaagctacagaaaccttccaactgcttgcaagcttctgttactagcgtgtgattgtccttctgcctcagatcttctgtctcattcgatacagcaaagtttacgacactgggactgatgtttacatctttggaaagacaagcatctc

SEQ ID NO: 20910 - DNA, 496 bp, Homo sapiens
  misc_feature 1..496: note = ENST00000511250
  source 1..496: mol_type = unassigned DNA
agagcaaccagggaagggacgaaatgtctgaaggtagaaatgaattgcattaggatttattttaatgcagcctggaaacacacaactttaaatctctgggctgcttaaggagatcccacacctttccttggagggaaaaagaaaaagaggattgaaaaatatacagactacagctatctttaatgtttaagttagctatcaggaaactcgaaatagtgaatgtaataaaatgttgacagcagtttcacttaacatgcggtaactctggactagaacgacatctttggcaccaaaggaaatcgagagaataaaagcagcagtcgtcaggatttgaaggaagccacagattattaccatctgtacattttacagacctcttacaaaaaccagaaacccaggacccagactggagtgtgatgtatcacccatcagtatgtctcccatcagtcagtctcagtttattccactcggggagatcctctgcttggccatctca

SEQ ID NO: 20911 - DNA, 10458 bp, Homo sapiens
  misc_feature 1..10458: note = ENST00000308497
  source 1..10458: mol_type = unassigned DNA
gcagcgtagcgggctggcggtgacttacaccgggactccagagggagagaggaagcgctgcaggccacttgcattgcgtcttccaggctgcgtggacccggcgccccggcgtgtgcggttgtgggggagctcgccgtggcctcccctccctctggctttagcttcctttggggttggcgcaggtgggccaggcagcgcaccgcagatctccccgttcccacgaaggctggctcgctgtctctctccgagcgggagggaccatcctaaaaatatgtaaatatccaagcgctggctccaggctggggcagctgccaaggtccccgcgccgccgccgggtgttttacatgaaaatgagaagcctgatgggaaccgcgttctaacttaaggcagcctggtgattagcatgagactgggcggctgtcctgcttcctgcccttcaatagccgttccgcgcgctcgcgccggagcagcgctgccgccgcgcgggggtcgatcgcaggctcggcgtccttggcagccatggctccggcgccgcctcggccagtaagtaggagcatgcatgtgtagggggcacatgcgtgtcggcgcacccacccagccatccacccgcgcgcacgcacagcgcccggagcctcggcaaggggaagattgacgaggcgctgcagtcgcggggacgacgcgggctcttcctggattccgcaggagcccgcccgccgcagctgctgtctgcagagcctgctcggatcctgtgcacacgcgccccccgctcgagcctctgtgatgaagactgtctcccggggactgcagcggaggcagagccagccagcgccggggactgcgggccgtgcggctgataggcccgcggggacacgactcggacactgtcatccccacgcctcgcgctgagctgcccggcgcggagggtctgccgccgcccctccggcctcccgcacgcccgatcccgggtcagccccggaggcctcggctgcctcatttgtttgggtcttttgtgccgtggctcccagttggccaagcactcctgcgctgaatcgggccattgtctgcgctcccattgccttcacgctgcaagtctcggcgcccccaccccgcccgccccctccccgcctcctcccggccggggagcctcctaacgtgcctttccccccaggaatctggaagctataagccgggcggattgcaaatgaagtgtaatgcattgtgggacgtgtgtaaaatcggagccttcgccgtgggggtgtgggggggcgtggggagggccggacccgccgctggcggtgtagacgccgacgaggaggggctgggaaaatgtgcgcagagtccgcccgggtcgtgcccgccgtagacggatgaaggagcgcgctgcgccccggcgctgaggccccgaggatcggggcggcaggtcgccctccccaccatgaagaagacccggagcacaaccttgcggcgagcctggcctagctcggatttctcggaccgggcctcggaccgcatgaggtcccgcagcgagaaggactaccgcctgcacaagcgtttccccgcggccttcgcgccccaggcttcgcggggctacatgacatcaggtgatgtatcacccatcagtatgtctcccatcagtcagtctcagtttattccactcggggagatcctctgcttggccatctcagcaatgaactcggcaagaaagcctgtcacccaagaagcactgatggagcacctgaccacgtgcttcccaggtgttccaacgccaagccaagaaattctgcggcacacgctgaacacgctggtacgggagaggaagatctacccaactccagatggctacttcatcgtgaccccacagacttatttcataactccttccctcataagaactaacagtaaatggtaccatttggacgagaggatacctgaccggtctcagtgcacctctccgcaacccgggaccatcacgccctctgcctcaggctgtgtcagggaaaggacattgccccgaaaccactgcgactcttgccactgctgcagagaagacgtgcacagcacgcatgcacccaccctgcaaaggaagtctgccaaggactgcaaagacccttactgtcccccttctctgtgccaggtgccacccactgaaaagagcaaaagtactgtaaatttttcctataagacagaaactctctcaaaacctaaagatagtgaaaagcagtcaaaaaaattcgggctaaagttattccggttaagttttaaaaaagacaagaccaaacagctggccaatttttctgcccagtttcctcctgaagagtggcccctgcgagacgaggacacgccagctacgatccctcgggaagtagagatggaaatcattaggcgcattaacccagacctgaccgtggaaaatgtcatgcggcacaccgcgctcatgaagaaactggaagaagaaaaggcccagaggagtaaagccgggtcctctgcccatcacagcggaaggagtaaaaagagtaggactcatcggaagtcccatggaaagtctcggtctcacagcaagacacgggtgtctaaaggagacccttccgacggttcacatctggatatcccagctgaaagagagtatgacttttgtgatcctcttaccagggtgcccagggagggctgcttcatcattgaacacaaaggagataacttcatcatgcacagcaacacaaacgtgctcgagtcccacttccccatgacaccagaatgggatgtgtctggtgaattggctaaaaggagaactgagatgccttttcctgaaccttctaggggaagctcccactcaaaagtgcaccgaagccacagccatacacaggaccggaggtccaggaatgagagatccaacaaagccaaggagagatccaggtcgatggataactccaaaggccctctgggtgcttcttctctagggacgccggaagaccttgctgaaggctgcagccaagacgaccagacccccagccaatcctacattgacgacagtactttaaggcctgcacagaccgttagtctccaaagggctcacatttcgtccacaagctataaagaggtgtgtattccagagatagtcagtggcagcaaggaaccgtccagcgcttgcagccttttggagccaggaaaaccacccgagagtttgccatcctatggcgaactcaactcttgtccaacaaaaacagccacagatgactatttccagtgcaacacctctagtgagacggtgctcacggcaccatcacctctgggaaagaataaggaggaccatgacactctgactttggcagaaggggtgaaaaagctctccccttctgataggcaggtcccccactcctccagggagcctgtggggcacaaggaggagtcaccaaaagggccgggtgggggccccgctgcttcgggaggagtggctgaagggatcgccaacggacgcctcgtccagcaccatggtgccgagcccagcagcttggacaagaggaaagagatatttagcaaagacacactgttcaaacctcttcacagcaccttgtctgtaaacagctatcacaagtcgagcctgtccctcctcaaatctcacccgaagacacctgctgacacattgccaggccgatgtgagaaactggaaccgtccctggggacctcggcggcacaagccatgcctgcttcccagcgtcagcaggagtcaggagggaaccaggaagcctcttttgactattacaacgtctctgatgatgacgactctgaggaaggggcaaacaagaacacagaggaggagaaaaatagagaggacgtaggcaccatgcagtggctcctcgagcgggagaaggaaagagacttgcagaggaaatttgaaaagaacctcacccttcttgctccaaaagaaaccgacagcagcagcaaccagagagccacccattcagcccggctcgacagcatggacagcagcagcatcacagtggacagtggattcaactccccacgtactcgggagagcctggcttccaacacatcaagcattgttgaaagtaaccgtcgtcagaaccccgctttgagcccggcccatggtggagctggtccagccttcaacttccgagcgagcgcggagcccccgacaaatgaagctgagaagctacagaaaccttccaactgcttgcaagcttctgttactagcgtgtgattgtccttctgcctcagatcttctgtctcattcgatacagcaaagtttacgacactgggactgatgtttacatctttggaaagacaagcatctcaaccacagtttttgtgtttacttaaactgtgctgctaagtagggctagggcaaaaaaacaaaaaatctttatttcagagtattgcttttcacatttatggctctgtagcaactgagtaacagtaggggtgatatgtatacttttgcttcactaattgtatctgagcacacataggaaagtctagacactgtaagtgtaatacgcattttcaatgtcatgcagttgccaattccattttaaaatgccacagatgcgtgttgctcccagtctgtggttaaacggtgccacagaactgatccttgacacttccaaaaaaaaaaaaacaaaacaaaacaaaaaaaatttaaaaaaaaaaaacaaaaaacaaaactaagctaccacgaaatgtcaaatgcaagggtccaccttgagggaaatagatgccaaactaactagaagggaccccggccctttgtgtgtgaattgtttatgcaccagtcatttttcactgtgagttttcgtgacactattttgcaggagcccatggaagtgtgtgagaaggggtcgcaatggagatcactgggagtgaatgttttcagggttttgttttgaagtgtcacagatgcttgtctgatttttttaaccttccgtgatcacaaacaggaatataggcctttgaatctgaagtggacaaaggaaagcaatttccagtctggctggggcacagcattaggtgattgaaaaggtgatgtggacttgtaaaaggtgttactcaaatattgaaggaagagaatttcctccttgtgatacttaggatgaccctatcttactctaatagatacaataattagtttgtttaaaagcaaaatgttctttgtgatacaaatgaagagtagggcctgaggatgttattctttctaatggaaggacataaatctattttatgtagttttaaatagaatgcctaaattaggctgtgggagataatttttagtggttgtaggaaagagcaaatttagggagtgttgaacttcaggccttttattcctgggaagatatgtatagagaaaacttttaaaataatttttgattagaaatatacatgtgcccatgtaataaacaacagaatgtgctcattctgctagtgcggtataatccgaatttgtactcccctaaaatttatcagaataacaattatgcatacatgaactatgccagagtaatgtttacagatactttgtaaccaatttcaggaggcgtttttagctggatgtgtagttaattagaccaacttatttccaaatggtttgttaacattttgctttggtttacaatgtcatgttgaacacaaagaagacccagcagcaaagggatgaccaataatttcatcttatagcaaggagacattccaacgttcccatgttttattttctgagaacagtgggacagatctgtagtaatggaatattatttgcaaaagggttacatatgacacaagtaagtgttctgacataaagttttatttagttcagtggcatgtgctgttgggagccatacaccataaaatatatatatcccaaaataaatctagaatattttcacctccaatttcagtaattggcatatgatttgtgagacgcatctgtttttgtatgaggtttaatcactagcaatctgtttaaagaatccagtcctatacacagttggactcattcttgaaacctttaaatgctccctcatagtttttcagttatttggaagttgcattgggtcaaactgaactccttgagtttggtgtaaattccttttttctgcttattatagtgaaacttcagcatgtttcttagtaaactcccataccattgaaatgcttaagccagttggctttcagtctcatgccttatttcctccaaggcatgcctcaacgcattgtttgtctcattgcttaaatatgtccagaaggaatgatcatgtatctaatagactacatagttggttcccttggggagttatatatcatacagttactaaatatttgtctaaattcattttttccaaaaacctgctctcaaatttttcttctactctcagttcataaataatataaccattgaaacaacacatcagcctctagctgatcctctgaaagtagccattgaaataatcgaatactgtgtgaacaggaaaggaaagcgttacctttaagagaagctttaaaataggaatttattgatatttcacaagatataggtttacagaagacattattcaaataaatatgtacactatttgcctgatgctatggggtacataattttttaaaaactcccttagaccagcagccattagtgtagaaatgatggactttaaaggtgataccatgtaagcagatgttgcatataaaaatattcctgcctgaatctgatcgagattcttgaatgggggaggagtggcagccggcagcacattgcaaatgtcattcgaggtcacggtgaggctctcggtcccggaacagtgggggcctcgccaggcgttgccagtatccctttcctcctgtaaaatcatagctttgtgttacacgactgcttatccagtcttagggtttagcagctgaaaggtttacaaaactgaatctggttgaatctctgtgaaagggtcaacacatctgtcggcattttgcacacttatgtattattatgatacaacatattactttatggtaatttttatttttacatataactacctccataaatttgatgaaatggcagccgtgtgttaaagtgtatcgttcagaagagcaaagttgaacacttccttcaacattagggcatggcgtgctgtgtgtgtcagtgattgcctctgtggactcatgactttccatcgccatggctttctcttacgccgctgtttggctttcagatgtaatcctgtcttctcctctcttccccacgaaagcgcactcgattttgttaggaatgaacggaagtttaaaaattcttgtgcccacccccgccctccacccattcctgttaaaagttctctggcgaagagccaatgggtgaacgtaattgaaagagctatttactcttttggaaatctgatttgaagtctaagttttcagtaacagaagacacacaagcaatgtggactgccaagcttgaagcacttcgggctctgccttcactcgcatgctaccatgtcgagcccaaactccactttaattaaaagagctgtgctgtgaattccacaacttctgttaaataatttgtattccattatatatattttgcacatctcaggggaccataatgaacatatgaaaggggggggggtgccatcaaatagagaaaacaaatagaagaggtgaatggagactagctggataaaaataacaaattacttcttctctgatgttgtgaaggtcaggttcaggaagcatcaattcacagttaatccggagtaacaatgatctgaacaccagctgttcccaggtccctctttttcatagcccaaccagcatctaaaatgtaaatttaaattacattgcagtcaccatggggagaagaaacctgttcagtggaagcagaagcattgttccttttttaggttggcgcagctttgcaaaactctacccaggataaaccacttatcaccaccaagtgtacttgaaaataaagtttttaacttaaattacaagcatattgctcataatacaatagtgatcattttttgaaagtcttgccatttataacatgggcagtatttggagcttcatttaaaaaccaacaacaaccgataatgactttgcacgattcactttgggatctcaaagtgcttccaaagcattcagatttacaaacaattcacaagacaggtcatctttgtaatacgcatacttacaacgaattaacaaaaggagtgacttaagattctccaggaacacagtggcagctattgatgatctgttttctatctgtttgatagagcatcatgagaaatcacaaaatacaatgctatttttctgatgtgtgctaataaagtcaaagaaaacaaatacatcttgacacttttgtccattttcattaaaaaaaaaaaagttcagggtgtttggaattttacatctcagcacaccttactggtatcaatggataaagcgggtgattgacagatccacccaaatgccactgcagtcagaagcagatctggacacacccttgtttacagtttcatattgggttgctatagttcccgtgctaaatcaccagctttcaggaacatgactgctcctggcagtggaaggtgctgaaacagaaattttaattaaaaactttatcaagtactcttcacagtgctgcttggcaccatagaaaatcagtacaatatatcgagccctactttggaggagctggatttctgagggagctgatccagttctaagtgtcttctcgaattaggagatagatgatctttgatggggatctcctccgtcaccacaggccagtcacagaaccaactagccacgtgctgccagacctcagtgggcccaagcaggagcaatctcttctatcccccatctcccccaggaccatcccgcccattgtcaacgtcatccagggctcttctggtagtgagtgacttttctgcacatgtttagggcttgggggagctagaacacaggaaacatgaatgcaaaaggcatggaaaacactgttttgctttgggttagtaaaatgtgggcaggacaaagattactattggtctgagctttgccaagtgagatagaatcaactgtcaccccattcctttcccagaaggtcttatggtattaaggatacatccagtattttcccacagatttttattcaggcgatgtttcataaattacatatatgaaaacattcattattacatttccttgtgtgtttcaaacagacattggcaccttcctattgagttaattctctgcatcttttgcagcagcagcccacaaggagattcccagagatggctcccctaacacacagtcctgtgattttacagttctatgacttacagttgatgattcacaagattcaggattctacaagactcaagggggaactaaactttcttacgattgtacatgatcagttatagggctgtaatcattaattgttggcttcaaatgtggacacacacacacacacatcatgccaaggagggaatggggtgtttcaagtcaggcagcgatgattctggaaggttggaaatgtaaggttagaagcttggctggtcttagtaaacttgttcccttgctcccaccaagaagaggtaccaaatgtgagacctgagatctcctccaatatctgtcctctgcagttccgggaaactaatcatgaagtacacatgcagcagctcctccacttcctttcctccgaggtcctcctttccattctcccacctagatactgacacaccgccacggtttccacattggaagggcagaacactgtgcagtatcgtgcacacttgctgggttaggaatagagctgccctagggtcaccttcatgcaagtattgacagctacaaattaaagtccttagagcagttgacacagatactacgttctagaagagaattaaatttaaacgtcaagtttaaagggatcataattctgcaggtatctttctctgagtgactgaatgtgactattgcattagggtaaatgaattaagacgtgcaagtgggatttactgtatgttagaaaggagttttgcagccaagactgccttgaataaaatgtgtttgcactgaaaaaaaattttaaattacttggtctctggttgctgtaaaggtcatccaagatggatgttctgtttatattgtatagtatttcatatgaaataattacagttcatgaaatgtcttccctaatgttactgatttataacagcacatttgtaacatggtttttatcgtgtcagtgtaccatactgtaaatgatgattacttgtcatgcttagtataataacttaaaagaaaaaaaaggacagggatttttgtaagtctatatttgaaagtccctccctatggtgatactgtgttcatgttgtttatgtagtgttgtgtgaaatatccattttggattgtgttactttttaagatattaaataacatttggttata

SEQ ID NO: 20912 - DNA, 518 bp, Homo sapiens
  misc_feature 1..518: note = ENST00000512520
  source 1..518: mol_type = unassigned DNA
gaatgctcagcttgtctcaaggctgcaatgaggtgatgtatcacccatcagtatgtctcccatcagtcagtctcagtttattccactcggggagatcctctgcttggccatctcagcaatgaactcggcaagaaagcctgtcacccaagaagcactgatggagcacctgaccacgtgcttcccaggtgttccaacgccaagccaagaaattctgcggcacacgctgaacacgctggtacgggagaggaagatctacccaactccagatggctacttcatcgtgaccccacagacttatttcataactccttccctcataagaactaacagtaaatggtaccatttggacgagaggatacctgaccggtctcagtgcacctctccgcaacccgggaccatcacgccctctgcctcaggctgtgtcagggaaaggacattgccccgaaaccactgcgactcttgccactgctgcagagaagacgtgcacagcacgcatgcacccaccctgcaaaggaagt

SEQ ID NO: 20913 - DNA, 1055 bp, Homo sapiens
  misc_feature 1..1055: note = ENST00000506529
  source 1..1055: mol_type = unassigned DNA
ctcctccagggagcctgtggggcacaaggaggagtcaccaaaagggccgggtgggggccccgctgcttcgggaggagtggctgaagggatcgccaacggacgcctcgtccagcaccatggtgccgagcccagcagcttggacaagaggaaagagatatttagcaaagacacactgttcaaacctcttcacagcaccttgtctgtaaacagctatcacaagtcgagcctgtccctcctcaaatctcacccgaagacacctgctgacacattgccaggccgatgtgagaaactggaaccgtccctggggacctcggcggcacaagccatgcctgcttcccagcgtcagcaggagtcaggagggaaccaggaagcctcttttgactattacaacgtctctgatgatgacgactctgaggaaggggcaaacaagaacacagaggaggagaaaaatagagaggacgtaggcaccatgcagtggctcctcgagcgggagaaggaaagagacttgcagaggaaatttgaaaagaacctcacccttcttgctccaaaagaaaccgacagcagcagcaaccagagagccacccattcagcccggctcgacagcatggacagcagcagcatcacagtggacagtggattcaactccccacggaattgaaaaaaatgtttctgcacctgtagagatcaccaatctggactgtactcgggagagcctggcttccaacacatcaagcattgttgaaagtaaccgtcgtcagaaccccgctttgagcccggcccatggtggagctggtccagccttcaacttccgagcgagcgcggagcccccgacaaatgaagctgagaagctacagaaaccttccaactgcttgcaagcttctgttactagcgtgtgattgtccttctgcctcagatcttctgtctcattcgatacagcaaagtttacgacactgggactgatgtttacatctttggaaagacaagcatctcaaccacagtttttgtgtttacttaaactgtgctgctaagtagggctagggcaaaaaaacaaaaaa

SEQ ID NO: 20914 - DNA, 1698 bp, Homo sapiens
  misc_feature 1..1698: note = ENST00000541731
  source 1..1698: mol_type = unassigned DNA
gtcacttcctgccgatgccggtgtggacgctgtgaatcgtggctggcccggttctccgcttctccccatcccctactttcctccctccctccctttccctccctcgtcgactgttgcttgctggtcgcagactccctgacccctccctcacccctccctaacctcggtgccaccggattgcccttcttttcctgttgcccagcccagccctagtgtcagggcgggggcctggagcagcccgaggcactgcagcagaagagagaaaagacaacgacgaccctcagctcgccagtccggtcgctggcttcgccgccgccatggcaatgagacagacgccgctcacctgctctggccacacgcgacccgtggttgatttggccttcagtggcatcacgccttatgggtatttcttaatcagcgcttgcaaagcaaagtgtgggatgctgtctcaggagatgaattgatgaccctggctcataaacacattgtcaagactgtggatttcacgcaggatagtaattatttgttaaccgggggacaggataaactgttacgcatatatgacttgaacaaacctgaagcagaacctaaggaaattagtggtcatacttctggtataaaaaaagctctgtggtgcagtgaggataaacagattctttctgctgatgacaaaactgttcgactttgggatcatgctactatgacagaagtgaaatctctaaattttaatatgtctgttagtagtatggaatatattcctgagggagagattttggttataacttatggacgatctattgcttttcatagtgcagtaagtttggacccaattaaatcctttgaagctcctgcaaccatcaattctgcatctcttcatcctgagaaagaatttcttgttgcaggcggtgaagattttaaactttataagtatgattataatagtggagaagaattagaatcctacaagggacactttggtcctattcactgtgtgagatttagtcctgatggagaactctatgccagtggttcagaagatggaacattgagactatggcaaactgtggtaggaaaaacgtatggcctttggaaatgtgtgcttcctgaagaagatagtggtgagctggcaaagccaaagattggttttccagagacaacagaagaggagctagaagaaattgcttcagagaattcagattgcatctttccttcagctcctgatgttaaggcctgagcgtcaatcatatgtgcagttagtatacaactgactaaaacaagcaagcagagaaaagcatcagccttccagagttactgtctgcttaaggcagaaacagcagtaaataatgaggaaaatgaattagctccagtgctggaacaactaactaacttggtgttacctgtaagtgaaaactcaagtgtcagatgaagggaggtggagttatcctcttatagtacagtggcctgttatctttttaatgaatatatacaagccaacatccaatttctattattacaattagggttcttgtagctgtttatgttaatatggagaagaaaactatattggctgattttttctgatcttaaagcagaatgccttttctttttttgcttcagttgtaaagaagagggaatacatgataaagtaactggtttgatttctcgttcattgtacactgcctctgaacatctaattgt

SEQ ID NO: 20915 - DNA, 1442 bp, Homo sapiens
  misc_feature 1..1442: note = ENST00000025399
  source 1..1442: mol_type = unassigned DNA
acttcctgccgatgccggtgtggacgctgtgaatcgtggctggcccggttctccgcttctccccatcccctactttcctccctccctccctttccctccctcgtcgactgttgcttgctggtcgcagactccctgacccctccctcacccctccctaacctcggtgccaccggattgcccttcttttcctgttgcccagcccagccctagtgtcagggcgggggcctggagcagcccgaggcactgcagcagaagagagaaaagacaacgacgaccctcagctcgccagtccggtcgctggcttcgccgccgccatggcaatgagacagacgccgctcacctgctctggccacacgcgacccgtggttgatttggccttcagtggcatcacgccttatgggtatttcttaatcagcgcttgcaaaggagctggtcagcatttgcctagactctcgggacaacacgatggtaaacctatgctacgccagggagatacaggagactggattggaacatttttgggtcataaaggtgctgtttggggtgcaacactgaataaggatgccaccaaagcagctacagcagctgcagatttcacagccaaagtgtgggatgctgtctcaggagatgaattgatgaccctggctcataaacacattgtcaagactgtggatttcacgcaggatagtaattatttgttaaccgggggacaggataaactgttacgcatatatgacttgaacaaacctgaagcagaacctaaggaaattagtggtcatacttctggtataaaaaaagctctgtggtgcagtgaggataaacagattctttctgctgatgacaaaactgttcgactttgggatcatgctactatgacagaagtgaaatctctaaattttaatatgtctgttagtagtatggaatatattcctgagggagagattttggttataacttatggacgatctattgcttttcatagtgcagtaagtttggacccaattaaatcctttgaagctcctgcaaccatcaattctgcatctcttcatcctgagaaagaatttcttgttgcaggcggtgaagattttaaactttataagtatgattataatagtggagaagaattagaatcctacaagggacactttggtcctattcactgtgtgagatttagtcctgatggagaactctatgccagtggttcagaagatggaacattgagactatggcaaactgtggtaggaaaaacgtatggcctttggaaatgtgtgcttcctgaagaagatagtggtgagctggcaaagccaaagattggttttccagagacaacagaagaggagctagaagaaattgcttcagagaattcagattgcatctttccttcagctcctgatgttaaggcctgagcgtcaatcatatgtgcagttagtatacaactgact

SEQ ID NO: 20916 - DNA, 1866 bp, Homo sapiens
  misc_feature 1..1866: note = ENST00000419869
  source 1..1866: mol_type = unassigned DNA
cttcctgccgatgccggtgtggacgctgtgaatcgtggctggcccggttctccgcttctccccatcccctactttcctccctccctccctttccctccctcgtcgactgttgcttgctggtcgcagactccctgacccctccctcacccctccctaacctcggtgccaccggattgcccttcttttcctgttgcccagcccagccctagtgtcagggcgggggcctggagcagcccgaggcactgcagcagaagagagaaaagacaacgacgaccctcagctcgccagtccggtcgctggcttcgccgccgccatggcaatgagacagacgccgctcacctgctctggccacacgcgacccgtggttgatttggccttcagtggcatcacgccttatgggtatttcttaatcagcgcttgcaaagatggtaaacctatgctacgccagggagatacaggagactggattggaacatttttgggtcataaaggtgctgtttggggtgcaacactgaataaggatgccaccaaagcagctacagcagctgcagatttcacagccaaagtgtgggatgctgtctcaggagatgaattgatgaccctggctcataaacacattgtcaagactgtggatttcacgcaggatagtaattatttgttaaccgggggacaggataaactgttacgcatatatgacttgaacaaacctgaagcagaacctaaggaaattagtggtcatacttctggtataaaaaaagctctgtggtgcagtgaggataaacagattctttctgctgatgacaaaactgttcgactttgggatcatgctactatgacagaagtgaaatctctaaattttaatatgtctgttagtagtatggaatatattcctgagggagagattttggttataacttatggacgatctattgcttttcatagtgcagtaagtttggacccaattaaatcctttgaagctcctgcaaccatcaattctgcatctcttcatcctgagaaagaatttcttgttgcaggcggtgaagattttaaactttataagtatgattataatagtggagaagaattagaatcctacaagggacactttggtcctattcactgtgtgagatttagtcctgatggagaactctatgccagtggttcagaagatggaacattgagactatggcaaactgtggtaggaaaaacgtatggcctttggaaatgtgtgcttcctgaagaagatagtggtgagctggcaaagccaaagattggttttccagagacaacagaagaggagctagaagaaattgcttcagagaattcagattgcatctttccttcagctcctgatgttaaggcctgagcgtcaatcatatgtgcagttagtatacaactgactaaaacaagcaagcagagaaaagcatcagccttccagagttactgtctgcttaaggcagaaacagcagtaaataatgaggaaaatgaattagctccagtgctggaacaactaactaacttggtgttacctgtaagtgaaaactcaagtgtcagatgaagggaggtggagttatcctcttatagtacagtggcctgttatctttttaatgaatatatacaagccaacatccaatttctattattacaattagggttcttgtagctgtttatgttaatatggagaagaaaactatattggctgattttttctgatcttaaagcagaatgccttttctttttttgcttcagttgtaaagaagagggaatacatgataaagtaactggtttgatttctcgttcattgtacactgcctctgaacatctaattgtttttagttgtctaaataaaatgcctctaaaacaaaa

SEQ ID NO: 20917 - DNA, 434 bp, Homo sapiens
  misc_feature 1..434: note = ENST00000536737
  source 1..434: mol_type = unassigned DNA
ttataacttatggacgatctattgcttttcatagtgcagtaagtttggacccaattaaatcctttgaagctcctgcaaccatcaattctgcatctcttcatcctgagaaagaatttcttgttgcaggcggtgaagattttaaactttataagtatgattataatagtggagaagaattaggtgagttgtccccttacagtgatgtggttacctttatcatatgttaagtcccagtaattaacacctcatttatatatatatatatgttacatatatatgttgaaagtaaatttttcagctaacttaagcttggtgcttacaagtgaaaaagtaaaggagttttaaccatttgggtcagatgcttttatagatctgtaaacaaagtatgcagaaatttatccttttaactaaagttcatcattatgctgatgtta

SEQ ID NO: 20918 - DNA, 648 bp, Homo sapiens
  misc_feature 1..648: note = ENST00000538718
  source 1..648: mol_type = unassigned DNA
gaaagaatttcttgttgcaggcggtgaagattttaaactttataagtatgattataatagtggagaagaattagaatcctacaagggacactttggtcctattcactgtgtgagatttagtcctgatggagaactctatgccagtggttcagaagatggaacattgagactatggcaaactgtggtaggaaaaacgtatggcctttggaaatgtgtgcttcctgaagaaattgcttcagagaattcagattgcatctttccttcagctcctgatgttaaggcctgagcgtcaatcatatgtgcagttagtatacaactgactaaaacaagcaagcagagaaaagcatcagccttccagagttactgtctgcttaaggcagaaacagcagtaaataatgaggaaaatgaattagctccagtgctggaacaactaactaacttggtgttacctgtaagtgaaaactcaagtgtcagatgaagggaggtggagttatcctcttatagtacagtggcctgttatctttttaatgaatatatacaagccaacatccaatttctattattacaattagggttcttgtagctgtttatgttaatatggagaagaaaactatattggctgattttttctgatcttaaagcagaatg

SEQ ID NO: 20919 - DNA, 676 bp, Homo sapiens
  misc_feature 1..676: note = ENST00000539887
  source 1..676: mol_type = unassigned DNA
actttaatagtgtaagtcatataatcgtcattgcttttctttttacagaagaagatagtggtgagctggcaaagccaaagattggttttccagagacaacagaagaggagctagaagaaattgcttcagagaattcagattgcatctttccttcagctcctgatgttaaggcctgagcgtcaatcatatgtgcagttagtatacaactgactaaaacaagcaagcagagaaaagcatcagccttccagagttactgtctgcttaaggcagaaacagcagtaaataatgaggaaaatgaattagctccagtgctggaacaactaactaacttggtgttacctgtaagtgaaaactcaagtgtcagatgaagggaggtggagttatcctcttatagtacagtggcctgttatctttttaatgaatatatacaagccaacatccaatttctattattacaattagggttcttgtagctgtttatgttaatatggagaagaaaactatattggctgattttttctgatcttaaagcagaatgccttttctttttttgcttcagttgtaaagaagagggaatacatgataaagtaactggtttgatttctcgttcattgtacactgcctctgaacatctaattgtttttagttgtctaaataaaatgcctctaaaacaaaa

SEQ ID NO: 20920 - DNA, 5680 bp, Homo sapiens
  misc_feature 1..5680: note = ENST00000450892
  source 1..5680: mol_type = unassigned DNA
gccctgccctcacctggctatcccacacaggtgagaataaccagaactcacctccggtaccagtgttcacttggaaacatggctctcagcctctggcccctgctgctgctgctgctgctgctgctgctgctgtcctttgcagtgactctggcccctactgggcctcattccctggaccctggtctctccttcctgaagtcattgctctccactctggaccaggctccccagggctccctgagccgctcacggttctttacattcctggccaacatttcttcttcctttgagcctgggagaatgggggaaggaccagtaggagagcccccacctctccagccgcctgctctgcggctccatgattttctagtgacactgagaggtagccccgactgggagccaatgctagggctgctaggggatatgctggcactgctgggacaggagcagactccccgagatttcctggtgcaccaggcaggggtgctgggtggacttgtggaggtgctgctgggagccttagttcctgggggcccccctaccccaactcggcccccatgcacccgtgatgggccgtctgactgtgtcctggctgctgactggttgccttctctgctgctgttgttagagggcacacgctggcaagctctggtgcaggtgcagcccagtgtggaccccaccaatgccacaggcctcgatgggagggaggcagctcctcactttttgcagggtctgttgggtttgcttaccccaacaggggagctaggctccaaggaggctctttggggcggtctgctacgcacagtgggggcccccctctatgctgcctttcaggaggggctgctccgtgtcactcactccctgcaggatgaggtcttctccattttggggcagccagagcctgataccaatgggcagtgccagggaggtaaccttcaacagctgctcttatggggcgtccggcacaacctttcctgggatgtccaggcgctgggctttctgtctggatcaccacccccaccccctgccctccttcactgcctgagcacgggcgtgcctctgcccagagcttctcagccgtcagcccacatcagcccacgccaacggcgagccatcactgtggaggccctctgtgagaaccacttaggcccagcaccaccctacagcatttccaacttctccatccacttgctctgccagcacaccaagcctgccactccacagccccatcccagcaccactgccatctgccagacagctgtgtggtatgcagtgtcctgggcaccaggtgcccaaggctggctacaggcctgccacgaccagtttcctgatgagtttttggatgcgatctgcagtaacctctccttttcagccctgtctggctccaaccgccgcctggtgaagcggctctgtgctggcctgctcccaccccctaccagctgccctgaaggcctgccccctgttcccctcaccccagacatcttttggggctgcttcttggagaatgagactctgtgggctgagcgactgtgtggggaggcaagtctacaggctgtgccccccagcaaccaggcttgggtccagcatgtgtgccagggccccaccccagatgtcactgcctccccaccatgccacattggaccctgtggggaacgctgcccggatgggggcagcttcctggtgatggtctgtgccaatgacaccatgtatgaggtcctggtgcccttctggccttggctagcaggccaatgcaggataagtcgtgggggcaatgacacttgcttcctagaagggctgctgggcccccttctgccctctctgccaccactgggaccatccccactctgtctgacccctggccccttcctccttggcatgctatcccagttgccacgctgtcagtcctctgtcccagctcttgctcaccccacacgcctacactatctcctccgcctgctgaccttcctcttgggtccaggggctgggggcgctgaggcccaggggatgctgggtcgggccctactgctctccagtctcccagacaactgctccttctgggatgcctttcgcccagagggccggcgcagtgtgctacggacgattggggaatacctggaacaagatgaggagcagccaaccccatcaggctttgaacccactgtcaaccccagctctggtataagcaagatggagctgctggcctgctttagtcctgtgctgtgggatctgctccagagggaaaagagtgtttgggccctgcagattctagtgcaggcgtacctgcatatgcccccagaaaacctccagcagctggtgctttcagcagagagggaggctgcacagggcttcctgacactcatgctgcaggggaagctgcaggggaagctgcaggtaccaccatccgaggagcaggccctgggtcgcctgacagccctgctgctccagcggtacccacgcctcacctcccagctcttcattgacctgtcaccactcatccctttcttggctgtctctgacctgatgcgcttcccaccatccctgttagccaacgacagtgtcctggctgccatccgggattacagcccaggaatgaggcctgaacagaaggaggctctggcaaagcgactgctggcccctgaactgtttggggaagtgcctgcctggccccaggagctgctgtgggcagtgctgcccctgctcccccacctccctctggagaactttttgcagctcagccctcaccagatccaggccctggaggatagctggccagcagcaggtctggggccagggcatgcccgccatgtgctgcgcagcctggtaaaccagagtgtccaggatggtgaggagcaggtacgcaggcttgggcccctcgcctgtttcctgagccctgaggagctgcagagcctagtgcccctgagtgatccaacggggccagtagaacgggggctgctggaatgtgcagccaatgggaccctcagcccagaaggacgggtggcatatgaacttctgggtgtgttgcgctcatctggaggagcggtgctgagcccccgggagctgcgggtctgggcccctctcttctctcagctgggcctccgcttccttcaggagctgtcagagccccagcttagagccatgcttcctgtcctgcagggaactagtgttacacctgctcaggctgtcctgctgcttggacggctccttcctaggcacgatctatccctggaggaactctgctccttgcaccttctgctaccaggcctcagcccccagacactccaggccatccctaggcgagtcctggtcggggcttgttcctgcctggcccctgaactgtcacgcctctcagcctgccagaccgcagcactgctgcagacctttcgggttaaagatggtgttaaaaatatgggtacaacaggtgctggtccagctgtgtgtatccctggtcagcctattcccaccacctggccagactgcctgcttcccctgctcccattaaagctgctacaactggattccttggctcttctggcaaatcgaagacgctactgggagctgccctggtctgagcagcaggcacagtttctctggaagaagatgcaagtacccaccaaccttaccctcaggaatctgcaggctctgggcaccctggcaggaggcatgtcctgtgagtttctgcagcagatcaactccatggtagacttccttgaagtggtgcacatgatctatcagctgcccactagagttcgagggagcctgagggcctgtatctgggcagagctacagcggaggatggcaatgccagaaccagaatggacaactgtagggccagaactgaacgggctggatagcaagctactcctggacttaccgatccagttgatggacagactatccaatgaatccattatgttggtggtggagctggtgcaaagagctccagagcagctgctggcactgacccccctccaccaggcagccctggcagagagggcactacaaaacctggctccaaaggagactccagtctcaggggaagtgctggagaccttaggccctttggttggattcctggggacagagagcacacgacagatccccctacagatcctgctgtcccatctcagtcagctgcaaggcttctgcctaggagagacatttgccacagagctgggatggctgctattgcaggagtctgttcttgggaaaccagagttgtggagccaggatgaagtagagcaagctggacgcctagtattcactctgtctactgaggcaatttccttgatccccagggaggccttgggtccagagaccctggagcggcttctagaaaagcagcagagctgggagcagagcagagttggacagctgtgtagggagccacagcttgctgccaagaaagcagccctggtagcaggggtggtgcgaccagctgctgaggatcttccagaacctgtgccaaattgtgcagatgtacgagggacattcccagcagcctggtctgcaacccagattgcagagatggagctctcagactttgaggactgcctgacattatttgcaggagacccaggacttgggcctgaggaactgcgggcagccatgggcaaagcaaaacagttgtggggtcccccccggggatttcgtcctgagcagatcctgcagcttggtaggctcttaataggtctaggagatcgggaactacaggagctgatcctagtggactggggagtgctgagcaccctggggcagatagatggctggagcaccactcagctccgcattgtggtctccagtttcctacggcagagtggtcggcatgtgagccacctggacttcgttcatctgacagcgctgggttatactctctgtggactgcggccagaggagctccagcacatcagcagttgggagttcagccaagcagctctcttcctcggcaccctgcatctccagtgctctgaggaacaactggaggttctggcccacctacttgtactgcctggtgggtttggcccaatcagtaactgggggcctgagatcttcactgaaattggcaccatagcagctgggatcccagacctggctctttcagcactgctgcggggacagatccagggcgttactcctcttgccatttctgtcatccctcctcctaaatttgctgtggtgtttagtcccatccaactatctagtctcaccagtgctcaggctgtggctgtcactcctgagcaaatggcctttctgagtcctgagcagcgacgagcagttgcatgggcccaacatgagggaaaggagagcccagaacagcaaggtcgaagtacagcctggggcctccaggactggtcacgaccttcctggtccctggtattgactatcagcttccttggccacctgctatgagcctgtctctacagtagaaggagattgtggggagagaaatcttaagtcataatgaataaagtgcaaacagaagtgcatcctgattattttcagaagctgatgaggaatatgggtaaaatgttaatgctttccacccacctgagaatcagtgttcctgggttgccatatctggagtctctttccatcataaataatcccactgcctcttttcatttcctgaaggctgctccctcctcaccccaccattagaagtaacacagacagctgcagcata

SEQ ID NO: 20921 - DNA, 3364 bp, Homo sapiens
  misc_feature 1..3364: note = ENST00000471703
  source 1..3364: mol_type = unassigned DNA
agtgctgcccctgctcccccacctccctctggagaactttttgcagctcagccctcaccagatccaggccctggaggatagctggccagcagcaggtctggggccagggcatgcccgccatgtgctgcgcagcctggtaaaccagagtgtccaggatggtgaggagcaggagctgtcagagccccagcttagagccatgcttcctgtcctgcagggaactagtgttacacctgctcaggctgtcctgctgcttggacggctccttcctaggcacgatctatccctggaggaactctgctccttgcaccttctgctaccaggcctcagcccccagacactccaggccatccctaggcgagtcctggtcggggcttgttcctgcctggcccctgaactgtcacgcctctcagcctgccagaccgcagcactgctgcagacctttcgggtatgagagtggcaaggaggatgagataatcagggataccggctctttctggttgggaggaaggcatcttccctgaggccagggaaggcctttcatacctccccacttacacacacacacacacacacacacacacacacacacacaaccaattctcatgcaggttaaagatggtgttaaaaatatgggtacaacaggtgctggtccagctgtgtgtatccctggtcaggtaagtgtgagatctcccaactgagctcctctccccattctggggcagtttcatatggctggtgctacctcccacactaccctgcagtggccctgagagttctggttagctctgtgcccattagcagccctccccagtgccagatgcaggacagcatgatccactcacattgtcctagactaatgtcaaagctggaagggcctgagaaatcttccaggccacccaccctgctttcagatgaaaagaccaaggctgggagaagctaagggactttgtttgcctggtgcctaactagcagcaacacttgaccacagcagcctgcagtgtgaggctcttaggcgtttattgctacagtggcaaatgccattccacttctgtcctagctttggtccctttccacccccatggttccttttctctgagtgctaagtacagactctctcacctatcactacactgctatacccatcaccgccagcagcctattcccaccacctggccagactgcctgcttcccctgctcccattaaagctgctacaactggattccttggctcttctggcaaatcgaagacgctactgggagctgccctggtctgagcagcaggcacagtttctctggaagaagatgcaagtacccaccaaccttaccctcaggaatctgcaggctctgggcaccctggcaggaggcatgtcctgtgagtttctgcagcagatcaactccatggtagacttccttgaagtggtgcacatgatctatcagctgcccactagagttcgagggagcctgagggcctgtatctgggcagagctacagcggaggatggcaatgccagaaccagaatggacaactgtagggccagaactgaacgggctggatagcaagctactcctggacttaccgatccagttgatggacagactatccaatgaatccattatgttggtggtggagctggtgcaaagagctccagagcagctgctggcactgacccccctccaccaggcagccctggcagagagggcactacaaaacctgattcctgtctacaaggcctggcccctgttttgcctctgggttctgttccttgataatatgcttcacgttacttgtccatacctcttggagtccgagaaatctcttggagtccacctctcagtctttctgcctgctcctatctgggctcattgcttaaggaagtgaacaaaggctccaaaggagactccagtctcaggggaagtgctggagaccttaggccctttggttggattcctggggacagagagcacacgacagatccccctacagatcctgctgtcccatctcagtcagctgcaaggcttctgcctaggagagacatttgccacagagctgggatggctgctattgcaggagtctgttcttgggaaaccagagttgtggagccaggatgaagtagagcaagctggacgcctagtattcactctgtctactgaggcaatttccttgatccccagggaggccttgggtccagagaccctggagcggcttctagaaaagcagcagagctgggagcagagcagagttggacagctgtgtagggagccacagcttgctgccaagaaagcagccctggtagcaggggtggtgcgaccagctgctgaggatcttccagaacctgtgccaaattgtgcagatgtacgagggacattcccagcagcctggtctgcaacccagattgcagagatggagctctcagactttgaggactgcctgacattatttgcaggagacccaggacttgggcctgaggaactgcgggcagccatgggcaaagcaaaacagttgtggggtcccccccggggatttcgtcctgagcagatcctgcagcttggtaggctcttaataggtctaggagatcgggaactacaggagctgatcctagtggactggggagtgctgagcaccctggggcagatagatggctggagcaccactcagctccgcattgtggtctccagtttcctacggcagagtggtcggcatgtgagccacctggacttcgttcatctgacagcgctgggttatactctctgtggactgcggccagaggagctccagcacatcagcagttgggagttcagccaagcagctctcttcctcggcaccctgcatctccagtgctctgaggaacaactggaggttctggcccacctacttgtactgcctggtgggtttggcccaatcagtaactgggggcctgagatcttcactgaaattggcaccatagcagctgggatcccagacctggctctttcagcactgctgcggggacagatccagggcgttactcctcttgccatttctgtcatccctcctcctaaatttgctgtggtgtttagtcccatccaactatctagtctcaccagtgctcaggctgtggctgtcactcctgagcaaatggcctttctgagtcctgagcagcgacgagcagttgcatgggcccaacatgagggaaaggagagcccagaacagcaaggtcgaagtacagcctggggcctccaggactggtcacgaccttcctggtccctggtattgactatcagcttccttggccacctgctatgagcctgtctctacagtagaaggagattgtggggagagaaatcttaagtcataatgaataaagtgcaaacagaagtgcatcctg

SEQ ID NO: 20922 - DNA, 2518 bp, Homo sapiens
  misc_feature 1..2518: note = ENST00000448437
  source 1..2518: mol_type = unassigned DNA
agaaggaggctctggcaaagcgactgctggcccctgaactgtttggggaagtgcctgcctggccccaggagctgctgtgggcagtgctgcccctgctcccccacctccctctggagaactttttgcagctcagccctcaccaggtggcatatgaacttctgggtgtgttgcgctcatctggaggagcggtgctgagcccccgggagctgcgggtctgggcccctctcttctctcagctgggcctccgcttccttcaggagctgtcagagccccagcttagagccatgcttcctgtcctgcagggaactagtgttacacctgctcaggctgtcctgctgcttggacggctccttcctaggcacgatctatccctggaggaactctgctccttgcaccttctgctaccaggcctcagcccccagacactccaggccatccctaggcgagtcctggtcggggcttgttcctgcctggcccctgaactgtcacgcctctcagcctgccagaccgcagcactgctgcagacctttcgggtatgagagtggcaaggaggatgagataatcagggataccggctctttctggttgggaggaaggcatcttccctgaggccagggaaggcctttcatacctccccacttacacacacacacacacacacacacacacacacacacacaaccaattctcatgcaggttaaagatggtgttaaaaatatgggtacaacaggtgctggtccagctgtgtgtatccctggtcaggtaagtgtgagatctcccaactgagctcctctccccattctggggcagtttcatatggctggtgctacctcccacactaccctgcagtggccctgagagttctggttagctctgtgcccattagcagccctccccagtgccagatgcaggacagcatgatccactcacattgtcctagactaatgtcaaagctggaagggcctgagaaatcttccaggccacccaccctgctttcagatgaaaagaccaaggctgggagaagctaagggactttgtttgcctggtgcctaactagcagcaacacttgaccacagcagcctgcagtgtgaggctcttaggcgtttattgctacagtggcaaatgccattccacttctgtcctagctttggtccctttccacccccatggttccttttctctgagtgctaagtacagactctctcacctatcactacactgctatacccatcaccgccagcagcctattcccaccacctggccagactgcctgcttcccctgctcccattaaagctgctacaactggattccttggctcttctggcaaatcgaagacgctactgggagctgccctggtctgagcagcaggcacagtttctctggaagaagatgcaagtacccaccaaccttaccctcaggaatctgcaggctctgggcaccctggcaggaggcatgtcctgtgagtttctgcagcagatcaactccatggtagacttccttgaagtggtgcacatgatctatcagctgcccactagagttcgagggagcctgagggcctgtatctgggcagagctacagcggaggatggcaatgccagaaccagaatggacaactgtagggccagaactgaacgggctggatagcaagctactcctggacttaccttgtggggtcccccccggggatttcgtcctgagcagatcctgcagcttggtaggctcttaataggtctaggagatcgggaactacaggagctgatcctagtggactggggagtgctgagcaccctggggcagatagatggctggagcaccactcagctccgcattgtggtctccagtttcctacggcagagtggtcggcatgtgagccacctggacttcgttcatctgacagcgctgggttatactctctgtggactgcggccagaggagctccagcacatcagcagttgggagttcagccaagcagctctcttcctcggcaccctgcatctccagtgctctgaggaacaactggaggttctggcccacctacttgtactgcctggtgggtttggcccaatcagtaactgggggcctgagatcttcactgaaattggcaccatagcagctgggatcccagacctggctctttcagcactgctgcggggacagatccagggcgttactcctcttgccatttctgtcatccctcctcctaaatttgctgtggtgtttagtcccatccaactatctagtctcaccagtgctcaggctgtggctgtcactcctgagcaaatggcctttctgagtcctgagcagcgacgagcagttgcatgggcccaacatgagggaaaggagagcccagaacagcaaggtcgaagtacagcctggggcctccaggactggtcacgaccttcctggtccctggtattgactatcagcttccttggccacctgctatgagcctgtctctacagtagaaggagattgtggggagagaaatcttaagtcataatgaataaagtgcaaacag

SEQ ID NO: 20923 - DNA, 4253 bp, Homo sapiens
  misc_feature 1..4253: note = ENST00000485556
  source 1..4253: mol_type = unassigned DNA
attacagcccaggaatgaggcctgaacagaaggaggctctggcaaagcgactgctggcccctgaactgtttggggaagtgcctgcctggccccaggagctgctgtgggcagtgctgcccctgctcccccacctccctctggagaactttttgcagctcagccctcaccagatccaggccctggaggatagctggccagcagcaggtctggggccagggcatgcccgccatgtgctgcgcagcctggtaaaccagagtgtccaggatggtgaggagcaggtacgcaggtggcatatgaacttctgggtgtgttgcgctcatctggaggagcggtgctgagcccccgggagctgcgggtctgggcccctctcttctctcagctgggcctccgcttccttcaggagctgtcagagccccagcttagagccatgcttcctgtcctgcagggaactagtgttacacctgctcaggctgtcctgctgcttggacggctccttcctaggcacgatctatccctggaggaactctgctccttgcaccttctgctaccaggcctcagcccccagacactccaggccatccctaggcgagtcctggtcggggcttgttcctgcctggcccctgaactgtcacgcctctcagcctgccagaccgcagcactgctgcagacctttcgggtatgagagtggcaaggaggatgagataatcagggataccggctctttctggttgggaggaaggcatcttccctgaggccagggaaggcctttcatacctccccacttacacacacacacacacacacacacacacacacacacacaaccaattctcatgcaggttaaagatggtgttaaaaatatgggtacaacaggtgctggtccagctgtgtgtatccctggtcaggtaagtgtgagatctcccaactgagctcctctccccattctggggcagtttcatatggctggtgctacctcccacactaccctgcagtggccctgagagttctggttagctctgtgcccattagcagccctccccagtgccagatgcaggacagcatgatccactcacattgtcctagactaatgtcaaagctggaagggcctgagaaatcttccaggccacccaccctgctttcagatgaaaagaccaaggctgggagaagctaagggactttgtttgcctggtgcctaactagcagcaacacttgaccacagcagcctgcagtgtgaggctcttaggcgtttattgctacagtggcaaatgccattccacttctgtcctagctttggtccctttccacccccatggttccttttctctgagtgctaagtacagactctctcacctatcactacactgctatacccatcaccgccagcagcctattcccaccacctggccagactgcctgcttcccctgctcccattaaagctgctacaactggattccttggctcttctggcaaatcgaagacgctactgggagctgccctggtctgagcagcaggtaattctccccacttaatttcagaacttcctccctcaatgtagtctaccttctttacctatcccttagccctatttggccagcttatccctactatcctttatttgattgtttgagatacagtctcactctgttgcccaggctgcagtgcagtggcatgatcagagttcgctgtaacctcaaactcctgagctcaggcaatctttctgcctcagcctcctgaatagctaggacgacaggtggttaccaccatgcctggctaatttttaaattttttttttgttttttgagatgaagtcttgctctgtcacccaggcttgagtacagtggcacaagcttggctcactgcaacctctgtctcccgggttcaagcgattctcctgcctcagcctcccgagtagctgggactacaggcactccccacaatgcctggctaattttttttttgttttagtagagacagggtttcaccatattggccaggctggtctcgaactgctgaccttgtgatctgcctgcctctgcctctcaaagtgctgggattacaggtgtgagccaccatgcccggccaatttttaaattttttgtagagacagacaatacaaaaatgtggacactatgtggagacactatgttgaggtactatgctgtccagattggtcttgaactcctggcctcaagcaatcctcctgccttggcctcccaaagtgctgggattacagacctgagccactgcacccagccccctagtatctcttataatgtgacttgcttttctttttctttctccttcccttttctttcatttctttctcactctcgagagaagagtgggcatctgggagagtgggaggctggtgggtcccacagagtgaggaggcaggactgggtccaaggcagtcctgcctctccactctagggggtatccttggacagtgtctcttctgggaaggggctcgtctttctttctcttgtaggcacagtttctctggaagaagatgcaagtacccaccaaccttaccctcaggaatctgcaggctctgggcaccctggcaggaggcatgtcctgtgagtttctgcagcagatcaactccatggtagacttccttgaagtggtgcacatgatctatcagctgcccactagagttcgagggagcctgagggcctgtatctgggcagagctacagcggaggatggcaatgccagaaccagaatggacaactgtagggccagaactgaacgggctggatagcaagctactcctggacttaccgctccaaaggagactccagtctcaggggaagtgctggagaccttaggccctttggttggattcctggggacagagagcacacgacagatccccctacagatcctgctgtcccatctcagtcagctgcaaggcttctgcctaggagagacatttgccacagagctgggatggctgctattgcaggagtctgttcttgggaaaccagagttgtggagccaggatgaagtagagcaagctggacgcctagtattcactctgtctactgaggcaatttccttgatccccagggaggccttgggtccagagaccctggagcggcttctagaaaagcagcagagctgggagcagagcagagttggacagctgtgtagggagccacagcttgctgccaagaaagcagccctggtagcaggggtggtgcgaccagctgctgaggatcttccagaacctgtgccaaattgtgcagatgtacgagggacattcccagcagcctggtctgcaacccagattgcagagatggagctctcagactttgaggactgcctgacattatttgcaggagacccaggacttgggcctgaggaactgcgggcagccatgggcaaagcaaaacagttgtggggtcccccccggggatttcgtcctgagcagatcctgcagcttggtaggctcttaataggtctaggagatcgggaactacaggagctgatcctagtggactggggagtgctgagcaccctggggcagatagatggctggagcaccactcagctccgcattgtggtctccagtttcctacggcagagtggtcggcatgtgagccacctggacttcgttcatctgacagcgctgggttatactctctgtggactgcggccagaggagctccagcacatcagcagttgggagttcagccaagcagctctcttcctcggcaccctgcatctccagtgctctgaggaacaactggaggttctggcccacctacttgtactgcctggtgggtttggcccaatcagtaactgggggcctgagatcttcactgaaattggcaccatagcagctgggatcccagacctggctctttcagcactgctgcggggacagatccagggcgttactcctcttgccatttctgtcatccctcctcctaaatttgctgtggtgtttagtcccatccaactatctagtctcaccagtgctcaggctgtggctgtcactcctgagcaaatggcctttctgagtcctgagcagcgacgagcagttgcatgggcccaacatgagggaaaggagagcccagaacagcaaggtcgaagtacagcctggggcctccaggactggtcacgaccttcctggtccctggtattgactatcagcttccttggccacctgctatgagcctgtctctacagtagaaggagattgtggggagagaaatcttaagtcataatgaataaagtgcaaacag

SEQ ID NO: 20924 - DNA, 5386 bp, Homo sapiens
  misc_feature 1..5386: note = ENST00000428650
  source 1..5386: mol_type = unassigned DNA
cctgccctcacctggctatcccacacaggtgagaataaccagaactcacctccggtaccagtgttcacttggaaacatggctctcagcctctggcccctgctgctgctgctgctgctgctgctgctgctgtcctttgcagtgactctggcccctactgggcctcattccctggaccctggtctctccttcctgaagtcattgctctccactctggaccaggctccccagggctccctgagccgctcacggttctttacattcctggccaacatttcttcttcctttgagcctgggagaatgggggaaggaccagtaggagagcccccacctctccagccgcctgctctgcggctccatgattttctagtgacactgagaggtagccccgactgggagccaatgctagggctgctaggggatatgctggcactgctgggacaggagcagactccccgagatttcctggtgcaccaggcaggggtgctgggtggacttgtggaggtgctgctgggagccttagttcctgggggcccccctaccccaactcggcccccatgcacccgtgatgggccgtctgactgtgtcctggctgctgactggttgccttctctgctgctgttgttagagggcacacgctggcaagctctggtgcaggtgcagcccagtgtggaccccaccaatgccacaggcctcgatgggagggaggcagctcctcactttttgcagggtctgttgggtttgcttaccccaacaggggagctaggctccaaggaggctctttggggcggtctgctacgcacagtgggggcccccctctatgctgcctttcaggaggggctgctccgtgtcactcactccctgcaggatgaggtcttctccattttggggcagccagagcctgataccaatgggcagtgccagggaggtaaccttcaacagctgctcttatggggcgtccggcacaacctttcctgggatgtccaggcgctgggctttctgtctggatcaccacccccaccccctgccctccttcactgcctgagcacgggcgtgcctctgcccagagcttctcagccgtcagcccacatcagcccacgccaacggcgagccatcactgtggaggccctctgtgagaaccacttaggcccagcaccaccctacagcatttccaacttctccatccacttgctctgccagcacaccaagcctgccactccacagccccatcccagcaccactgccatctgccagacagctgtgtggtatgcagtgtcctgggcaccaggtgcccaaggctggctacaggcctgccacgaccagtttcctgatgagtttttggatgcgatctgcagtaacctctccttttcagccctgtctggctccaaccgccgcctggtgaagcggctctgtgctggcctgctcccaccccctaccagctgccctgaaggcctgccccctgttcccctcaccccagacatcttttggggctgcttcttggagaatgagactctgtgggctgagcgactgtgtggggaggcaagtctacaggctgtgccccccagcaaccaggcttgggtccagcatgtgtgccagggccccaccccagatgtcactgcctccccaccatgccacattggaccctgtggggaacgctgcccggatgggggcagcttcctggtgatggtctgtgccaatgacaccatgtatgaggtcctggtgcccttctggccttggctagcaggccaatgcaggataagtcgtgggggcaatgacacttgcttcctagaagggctgctgggcccccttctgccctctctgccaccactgggaccatccccactctgtctgacccctggccccttcctccttggcatgctatcccagttgccacgctgtcagtcctctgtcccagctcttgctcaccccacacgcctacactatctcctccgcctgctgaccttcctcttgggtccaggggctgggggcgctgaggcccaggggatgctgggtcgggccctactgctctccagtctcccagacaactgctccttctgggatgcctttcgcccagagggccggcgcagtgtgctacggacgattggggaatacctggaacaagatgaggagcagccaaccccatcaggctttgaacccactgtcaaccccagctctggtataagcaagatggagctgctggcctgctttagtcctgtgctgtgggatctgctccagagggaaaagagtgtttgggccctgcagattctagtgcaggcgtacctgcatatgcccccagaaaacctccagcagctggtgctttcagcagagagggaggctgcacagggcttcctgacactcatgctgcaggggaagctgcaggggaagctgcaggtaccaccatccgaggagcaggccctgggtcgcctgacagccctgctgctccagcggtacccacgcctcacctcccagctcttcattgacctgtcaccactcatccctttcttggctgtctctgacctgatgcgcttcccaccatccctgttagccaacgacagtgtacagcagggctacagagggtcagaggaaaacagtttggaggaagacaaagggttaagacccatgactcctcgcagcctggctgccatccgggattacagcccaggaatgaggcctgaacagaaggaggctctggcaaagcgactgctggcccctgaactgtttggggaagtgcctgcctggccccaggagctgctgtgggcagtgctgcccctgctcccccacctccctctggagaactttttgcagctcagccctcaccagatccaggccctggaggatagctggccagcagcaggtctggggccagggcatgcccgccatgtgctgcgcagcctggtaaaccagagtgtccaggatggtgaggagcaggtacgcaggtggcatatgaacttctgggtgtgttgcgctcatctggaggagcggtgctgagcccccgggagctgcgggtctgggcccctctcttctctcagctgggcctccgcttccttcaggagctgtcagagccccagcttagagccatgcttcctgtcctgcagggaactagtgttacacctgctcaggctgtcctgctgcttggacggctccttcctaggcacgatctatccctggaggaactctgctccttgcaccttctgctaccaggcctcagcccccagacactccaggccatccctaggcgagtcctggtcggggcttgttcctgcctggcccctgaactgtcacgcctctcagcctgccagaccgcagcactgctgcagacctttcgggttaaagatggtgttaaaaatatgggtacaacaggtgctggtccagctgtgtgtatccctggtcagcctattcccaccacctggccagactgcctgcttcccctgctcccattaaagctgctacaactggattccttggctcttctggcaaatcgaagacgctactgggagctgccctggtctgagcagcaggcacagtttctctggaagaagatgcaagtacccaccaaccttaccctcaggaatctgcaggctctgggcaccctggcaggaggcatgtcctgtgagtttctgcagcagatcaactccatggtagacttccttgaagtggtgcacatgatctatcagctgcccactagagttcgagggagcctgagggcctgtatctgggcagagctacagcggaggatggcaatgccagaaccagaatggacaactgtagggccagaactgaacgggctggatagcaagctactcctggacttaccgatccagttgatggacagactatccaatgaatccattatgttggtggtggagctggtgcaaagagctccagagcagctgctggcactgacccccctccaccaggcagccctggcagagagggcactacaaaacctgattcctgtctacaaggcctggcccctgttttgcctctgggttctgttccttgataatatgcttcacgttacttgtccatacctcttggagtccgagaaatctcttggagtccacctctcagtctttctgcctgctcctatctgggctcattgcttaaggaagtgaacaaaggctccaaaggagactccagtctcaggggaagtgctggagaccttaggccctttggttggattcctggggacagagagcacacgacagatccccctacagatcctgctgtcccatctcagtcagctgcaaggcttctgcctaggagagacatttgccacagagctgggatggctgctattgcaggagtctgttcttgggaaaccagagttgtggagccaggatgaagtagagcaagctggacgcctagtattcactctgtctactgaggcaatttccttgatccccagggaggccttgggtccagagaccctggagcggcttctagaaaagcagcagagctgggagcagagcagagttggacagctgtgtagggagccacagcttgctgccaagaaagcagccctggtagcaggggtggtgcgaccagctgctgaggatcttccagttgtggggtcccccccggggatttcgtcctgagcagatcctgcagcttggtaggctcttaataggtctaggagatcgggaactacaggagctgatcctagtggactggggagtgctgagcaccctggggcagatagatggctggagcaccactcagctccgcattgtggtctccagtttcctacggcagagtggtcggcatgtgagccacctggacttcgttcatctgacagcgctgggttatactctctgtggactgcggccagaggagctccagcacatcagcagttgggagttcagccaagcagctctcttcctcggcaccctgcatctccagtgctctgaggaacaactggaggttctggcccacctacttgtactgcctggtgggtttggcccaatcagtaactgggggcctgagatcttcactgaaattggcaccatagcagctgggatcccagacctggctctttcagcactgctgcggggacagatccagggcgttactcctcttgccatttctgtcatccctcctcctaaatttgctgtggtgtttagtcccatccaactatctagtctcaccagtgctcaggctgtggctgtcactcctgagcaaatggcctttctgagtcctgagcagcgacgagcagttgcatgggcccaacatgagggaaaggagagcccagaacagcaaggtcgaagtacagcctggggcctccaggactggtcacgaccttcctggtccctggtattgactatcagcttccttggccacctgctatgagcctgtctctacagtagaaggagattgtggggagagaaa

SEQ ID NO: 20925 - DNA, 4291 bp, Homo sapiens
  misc_feature 1..4291: note = ENST00000440125
  source 1..4291: mol_type = unassigned DNA
cctgccctcacctggctatcccacacaggtgagaataaccagaactcacctccggtaccagtgttcacttggaaacatggctctcagcctctggcccctgctgctgctgctgctgctgctgctgctgctgtcctttgcagtgactctggcccctactgggcctcattccctggaccctggtctctccttcctgaagtcattgctctccactctggaccaggctccccagggctccctgagccgctcacggttctttacattcctggccaacatttcttcttcctttgagcctgggagaatgggggaaggaccagtaggagagcccccacctctccagccgcctgctctgcggctccatgattttctagtgacactgagaggtagccccgactgggagccaatgctagggctgctaggggatatgctggcactgctgggacaggagcagactccccgagatttcctggtgcaccaggcaggggtgctgggtggacttgtggaggtgctgctgggagccttagttcctgggggcccccctaccccaactcggcccccatgcacccgtgatgggccgtctgactgtgtcctggctgctgactggttgccttctctgctgctgttgttagagggcacacgctggcaagctctggtgcaggtgcagcccagtgtggaccccaccaatgccacaggcctcgatgggagggaggcagctcctcactttttgcagggtctgttgggtttgcttaccccaacaggggagctaggctccaaggaggctctttggggcggtctgctacgcacagtgggggcccccctctatgctgcctttcaggaggggctgctccgtgtcactcactccctgcaggatgaggtcttctccattttggggcagccagagcctgataccaatgggcagtgccagggaggtaaccttcaacagctgctcttatggggcgtccggcacaacctttcctgggatgtccaggcgctgggctttctgtctggatcaccacccccaccccctgccctccttcactgcctgagcacgggcgtgcctctgcccagagcttctcagccgtcagcccacatcagcccacgccaacggcgagccatcactgtggaggccctctagggccggcgcagtgtgctacggacgattggggaatacctggaacaagatgaggagcagccaaccccatcaggctttgaacccactgtcaaccccagctctggtataagcaagatggagctgctggcctgctttagtcctgtgctgtgggatctgctccagagggaaaagagtgtttgggccctgcagattctagtgcaggcgtacctgcatatgcccccagaaaacctccagcagctggtgctttcagcagagagggaggctgcacagggcttcctgacactcatgctgcaggggaagctgcaggggaagctgcaggtaccaccatccgaggagcaggccctgggtcgcctgacagccctgctgctccagcggtacccacgcctcacctcccagctcttcattgacctgtcaccactcatccctttcttggctgtctctgacctgatgcgcttcccaccatccctgttagccaacgacagtgtacagcagggctacagagggtcagaggaaaacagtttggaggaagacaaagggttaagacccatgactcctcgcagcctggctgccatccgggattacagcccaggaatgaggcctgaacagaaggaggctctggcaaagcgactgctggcccctgaactgtttggggaagtgcctgcctggccccaggagctgctgtgggcagtgctgcccctgctcccccacctccctctggagaactttttgcagctcagccctcaccagatccaggccctggaggatagctggccagcagcaggtctggggccagggcatgcccgccatgtgctgcgcagcctggtaaaccagagtgtccaggatggtgaggagcaggtacgcaggcttgggcccctcgcctgtttcctgagccctgaggagctgcagagcctagtgcccctgagtgatccaacggggccagtagaacgggggctgctggaatgtgcagccaatgggaccctcagcccagaaggacgggtggcatatgaacttctgggtgtgttgcgctcatctggaggagcggtgctgagcccccgggagctgcgggtctgggcccctctcttctctcagctgggcctccgcttccttcaggagctgtcagagccccagcttagagccatgcttcctgtcctgcagggaactagtgttacacctgctcaggctgtcctgctgcttggacggctccttcctaggcacgatctgctacaactggattccttggctcttctggcaaatcgaagacgctactgggagctgccctggtctgagcagcaggcacagtttctctggaagaagatgcaagtacccaccaaccttaccctcaggaatctgcaggctctgggcaccctggcaggaggcatgtcctgtgagtttctgcagcagatcaactccatggtagacttccttgaagtggtgcacatgatctatcagctgcccactagagttcgagggagcctgagggcctgtatctgggcagagctacagcggaggatggcaatgccagaaccagaatggacaactgtagggccagaactgaacgggctggatagcaagctactcctggacttaccgatccagttgatggacagactatccaatgaatccattatgttggtggtggagctggtgcaaagagctccagagcagctgctggcactgacccccctccaccaggcagccctggcagagagggcactacaaaacctggctccaaaggagactccagtctcaggggaagtgctggagaccttaggccctttggttggattcctggggacagagagcacacgacagatccccctacagatcctgctgtcccatctcagtcagctgcaaggcttctgcctaggagagacatttgccacagagctgggatggctgctattgcaggagtctgttcttgggaaaccagagttgtggagccaggatgaagtagagcaagctggacgcctagtattcactctgtctactgaggcaatttccttgatccccagggaggccttgggtccagagaccctggagcggcttctagaaaagcagcagagctgggagcagagcagagttggacagctgtgtagggagccacagcttgctgccaagaaagcagccctggtagcaggggtggtgcgaccagctgctgaggatcttccagaacctgtgccaaattgtgcagatgtacgagggacattcccagcagcctggtctgcaacccagattgcagagatggagctctcagactttgaggactgcctgacattatttgcaggagacccaggacttgggcctgaggaactgcgggcagccatgggcaaagcaaaacagttgtggggtcccccccggggatttcgtcctgagcagatcctgcagcttggtaggctcttaataggtctaggagatcgggaactacaggagctgatcctagtggactggggagtgctgagcaccctggggcagatagatggctggagcaccactcagctccgcattgtggtctccagtttcctacggcagagtggtcggcatgtgagccacctggacttcgttcatctgacagcgctgggttatactctctgtggactgcggccagaggagctccagcacatcagcagttgggagttcagccaagcagctctcttcctcggcaccctgcatctccagtgctctgaggaacaactggaggttctggcccacctacttgtactgcctggtgggtttggcccaatcagtaactgggggcctgagatcttcactgaaattggcaccatagcagctgggatcccagacctggctctttcagcactgctgcggggacagatccagggcgttactcctcttgccatttctgtcatccctcctcctaaatttgctgtggtgtttagtcccatccaactatctagtctcaccagtgctcaggctgtggctgtcactcctgagcaaatggcctttctgagtcctgagcagcgacgagcagttgcatgggcccaacatgagggaaaggagagcccagaacagcaaggtcgaagtacagcctggggcctccaggactggtcacgaccttcctggtccctggtattgactatcagcttccttggccacctgctatgagcctgtctctacagtagaaggagattgtggggagagaaa

SEQ ID NO: 20926 - DNA, 543 bp, Homo sapiens
  misc_feature 1..543: note = ENST00000460952
  source 1..543: mol_type = unassigned DNA
taaagaaaaggcaaatgatttacctagagttatacagctaagggcagaggcaagacttaaaacccagcagtatgactcccaatccactgcttttccactcacattgttcctgtctttctcctagttgtggggtcccccccggggatttcgtcctgagcagatcctgcagcttggtaggctcttaataggtctaggagatcgggaactacaggagctgatcctagtggactggggagtgctgagcaccctggggcagatagatggctggagcaccactcagctccgcattgtggtctccagtttcctacggcagagtggtcggcatgtgagccacctggacttcgttcatctgacagcgctgggttatactctctgtggactgcggccagaggagctccagcacatcagcagttgggagttcagccaagcagctctcttcctcggcaccctgcatctccagtgctctgaggaacaactggaggttctggcccacctacttgtactgcctggtgggtttggcccaatcagtaactgggggcctga

SEQ ID NO: 20927 - DNA, 513 bp, Homo sapiens
  misc_feature 1..513: note = ENST00000493750
  source 1..513: mol_type = unassigned DNA
tgttctattatctcctaagccctatacatattactctgtaatactcctttgatccctatttctcacagtgctctatcctccaaaggttggaagactcactctatctacagatatctctctgggcatattttattactgcgctgacctcctggccctgccttcccccttcagaacctgtgccaaattgtgcagatgtacgagggacattcccagcagcctggtctgcaacccagattgcagagatggagctctcagactttgaggactgcctgacattatttgcaggagacccaggacttgggcctgaggaactgcgggcagccatgggcaaagcaaaacagttgtggggtcccccccggggatttcgtcctgagcagatcctgcagcttggtaggctcttaataggtctaggagatcgggaactacaggagctgatcctagtggactggggagtgctgagcaccctggggcagatagatggctggagcaccactcagctccgcattgtggtct

SEQ ID NO: 20928 - DNA, 1104 bp, Homo sapiens
  misc_feature 1..1104: note = ENST00000455136
  source 1..1104: mol_type = unassigned DNA
gcagcctggctgccatccgggattacagcccaggaatgaggcctgaacagaaggaggctctggcaaagcgactgctggcccctgaactgtttggggaagtgcctgcctggccccaggagctgctgtgggcagtgctgcccctgctcccccacctccctctggagaactttttgcagctcagccctcaccagatccaggccctggaggatagctggccagcagcaggtctggggccagggcatgcccgccatgtgctgcgcagcctggtaaaccagagtgtccaggatggtgaggagcaggtacgcaggtggcatatgaacttctgggtgtgttgcgctcatctggaggagcggtgctgagcccccgggagctgcgggtctgggcccctctcttctctcagctgggcctccgcttccttcaggagctgtcagagccccagcttagagccatgcttcctgtcctgcagggaactagtgttacacctgctcaggctgtcctgctgcttggacggctccttcctaggcacgatgcacagtttctctggaagaagatgcaagtacccaccaaccttaccctcaggaatctgcaggctctgggcaccctggcaggaggcatgtcctgtgagtttctgcagcagatcaactccatggtagacttccttgaagtggtgcacatgatctatcagctgcccactagagttcgagggagcctgagggcctgtatctgggcagagctacagcggaggatggcaatgccagaaccagaatggacaactgtagggccagaactgaacgggctggatagcaagctactcctggacttaccgatccagttgatggacagactatccaatgaatccattatgttggtggtggagctggtgcaaagagctccagagcagctgctggcactgacccccctccaccaggcagccctggcagagagggcactacaaaacctggctccaaaggagactccagtctcaggggaagtgctggagaccttaggccctttggttggattcctggggacagagagcacacgacagatccccctacagatcctgctgtcccatctcagtcagctgcaaggcttctgcctagg

SEQ ID NO: 20929 - DNA, 571 bp, Homo sapiens
  misc_feature 1..571: note = ENST00000483250
  source 1..571: mol_type = unassigned DNA
tacttgactggcccatcttctgctagtggggacaaagagtcaatggcatgtctctcagtggcccctccctgcaagaaccctatagtgaccccagtgcgagctaaccttccccatctcagatccaggccctggaggatagctggccagcagcaggtctggggccagggcatgcccgccatgtgctgcgcagcctggtaaaccagagtgtccaggatggtgaggagcaggtggcatatgaacttctgggtgtgttgcgctcatctggaggagcggtgctgagcccccgggagctgcgggtctgggcccctctcttctctcagctgggcctccgcttccttcaggagctgtcagagccccagcttagagccatgcttcctgtcctgcagggaactagtgttacacctgctcaggctgtcctgctgcttggacggctccttcctaggcacgatctatccctggaggaactctgctccttgcaccttctgctaccaggcctcagcccccagacactccaggccatccctaggcgagtcctggtcggggcttgttcctgcctggcccctgaactgtc

SEQ ID NO: 20930 - DNA, 569 bp, Homo sapiens
  misc_feature 1..569: note = ENST00000470279
  source 1..569: mol_type = unassigned DNA
gactggcccatcttctgctagtggggacaaagagtcaatggcatgtctctcagtggcccctccctgcaagaaccctatagtgaccccagtgcgagctaaccttccccatctcagatccaggccctggaggatagctggccagcagcaggtctggggccagggcatgcccgccatgtgctgcgcagcctggtaaaccagagtgtccaggatggtgaggagcaggtacgcaggtggcatatgaacttctgggtgtgttgcgctcatctggaggagcggtgctgagcccccgggagctgcgggtctgggcccctctcttctctcagctgggcctccgcttccttcaggagctgtcagagccccagcttagagccatgcttcctgtcctgcagggaactagtgttacacctgctcaggctgtcctgctgcttggacggctccttcctaggcacgatctatccctggaggaactctgctccttgcaccttctgctaccaggcctcagcccccagacactccaggccatccctaggcgagtcctggtcggggcttgttcctgcctggcccctgaa

SEQ ID NO: 20931 - DNA, 2259 bp, Homo sapiens
  misc_feature 1..2259: note = ENST00000432436
  source 1..2259: mol_type = unassigned DNA
acattcctggccaacatttcttcttcctttgagcctgggagaatgggggaaggaccagtaggagagcccccacctctccagccgcctgctctgcggctccatgattttctagtgacactgagaggtagccccgactgggagccaatgctagggctgctaggggatatgctggcactgctgggacaggagcagactccccgagatttcctggtgcaccaggcaggggtgctgggtggacttgtggaggtgctgctgggagccttagttcctgggggcccccctaccccaactcggcccccatgcacccgtgatgggccgtctgactgtgtcctggctgctgactggttgccttctctgctgctgttgttagagggcacacgctggcaagctctggtgcaggtgcagcccagtgtggaccccaccaatgccacaggcctcgatgggagggaggcagctcctcactttttgcagggtctgttgggtttgcttaccccaacaggggagctaggctccaaggaggctctttggggcggtctgctacgcacagtgggggcccccctctatgctgcctttcaggaggggctgctccgtgtcactcactccctgcaggatgaggtcttctccattttggggcagccagagcctgataccaatgggcagtgccagggaggtaaccttcaacagctgctcttatggggcgtccggcacaacctttcctgggatgtccaggcgctgggctttctgtctggatcaccacccccaccccctgccctccttcactgcctgagcacgggcgtgcctctgcccagagcttctcagccgtcagcccacatcagcccacgccaacggcgagccatcactgtggaggccctctgtgagaaccacttaggcccagcaccaccctacagcatttccaacttctccatccacttgctctgccagcacaccaagcctgccactccacagccccatcccagcaccactgccatctgccagacagctgtgtggtatgcagtgtcctgggcaccaggtgcccaaggctggctacaggcctgccacgaccagtttcctgatgagtttttggatgcgatctgcagtaacctctccttttcagccctgtctggctccaaccgccgcctggtgaagcggctctgtgctggcctgctcccaccccctaccagctgccctgaaggcctgccccctgttcccctcaccccagacatcttttggggctgcttcttggagaatgagactctgtgggctgagcgactgtgtggggaggcaagtctacaggctgtgccccccagcaaccaggcttgggtccagcatgtgtgccagggccccaccccagatgtcactgcctccccaccatgccacattggaccctgtggggaacgctgcccggatgggggcagcttcctggtgatggtctgtgccaatgacaccatgtatgaggtcctggtgcccttctggccttggctagcaggccaatgcaggataagtcgtgggggcaatgacacttgcttcctagaagggctgctgggcccccttctgccctctctgccaccactgggaccatccccactctgtctgacccctggccccttcctccttggcatgctatcccagttgccacgctgtcagtcctctgtcccagctcttgctcaccccacacgcctacactatctcctccgcctgctgaccttcctcttgggtccaggggctgggggcgctgaggcccaggggatgctgggtcgggccctactgctctccagtctcccagacaactgctccttctgggatgcctttcgcccagagggccggcgcagtgtgctacggacgattggggaatacctggaacaagatgaggagcagccaaccccatcaggctttgaacccactgtcaaccccagctctggtataagcaagatggagctgctggcctgctttagtgtgagtgctctgccagagggaaagctcctagaacagtgagaaggccctccaggggaattcctcgaatactcagaggcagtagtgtggggtagtagttgaagcacacagctctagagtcagacaggcttggattcatatcttggttctgtgaccagccttgaatgagttatttaacttctctgagcaatatttttctcgtctcatttataaactagggatgataatggtatatgagataatacatgctgtgggcttagcacagtgcatgatacacaaacatgcaataaatattaccttgttattctt

SEQ ID NO: 20932 - DNA, 5305 bp, Homo sapiens
  misc_feature 1..5305: note = ENST00000541030
  source 1..5305: mol_type = unassigned DNA
gccctgccctcacctggctatcccacacaggtgagaataaccagaactcacctccggtaccagtgttcacttggaaacatggctctcagcctctggcccctgctgctgctgctgctgctgctgctgctgctgtcctttgcagtgactctggcccctactgggcctcattccctggaccctggtctctccttcctgaagtcattgctctccactctggaccaggctccccagggctccctgagccgctcacggttctttacattcctggccaacatttcttcttcctttgagcctgggagaatgggggaaggaccagtaggagagcccccacctctccagccgcctgctctgcggctccatgattttctagtgacactgagaggtagccccgactgggagccaatgctagggctgctaggggatatgctggcactgctgggacaggagcagactccccgagatttcctggtgcaccaggcaggggtgctgggtggacttgtggaggtgctgctgggagccttagttcctgggggcccccctaccccaactcggcccccatgcacccgtgatgggccgtctgactgtgtcctggctgctgactggttgccttctctgctgctgttgttagagggcacacgctggcaagctctggtgcaggtgcagcccagtgtggaccccaccaatgccacaggcctcgatgggagggaggcagctcctcactttttgcagggtctgttgggtttgcttaccccaacaggggagctaggctccaaggaggctctttggggcggtctgctacgcacagtgggggcccccctctatgctgcctttcaggaggggctgctccgtgtcactcactccctgcaggatgaggtcttctccattttggggcagccagagcctgataccaatgggcagtgccagggaggtaaccttcaacagctgctcttatggggcgtccggcacaacctttcctgggatgtccaggcgctgggctttctgtctggatcaccacccccaccccctgccctccttcactgcctgagcacgggcgtgcctctgcccagagcttctcagccgtcagcccacatcagcccacgccaacggcgagccatcactgtggaggccctctgtgagaaccacttaggcccagcaccaccctacagcatttccaacttctccatccacttgctctgccagcacaccaagcctgccactccacagccccatcccagcaccactgccatctgccagacagctgtgtggtatgcagtgtcctgggcaccaggtgcccaaggctggctacaggcctgccacgaccagtttcctgatgagtttttggatgcgatctgcagtaacctctccttttcagccctgtctggctccaaccgccgcctggtgaagcggctctgtgctggcctgctcccaccccctaccagctgccctgaaggcctgccccctgttcccctcaccccagacatcttttggggctgcttcttggagaatgagactctgtgggctgagcgactgtgtggggaggcaagtctacaggctgtgccccccagcaaccaggcttgggtccagcatgtgtgccagggccccaccccagatgtcactgcctccccaccatgccacattggaccctgtggggaacgctgcccggatgggggcagcttcctggtgatggtctgtgccaatgacaccatgtatgaggtcctggtgcccttctggccttggctagcaggccaatgcaggataagtcgtgggggcaatgacacttgcttcctagaagggctgctgggcccccttctgccctctctgccaccactgggaccatccccactctgtctgacccctggccccttcctccttggcatgctatcccagttgccacgctgtcagtcctctgtcccagctcttgctcaccccacacgcctacactatctcctccgcctgctgaccttcctcttgggtccaggggctgggggcgctgaggcccaggggatgctgggtcgggccctactgctctccagtctcccagacaactgctccttctgggatgcctttcgcccagagggccggcgcagtgtgctacggacgattggggaatacctggaacaagatgaggagcagccaaccccatcaggctttgaacccactgtcaaccccagctctggtataagcaagatggagctgctggcctgctttagtcctgtgctgtgggatctgctccagagggaaaagagtgtttgggccctgcagattctagtgcaggcgtacctgcatatgcccccagaaaacctccagcagctggtgctttcagcagagagggaggctgcacagggcttcctgacactcatgctgcaggggaagctgcaggggaagctgcaggtaccaccatccgaggagcaggccctgggtcgcctgacagccctgctgctccagcggtacccacgcctcacctcccagctcttcattgacctgtcaccactcatccctttcttggctgtctctgacctgatgcgcttcccaccatccctgttagccaacgacagtgtacagcagggctacagagggtcagaggaaaacagtttggaggaagacaaagggttaagacccatgactcctcgcagcctggctgccatccgggattacagcccaggaatgaggcctgaacagaaggaggctctggcaaagcgactgctggcccctgaactgtttggggaagtgcctgcctggccccaggagctgctgtgggcagtgctgcccctgctcccccacctccctctggagaactttttgcagctcagccctcaccagatccaggccctggaggatagctggccagcagcaggtctggggccagggcatgcccgccatgtgctgcgcagcctggtaaaccagagtgtccaggatggtgaggagcaggtacgcaggcttgggcccctcgcctgtttcctgagccctgaggagctgcagagcctagtgcccctgagtgatccaacggggccagtagaacgggggctgctggaatgtgcagccaatgggaccctcagcccagaaggacgggtggcatatgaacttctgggtgtgttgcgctcatctggaggagcggtgctgagcccccgggagctgcgggtctgggcccctctcttctctcagctgggcctccgcttccttcaggagctgtcagagccccagcttagagccatgcttcctgtcctgcagggaactagtgttacacctgctcaggctgtcctgctgcttggacggctccttcctaggcacgatctgctacaactggattccttggctcttctggcaaatcgaagacgctactgggagctgccctggtctgagcagcaggcacagtttctctggaagaagatgcaagtacccaccaaccttaccctcaggaatctgcaggctctgggcaccctggcaggaggcatgtcctgtgagtttctgcagcagatcaactccatggtagacttccttgaagtggtgcacatgatctatcagctgcccactagagttcgagggagcctgagggcctgtatctgggcagagctacagcggaggatggcaatgccagaaccagaatggacaactgtagggccagaactgaacgggctggatagcaagctactcctggacttaccgatccagttgatggacagactatccaatgaatccattatgttggtggtggagctggtgcaaagagctccagagcagctgctggcactgacccccctccaccaggcagccctggcagagagggcactacaaaacctggctccaaaggagactccagtctcaggggaagtgctggagaccttaggccctttggttggattcctggggacagagagcacacgacagatccccctacagatcctgctgtcccatctcagtcagctgcaaggcttctgcctaggagagacatttgccacagagctgggatggctgctattgcaggagtctgttcttgggaaaccagagttgtggagccaggatgaagtagagcaagctggacgcctagtattcactctgtctactgaggcaatttccttgatccccagggaggccttgggtccagagaccctggagcggcttctagaaaagcagcagagctgggagcagagcagagttggacagctgtgtagggagccacagcttgctgccaagaaagcagccctggtagcaggggtggtgcgaccagctgctgaggatcttccagaacctgtgccaaattgtgcagatgtacgagggacattcccagcagcctggtctgcaacccagattgcagagatggagctctcagactttgaggactgcctgacattatttgcaggagacccaggacttgggcctgaggaactgcgggcagccatgggcaaagcaaaacagttgtggggtcccccccggggatttcgtcctgagcagatcctgcagcttggtaggctcttaataggtctaggagatcgggaactacaggagctgatcctagtggactggggagtgctgagcaccctggggcagatagatggctggagcaccactcagctccgcattgtggtctccagtttcctacggcagagtggtcggcatgtgagccacctggacttcgttcatctgacagcgctgggttatactctctgtggactgcggccagaggagctccagcacatcagcagttgggagttcagccaagcagctctcttcctcggcaccctgcatctccagtgctctgaggaacaactggaggttctggcccacctacttgtactgcctggtgggtttggcccaatcagtaactgggggcctgagatcttcactgaaattggcaccatagcagctgggatcccagacctggctctttcagcactgctgcggggacagatccagggcgttactcctcttgccatttctgtcatccctcctcctaaatttgctgtggtgtttagtcccatccaactatctagtctcaccagtgctcaggctgtggctgtcactcctgagcaaatggcctttctgagtcctgagcagcgacgagcagttgcatgggcccaacatgagggaaaggagagcccagaacagcaaggtcgaagtacagcctggggcctccaggactggtcacgaccttcctggtccctggtattgactatcagcttccttggccacctgctatgagcctgtctctacagtagaaggagattgtggggagagaaatcttaagtcataatgaataaagtgcaaacagaagtgcatcctgattattttcagaagctgatgaggaata

SEQ ID NO: 20933 - DNA, 5115 bp, Homo sapiens
  misc_feature 1..5115: note = ENST00000249344
  source 1..5115: mol_type = unassigned DNA
aaagcgagctgaaccctgaggggagccgctgaccagcagcatggaggaccccgccgcgcctgggaccgggggcccgcccgcaaatggcaatggcaacggcggcggcaaagggaagcaggcggcgcccaagggccgcgaagcgttccgaagccagcggcgggagtcagagggctctgtggactgtcccactctggagtttgagtatggagatgcagatgggcatgcagccgagttgtcagaattgtatagttacactgagaacctggaattcaccaataacaggaggtgctttgaagaagatttcaagactcaagtgcagggcaaggaatggctggagttggaagaagatgcccaaaaggcctatataatgggactcttggaccggctagaggtggtcagtagggaacggcggctgaaggtggcccgggctgttctctacctggcccaaggtacttttggggaatgtgattcagaggtcgatgtgctacactggtccaggtacaactgcttcctgctgtatcagatggggaccttctccaccttcctggagctactccacatggaaattgacaacagccaggcctgtagcagtgcccttcggaaaccagctgtctccatagctgatagcacagagctcagggtgctgctgagtgttatgtacctaatggtggaaaatattcgcctggagcgagagacagacccctgtgggtggagaacagcccgggagaccttccgcactgaattaagcttctccatgcataatgaggagccttttgcccttttactcttctccatggttaccaagttctgcagtggcctggctcctcacttccccataaagaaggtcctgctcctgctctggaaggtggtcatgtttaccctcggtggatttgagcatctgcagactctcaaagtacagaagcgggcagaattgggcctgcctccactggctgaagacagtatccaggtggtgaagagcatgcgtgctgcctccccgccctcttacactcttgacctgggagagtctcagctggcacccccaccctccaagctgcgaggccgccgtggctctcgaaggcaactcctcactaagcaggacagcctggacatctacaatgaaagggatctcttcaagactgaggagcccgccacagaggaggaagaggagtctgctggtgatggagaacgaaccttggatggagagctagacctgctagagcaggaccctctggtgccacctccaccctcacaggcacccctctctgctgagcgggtggcttttcccaagggcctgccctgggccccaaaggtcagacagaaggacattgagcacttcttggagatgagcaggaacaagttcatcggattcaccctggggcaggacacagatacattggttggattacccaggcccatccatgagagtgtgaagaccctaaagcagcacaagtatatctccatcgcagatgtgcagatcaagaatgaagaggagctggagaagtgccctatgtctttgggggaagaggtggtaccagagacgccatgtgaaatcctctaccagggaatgctgtacagccttccgcagtatatgatcgctctgcttaagattctgctggctgcagctcccacctctaaggctaagacagactctatcaatatcctggcagatgtcctacctgaggagatgcccatcactgttctccagagcatgaagctgggcatcgatgtgaacaggcacaaggagattattgtaaagagtatctctaccctgcttctgctactcctcaaacacttcaaactcaaccatatctaccagtttgaatatgtatcgcaacatttggtatttgccaactgcatccccttgatcctgaagttcttcaatcaaaatatcttgtcatacatcactgccaaaaacagcatctcagtcctggattatccttgctgtaccatccaggatttgccggagcttactactgaaagtctggaagctggagacaacagccagttctgctggaggaacctcttttcctgcatcaacctcctgaggctgctcaataaactgaccaaatggaaacattcccggaccatgatgctggtagtgtttaaatcggcaccaatcttaaagcgggccctcaaggtcaaacaggccatgctgcaactttatgtcctaaagctactaaagttacagaccaagtacctggggcgccaatggaggaaaagcaacatgaaaaccatgtcagccatttaccagaaagtgcgtcaccgcatgaacgatgactgggcttacgggaatgacatcgatgccagaccatgggacttccaagcagaagaatgtaccttgagggccaacattgaggcttttaacagccgtcgctatgacagaccccaggactctgagttttcacctgtggataactgcttgcagagcgtactggggcagaggttggatctgcctgaagatttccactattcatatgagctctggctcgagagagaggtgttttcacagcccatctgttgggaggagctgctccagaatcactgactaagttcttgtcaacaagcatcaatagatagaggtcagctccaataaactgtgctctgcctaccctgtccatacaggcgctgttaccagttcagggctcttctgggggctcttgggcctaaagatggtgcaagggtgggatcctgaatcacaataaaatgatcaacttgccctggggtcagttgggtgcccagttggccttggaaatcttttggtggatcaattctagacaagctctttggtaggaccttttcctgctttagtcttggctacaaccaggctagactttgctggctctaaaagaggaaatttgttatggcatttgacccatggcattcatcacagatagtgggaggtacaagtcataaaatagggagaaagttttcttcttgctcacactggattcctaggacttatcagagatttggaaaaaccaactttgaaattaagtttgcattttaaatttcaaatttggaagcctctttctgaaatcattagctctaagattattttagagcacctgcaccttctttgtgaaggatgatgatttactattccctcaatactgcatgttatcgaaaagtgtgttgtgtaaagtgtttttttcctcattctgtaagagatctatattcaatgtgaaaattatttccttgtgtactctgtatagggcatggaatgctctgccatttttaaagagccacaaccaatatgaaataattaggtcctctctaaggatgtttcatgtttttcttaaatgactccagtcttcaaatggctgagcatactgcagaaaattatccttttcatctaattcattttttaaatgacaagttaactacaggaggctttatttattcagatggtatgtccacttgtggtcgtgatcaatatatttttctaattgaaaagtaaaagcatcacagcttaccatttttctttttctgcagtgttgattaatgatttttttcccgtttattgctagcagtttcaaagtgtcatgtggagatttagcaatactgtctctacttaaaagtattgcacatttcattgaaaatgtgagagttgatataccagcctctttatatttctcttttacagcagaatcacatacttctcaagataaacaaggtttttaaaaaagtttctgatttagttaggatcatatgcttttttttttttttttttttttttttttttttttgagacagagtttcgctcttgttgcccaagctggagtgcaatggcacgatctcggctcactgcaacctccgcctcccgggttcaagcgattctcctgcctcagcctcccaaggagctgggattacaggcacgcaccaccatgcctggctaattttttgtatttttagtagaaacagggtttcaccatgttagccaggctgacctcaaactcctgacctcaggtgatccgcccgcctccacctcccagggtgctgggattacaggtgtgagccaccatgcccagcctcttcaagcttttttactatacatgttgcccctctcccccaacttaggcactactgaattttttatgatggcaccaggtcactttatgctgggtgatatagtcaaaatttgcttatttactctgcccctcgtcaaccacagtatcatttcaaggacatgaataaaatacttgacagtatccaaaggagctataccaaaatctaacaagtaaattttggattttgcctctttgtgctttaaagtaccaggatttctgtctctatggataggtcttggagaatgttaagtaatggatgaaactttttaaaataatttgtaaattttacctaagtaggacagtagtccttactgcaatcaaaataatttactgagcacaactcctgtaaattaatctacagtcaggctagtatgattttaatatgatttgagtaaaaagataattttcaaggaaagagtaatcatccatcaatttattataaagccagatagtattcaatttatgtcaagaacaaagaaattgcccttttaaaagcatgtacgtgaatgctttttgaggcacagaagtatgctaagctttaacattttgtatttatttacaacccttttctaagggaaggttacttctcagtgcagatggagaaactgaagcactaaggataaatgattagtttccaatcacatcatttttttccacagacttgctgggactagctttcaggtattgacagccagccccatatattaaggtaaccaggttgaatcttccaatttgagaacccatgtatgggttgcagtgagccgagatcatgccactgcactccatcctgggcaacaagaacgaaactccgtctcaaaaacaaagaaggatataataaagttaatatataaaccatgtatgtggttaggaataaattcaaattcaccagtctccaatggtgattacttttactacatagaaaaacattttagtgacttacagaggatttttatttgtgaatatttcagtaaagtttgtgttgattgttgataacactgttcatctactgaagcactttaataaaaataaaatgagctggaattagaaa

SEQ ID NO: 20934 - DNA, 2866 bp, Homo sapiens
  misc_feature 1..2866: note = ENST00000435494
  source 1..2866: mol_type = unassigned DNA
ccctgaggggagccgctgaccagcagcatggaggaccccgccgcgcctgggaccgggggcccgcccgcaaatggcaatggcaacggcggcggcaaagggaagcaggcggcgcccaagggccgcgaagcgttccgaagccagcggcgggagtcagagggctctgtggactgtcccactctggagtttgagtatggagatgcagatgggcatgcagccgagttgtcagaattgtatagttacactgagaacctggaattcaccaataacaggaggtgctttgaagaagatttcaagactcaagtgcagggcaaggaatggctggagttggaagaagatgcccaaaaggcctatataatgggactcttggaccggctagaggtggtcagtagggaacggcggctgaaggtggcccgggctgttctctacctggcccaaggtacttttggggaatgtgattcagaggtcgatgtgctacactggtccaggtacaactgcttcctgctgtatcagatggggaccttctccaccttcctggagctactccacatggaaattgacaacagccaggcctgtagcagtgcccttcggaaaccagctgtctccatagctgatagcacagagctcagggtgctgctgagtgttatgtacctaatggtggaaaatattcgcctggagcgagagacagacccctgtgggtggagaacagcccgggagaccttccgcactgaattaagcttctccatgcataatgaggagccttttgcccttttactcttctccatggttaccaagttctgcagtggcctggctcctcacttccccataaagaaggtcctgctcctgctctggaaggtggtcatgtttaccctcggtggatttgagcatctgcagactctcaaagtacagaagcgggcagaattgggcctgcctccactggctgaagacagtatccaggtggtgaagagcatgcgtgctgcctccccgccctcttacactcttgacctgggagagtctcagctggcacccccaccctccaagctgcgaggccgccgtggctctcgaaggcaactcctcactaagcaggacagcctggacatctacaatgaaagggatctcttcaagactgaggagcccgccacagaggaggaagaggagtctgctggtgatggagaacgaaccttggatggagagctagacctgctagagcaggaccctctggtgccacctccaccctcacaggcacccctctctgctgagcgggtggcttttcccaagggcctgccctgggccccaaaggtcagacagaaggacattgagcacttcttggagatgagcaggaacaagttcatcggattcaccctggggcaggacacagatacattggttggattacccaggcccatccatgagagtgtgaagaccctaaagcagcacaagtatatctccatcgcagatgtgcagatcaagaatgaagaggagctggagaagtgccctatgtctttgggggaagaggtggtaccagagacgccatgtgaaatcctctaccagggaatgctgtacagccttccgcagtatatgatcgctctgcttaagattctgctggctgcagctcccacctctaaggctaagacagactctatcaatatcctggcagatgtcctacctgaggagatgcccatcactgttctccagagcatgaagctgggcatcgatgtgaacaggcacaaggagattattgtaaagagtatctctaccctgcttctgctactcctcaaacacttcaaactcaaccatatctaccagtttgaatatgtatcgcaacatttggtatttgccaactgcatccccttgatcctgaagttcttcaatcaaaatatcttgtcatacatcactgccaaaaacagcatctcagtcctggattatccttgctgtaccatccaggatttgccggagcttactactgaaagtctggaagctggagacaacagccagttctgctggaggaacctcttttcctgcatcaacctcctgaggctgctcaataaactgaccaaatggaaacattcccggaccatgatgctggtagtgtttaaatcggcaccaatcttaaagcgggccctcaaggtcaaacaggccatgctgcaactttatgtcctaaagctactaaagttacagaccaagtacctggggcgccaatggaggaaaagcaacatgaaaaccatgtcagccatttaccagaaagtgcgtcaccgcatgaacgatgactgggcttacgggaatggtgagtcttcccaaagctcttgacttcctggagtttcctggggtttagacaaaactaaataaatatttatcactcctcttttggcatgaattgttacatattttagatgaaaaaatatgtgattataggtcaggcgctgatacaccaaactttaaggttatgcctcaaattctagtatgtacccttgtcctatgtaaactatgaaaatccgttttataaaacaagtaaattgagagataattaattgcctttccaaaacattcttttaaatgacagctttctccaaaagatttaaattaaaacaactttttattattacaaagcagttagaaaaaaagatagaaaatacaagtaaacaaacattttactatattatatttatgccatatttgtactatgcagaaattgccaccattaacatcttattgtatattcctccagatctttttctatgcatatacatgcatattttatcaaaatgaaagcaagttatgtatgctattttgtaattttctcttttaacattatctctaccttttcatgtcagtacattttcatttcatctaataaagttcatattcacaa

SEQ ID NO: 20935 - DNA, 587 bp, Homo sapiens
  misc_feature 1..587: note = ENST00000465033
  source 1..587: mol_type = unassigned DNA
gacatctacaatgaaagggatctcttcaagactgaggagcccgccacagaggaggaagaggagtctgctggtgatggagaacgaaccttggatggagagctagacctgctagagcaggaccctctggtgccacctccaccctcacaggcacccctctctgctgagcgggtggcttttcccaagggcctgccctgggccccaaaggtcagacagaaggacattgagcacttcttggagatgagcaggaacaagttcatcggattcaccctggggcaggacacagatacattggttggattacccaggcccatccatgagagtgtgaagaccctaaagcagcacaagtatatctccatcgcagatgtgcagatcaagaatgaagaggagctggagaagtgccctatgtctttggtgagccaaggaagccctacacaggaggagagtagaagaaaacctgtcttcagtgttgtcacagagcatgtgtgcatgcattcattcagcatattaggctgtaactgtgttccaggcaagacaaggtccctactttcatgatatattgaagttggggaagaaagataaaaaataaa

SEQ ID NO: 20936 - DNA, 8168 bp, Homo sapiens
  misc_feature 1..8168: note = ENST00000263918
  source 1..8168: mol_type = unassigned DNA
gcggccgccatggacgagcaggcgggtcccggcgtcttcttcagcaacaaccacccgggcgccggcggtgccaaggggctcgggcctctggcggaggctgccgcggccggcgacggggcggctgcggcgggggcggcccgagcccagtacagtctcccggggatcctgcacttcctgcagcacgagtgggcccgcttcgaggtggagagagcccagtgggaggtggagcgggcggagctgcaggcccagattgccttcctgcagggagaaaggaagggccaagaaaatttgaagaaggatcttgtgaggaggatcaaaatgttggagtatgctcttaaacaggaaagagccaaataccacaagttgaaatacgggacagaattgaatcagggagatatgaagcctccaagctatgattctgatgaaggtaatgaaacagaagtgcagccacaacaaaacagccagttaatgtggaaacaaggtcgacaactactcagacagtatctacaggaggtgggttatacagatactattctagatgtgaaatctaaacgagtgcgagctttgttgggcttttcaagtgatgtcacggacagggaagatgacaaaaatcaggactcagttgtaaatggcacagaggctgaagttaaagagacagcaatgattgcaaaatctgagttaacagattctgcctccgtgctggataatttcaaattccttgaaagtgcagctgcagatttcagtgatgaagatgaagatgatgatgttgatggaagagagaaaagcgtcattgatacttcaacaattgttaggaaaaaagcattgcctgacagcggtgaagatcgagatacaaaagaagctctaaaggagtttgacttcttggttacatcagaggaaggagacaatgaatctagaagtgcaggcgatggaacagactgggaaaaggaagaccagtgtctcatgcctgaagcctggaatgtggaccagggagtaattaccaaactcaaggaacaatacaaaaaggagagaaaggggaaaaagggggtgaagaggcccaataggtcaaaactacaagatatgcttgctaatttgagagatgttgatgaacttccttcattgcagccatctgtgggttcaccttccagacccagcagctccaggcttcctgaacatgaaattaatagggcagatgaagtggaagcattgacatttcctccttcttctggaaagtcattcatcatgggagcagatgaagcccttgaaagtgaactgggacttggagaactagcaggccttacggtggccaatgaagcagactcactaacttatgatatagcaaacaataaagatgcattgaggaagacatggaaccctaagtttacattgagaagtcactttgatggcatccgagcccttgctttccatcccattgagcctgttttgataacagcatcagaggatcacacattaaaaatgtggaatttacagaaaacagccccagccaaaaagagcacttctcttgatgtagaacctatctatacattcagagcccataaaggtccagtgctttgtgtggtaatgagcagcaatggtgagcagtgttacagtggtggtactgatggactgatccagggctggaataccactaatcccaacatcgacccctatgattcttatgatccttctgttttacgaggccctctgctaggccacacggatgcagtctggggtttggcttatagtgcagcacatcagcgtttgttgtcctgttcagcagatggcactctgcgtttatggaatacaactgaggttgctccagcactaagtgtatttaatgatactaaagaactgggaatccctgcctctgtggatctagtgagcagtgacccgagccatatggtagcatcattcagcaagggatatacaagcatttttaacatggaaacacaacaacgcattctcactttagaatccaatgtagatacaacagccaactcttcctgccaaataaatagagtcatcagtcatcctactcttccgatcagcatcactgctcatgaagacaggcacatcaaattctatgataacaatacaggcaaactgatccactcgatggtagcccacctagaagctgttacaagtttagcagttgatcccaatggcctttacttgatgtctggcagtcatgactgttcaatacgtttatggaatctagaaagtaagacgtgtatccaagaattcacagctcatcgaaaaaagtttgaagaatcgattcatgatgtagctttccacccatccaaatgctatatagccagtgctggagctgacgcactggctaaagtctttgtatgacgcaatgcatcatcttcaccttctagctgtttataagtaatcaactgcacacaagagatacagaagacgagggcaagaatcatctcgtcctgcccttttgttctgctgaaggagcacagagaacatttgttgaagtatagttttgcaattcatatactgttttctaaaactaaggtttgttcaggttgctgcaagctcagctgaatctgtgagcctgaggtctgtttcaaatttctccccaataggcgcctttatttctgaggtggttctaattcgctaggcaggcctgagcgaatacaagtttagcttgtccctgttgagtaagtagggcatgctacaatggataatttaaaagcttgatagctgggactgaatagaagaaaacgggaaacttagaccaagttctcccctgagaaatcttgttaaaacacattaagtagtcaaaatagtaatctttatcatatctgccatattaacccctttgtgtataatgaccaggcagtgttaaactgagtttttaatttgactctcctttcagctgttcacataaagcacctggcaaagcattttacctgttagggggagaaaaatgcaataatatgttaaatatattattattcagaaatgctagacaaatagtttgcaagcagatttctatattgtattacagttttgaaaacagatttggtatcattctaaagtttagctatcaagcactcaccattgtgaagaatagttgatcgactctgcttttactaacagatttaacttattcaggtttgaaattctgtttatttttaagggtaaacagggcatatctctttaataatttctattttaaaattcactttattcatgtgacatttatagtaccagagtgattatttcataccaatgaaatcttacttttcagtgactgaaaagatagaatttatttgctaataatcatttatcaacacccacctaatcatgcttcagatgatctgtgctctttcttctttgtcacgttcaagttatctgacatctaccaagaacagttcataattattaatagcccaaagagtatggttaacttcacgcagctgcttttgcagaagcactaataaaaacaaatattttgtaccctagaagtcctctattaatccctgtaagaatctcctggaaacctggatgaaagagtttaatgccaaatattggctaaaaagttctgtctttctctctccctattcctcccccattgtttaattgagatatacatgttttaatgggcagtggatcagtattgtttctggggaaatccacaccttaaaaggccaggcttccccagcccaacttacctgtgacccacctacatgtgttcaccttttgggattctgaagaccctgctatctagacctagtctcctgtcataaagacattatttctatagtggtttatgtctctcttactctttgtcccaaatgacagagaccaatctagaaattggaaataaattattaacgtccaactttccaccaaaaaacatataaataggctcttagattttaaaaatattaaatctatagatattttaaccaattaaaacaatttctacatattccattccccacattttccatcgtcataacaatgatgcttctcatgatacgtacatctactccttgaaaaagtattctggtggtggtgtggctaatgattgacaaatatttctgtaaaatttctgcctgtttgcctctagaattctgcattatacaggcaaattttctttaaagctagagacttgtgctaaatttgcctgattttcatacagatatgctgtagtaatacagctaccttttcatttcatctttgtgctttggttaacaagcaggctcaagagactgctttgtgtaattaaatgaattgacctaaacatgagctgtcaggtgaatacttaatatttccatgcagatacagaattccatattgtgttcagtaaatttcttttggttcttcacagtgaagaaagaatgtttctaacctaacatttgtagaaggatactggaaaattccttccaggaaggaaggaaggaagatgccattacttggtgtatttatgatggatgaccacaaagctattgttctaccagttattaattaccttctaagatcttcagttactgctttattaatgtcactgaaattctaaaaaccaggacattcttcccccgttcattttatgcttcatggttgaaatttttctgtcagtgagtggaaaataaccatgagatacatagactgtagcgcaaatggaactgttgaaagttccttagaaagccagtgctgtggcattggagactacggagagagtcttctctaccagcactgcatgatctcagcctagaaatgagccaaagctgtcttccaaccagagtagcatatacatgtgtctgacttttcccctagcctgttgaacattcaatgaaaattcacagaatgaacaaattcaatgtttaaacagccattgaaatgctttcatagtgcttcatttgtaaatattttgtttgaaatgtattggaatagtatgaaaattagcgggaggtttggatccctgccttattttcatatgctgtggatacatctctgggagcttgcagcacccttctcaaaactcaactgtcatatggagctcatttgctactcaaaccatagacagattatttaacaaaagtgatataatgaccttcagtatttttctattgaacaagtttaacaacttttgccattaaacaaatacttagttatgcaaaatatttcgcttttataatcattttagttatgactaaaacgggggaaattgagctgcatcactgatgatgaactttgtgagaaattttttttttaatctgactttcattccttcagtattcttgctataaatttcttttggagataatgatgaagatttatttgaaaatgtctaaaatgtatgtatattttataaatatatattatatatattgtaagaatatatataatatataaactatatatatatatatatatatatatatatatatatatatataaaccataggtgcattttactgttttgtattttcatttttggaggtagtatacacagcagataatgatgagtatgatgagtgttgtgctgtttgcttttgcagtataatatatagttctaagtgtttaaattactgtatatacaatattcattataggctagcatgcttgttttaaagactgtcattctagtgtattaaaatctgaatgtaagaaaacctggctattcaaatgtgaattgaaaaatattttattctcagtactgaactatttccattgaacattcagactttttaacaaaaacaaatatcatcaagaaggcaatagctagaaaatgagaggtgcctttaaaaaaaaaaatgcagccttacagtgaggatgaagattgagtttggggagggggtgggagggggggcacagagagagagagagagttagtgtgtgtgtgtgtgtgtgtgtgtgtgtgtgtgtgtgcatgcatgcgtgtgtgtgtgtgtgtgtgtgtttaccaatctgtgaaggtcctgatttgtgaccatcaatgtctttttaatgtatctgctcaacttctaggacttcaggggacatttcatgcgctttgtgctcttctgagcaccatatatactttccaagaattttgaatgtgaattcctagaaatttcagtagagaaaacaatagctattctttaattatagtaaagttcaggtagaaggagaaattatttgttcaccaaaattatgggatctcattaatgttggctaagtaaatgtaattttttaaaggctcactttttaatacttcatatatttccctcttacaaaacagcatgtcatgaagttcttatgtggtaaagattcaactagtaaatatttttaggttaaatacctgaactagttaaaattccacctaagaatagtcttaaaatatttaaaaagcatctctcatatctacctctttgtcattgctgccattttaactgaagcaaatctttatgacatctgaaatgatggttggatgcaattaaaaaaaaatctatgttggtgcttttctcaggctttgtcatttaagttatattgtattaagatgtcacaaatcagactgaaaggcttagaattaattttgtttttctttgaaagaattgcttaaaattaaccatcaatgtttttagcgagtggagataatgaatctttggttggtgtctgtctgtgtgatgttttcaaccaatagccaaataattattgaacttacatgaaaaagagtgctaagtataattttatttagattactttattctttgaaagtgactacaaggctattaagtacataatcattcattttatttactcagaagttgcctctccattactgttaacttgtttagtaatttatataattgcagtacttttaagtgttggacactgggattcaggttgtatacaaagtagtagctgacgaaaaatatgtatatttttgtgaaatgtatcaagccctaaagttcattttagagaaaggcccagaaaaacgtatctgtgtttaaaaacaaaggacaggtcattcgtcaatttgaatcatttttacttttgccactacaaactttttaattggcaatatccatcatccaactggatcttcatgtcagtgtcagggatgccaggttgacaaagtatttaacagatcctttcagtttttgttttgtttttttaattctaaaaaaaacaaatgttaggccaaacagatccctagatcccactcattgattctggcggtattcctaaagtggtgcttagggggtcagaattttctggatctttgctaatccaagctttagatttaatttaaccaggaccacatgcttgtcatctctctgatgcaaattttcaaaatcattttaatttagattctaatgtctgcctgggtttttaacaggctgtgaaccagtgagtgccttgttaatgtagaatgatttttcccccctgggtgggtgttagttagctcctctctgaaaatgtctcagagaatggtattttaattgacttgtagagagctgctaaatttgttattatcagcaatcagaaagtctttggtctaccacacatctccctccctactatctcttcattgtttggctgaagtttgcctcttgtgagaaaacaatacaactccccttctccacacactttttttccagcccagattaataggtatcccctaccctaatcccaactctatgatctaataccttttttaggaggaaccacttctttttaatattgaaatctgctggttactttatgttttctcaagttcagttgactagagctgaccacagggtgtcatcaattcagattcctaaataaccctttctctccacacccagtcctccagctggtgagccctgggccagattgtttgatcttcaggtattttaaattttagttacatcaattaatgtaaattaatccaaatgctaatttttgtggtgcaagaagtttcttatgtaaattcagggtatggataagctaattaagatatccatctttggtggctctaagtgtattatttgtttttaaataaagtgtacaaatatagataacatgctataggtgtctcatgaattggaatatttgtcagatttgggatctagctgtggctttacagtaatcagttaaattaacatagtctgatttggggcttttgggggaggagttgtagaggggtgcagagaaataaaaggatattagacaaagta

SEQ ID NO: 20937 - DNA, 1026 bp, Homo sapiens
  misc_feature 1..1026: note = ENST00000495595
  source 1..1026: mol_type = unassigned DNA
gcaagagacagctccatctgcagctggaagattatttattaacaagtcttactagcatagtactgtactgttaagtcttatgcaggcaatgagtttaaataaatacttttatttacatattaaattatagaatactgattccagtatgactgaactctaaggattctcttcacacaggtatctacaggaggtgggttatacagatactattctagatgtgaaatctaaacgagtgcgagctttgttgggcttttcaagtgatgtcacggacagggaagatgacaaaaatcaggactcagttgtaaatggcacagaggctgaagttaaagagacagcaatgattgcaaaatctgagttaacagattctgcctccgtgctggataatttcaaattccttgaaagtgcagctgcagatttcagtgatgaagatgaagatgatgatgttgatggaagagagaaaagcgtcattgatacttcaacaattgttaggaaaaaagcattgcctgacagcggtgaagatcgagatacaaaagaagctctaaaggagtttgacttcttggttacatcagaggaaggagacaatgaatctagaagtgcaggcgatggaacagactgggaaaaggaagaccagtgtctcatgcctgaagcctggaatgtggaccagggagtaattaccaaactcaaggaacaatacaaaaaggagagaaaggggaaaaagggggtgaagagtcaaaactacaagatatgcttgctaatttgagagatgttgatgaacttccttcattgcagccatctgtgggttcaccttccagacccagcagctccaggcttcctgaacatgaaattaatagggcagatgaagtggaagcattgacatttcctccttcttctggaaagtcattcatcatgggagcagatgaagcccttgaaagtgaactgggacttggagaactagcaggccttacggtggccaatgaagcagactcactaacttatgatatagcaaacaataaagatgcattgagg

SEQ ID NO: 20938 - DNA, 2254 bp, Homo sapiens
  misc_feature 1..2254: note = ENST00000379213
  source 1..2254: mol_type = unassigned DNA
cggccgccatggacgagcaggcgggtcccggcgtcttcttcagcaacaaccacccgggcgccggcggtgccaaggggctcgggcctctggcgggggcggcccgagcccagtacagtctcccggggatcctgcacttcctgcagcacgagtgggcccgcttcgaggtggagagagcccagtgggaggtggagcgggcggagctgcaggcccagattgccttcctgcagggagaaaggaagggccaagaaaatttgaagaaggatcttgtgaggaggatcaaaatgttggagtatgctcttaaacaggaaagagccaaataccacaagttgaaatacgggacagaattgaatcagggagatatgaagcctccaagctatgattctgatgaaggtaatgaaacagaagtgcagccacaacaaaacagccagttaatgtggaaacaaggtcgacaactactcagacagtatctacaggaggtgggttatacagatactattctagatgtgaaatctaaacgagtgcgagctttgttgggcttttcaagtgatgtcacggacagggaagatgacaaaaatcaggactcagttgtaaatggcacagaggctgaagttaaagagacagcaatgattgcaaaatctgagttaacagattctgcctccgtgctggataatttcaaattccttgaaagtgcagctgcagatttcagtgatgaagatgaagatgatgatgttgatggaagagagaaaagcgtcattgatacttcaacaattgttaggaaaaaagcattgcctgacagcggtgaagatcgagatacaaaagaagctctaaaggagtttgacttcttggttacatcagaggaaggagacaatgaatctagaagtgcaggcgatggaacagactgggggcccaataggtcaaaactacaagatatgcttgctaatttgagagatgttgatgaacttccttcattgcagccatctgtgggttcaccttccagacccagcagctccaggcttcctgaacatgaaattaatagggcagatgaagtggaagcattgacatttcctccttcttctggaaagtcattcatcatgggagcagatgaagcccttgaaagtgaactgggacttggagaactagcaggccttacggtggccaatgaagcagactcactaacttatgatatagcaaacaataaagatgcattgaggaagacatggaaccctaagtttacattgagaagtcactttgatggcatccgagcccttgctttccatcccattgagcctgttttgataacagcatcagaggatcacacattaaaaatgtggaatttacagaaaacagccccagccaaaaagagcacttctcttgatgtagaacctatctatacattcagagcccataaaggtccagtgctttgtgtggtaatgagcagcaatggtgagcagtgttacagtggtggtactgatggactgatccagggctggaataccactaatcccaacatcgacccctatgattcttatgatccttctgttttacgaggccctctgctaggccacacggatgcagtctggggtttggcttatagtgcagcacatcagcgtttgttgtcctgttcagcagatggcactctgcgtttatggaatacaactgaggttgctccagcactaagtgtatttaatgatactaaagaactgggaatccctgcctctgtggatctagtgagcagtgacccgagccatatggtagcatcattcagcaagggatatacaagcatttttaacatggaaacacaacaacgcattctcactttagaatccaatgtagatacaacagccaactcttcctgccaaataaatagagtcatcagtcatcctactcttccgatcagcatcactgctcatgaagacaggcacatcaaattctatgataacaatacaggcaaactgatccactcgatggtagcccacctagaagctgttacaagtttagcagttgatcccaatggcctttacttgatgtctggcagtcatgactgttcaatacgtttatggaatctagaaagtaagacgtgtatccaagaattcacagctcatcgaaaaaagtttgaagaatcgattcatgatgtagctttccacccatccaaatgctatatagccagtgctggagctgacgcactggctaaagtctttgtatgacgcaatgcatcatcttcaccttctagctgtttataagtaatcaactgcac

SEQ ID NO: 20939 - DNA, 2713 bp, Homo sapiens
  misc_feature 1..2713: note = ENST00000259400
  source 1..2713: mol_type = unassigned DNA
ctcgtgatgccccgccccgtcgctcctgcgcctgcgccgtgcccaccgaccggcctcgagcgccccggcgggaggtttttctatatgagtggagaagacagctgttaccagggaggtcatacaacatttttttaggatgtctgaagatgaagaaaaagtgaaattacgccgtcttgaaccagctatccagaaattcattaagatagtaatcccaacagacctggaaaggttaagaaagcaccagataaatattgagaagtatcaaaggtgcagaatctgggacaagttgcatgaagagcatatcaatgcaggacgtacagttcagcaactccgatccaatatccgagaaattgagaaactttgtttgaaagtccgaaaggatgacctagtacttctgaagagaatgatagatcctgttaaagaagaagcatcagcagcaacagcagaatttctccaactccatttggaatctgtagaagaacttaagaagcaatttaatgatgaagaaactttgctacagcctcctttgaccagatccatgactgttggtggagcatttcatactactgaagctgaagctagttctcagagtttgactcagatatatgccttacctgaaattcctcaagatcaaaatgctgcagaatcgtgggaaaccttagaagcggacttaattgaacttagccaactggtcactgacttctctctcctagtgaattctcagcaggagaagattgacagcattgcagaccatgtcaacagtgctgctgtgaatgttgaagagggaaccaaaaacttagggaaggctgcaaaatacaagctggcagctctgcctgtggcaggtgcactcatcgggggaatggtagggggtcctattggcctccttgcaggcttcaaagtggcaggaattgcagctgcacttggtggtggggtgttgggcttcacaggtggaaaattgatacaaagaaagaaacagaaaatgatggagaagctcacttccagctgtccagatcttcccagccaaactgacaagaaatgcagttaaaaaccaaatttcagtattattggtgccaacatgtctatcctgaggacctttgctgctgttggacactccgtcaccttttggaacacaagtatatcaagatagtggctactgatgttcaagtgggattgaagtgtgataaatggatatattttgttgtttgctggggtgttcatggagatgttaagagattgaggccctgggctgagggtatataatgtatgtcaggtaaagtttgaagactgccaaggagcagattttctccctggaaatgtgaaaactgaacctataactctgataaggacttgagatgtgtagaaacgttgggttatggaagactagtttcttccataaccctgaattggagaccttaatgctaagtgtagattattgaggtttgttagtgaggaaaagaataagagttcagaagcctttgttatcagatagcgaaatcagggcctagtgaggagcacaggtcgactacataatggagtccattggcgaaccctattgcaatttggtccaactatatcttctggtgaaggaaattaatgatgtaagaaaatgcaagaggctcaacttctcttccaaaaatcttctggcttctgaactcttcctctgcctctctttaaataaataacacagaatttcaagtggtaggagacttattaagccagtcaccaagcttggtctgtcagcctgtcttctaacacctcaaagatcttgtgccctgtgctgtccctcccttgtaattatgaaaagttctttggtttctggggtgaattctacccatgtataatgaggaattctctcataaccttttttgtcttgtctgtcatctctgttcatcccttcctataacctctaggtaaaaagaaaagaaaaaaagaaatttcgagatattttcaacattgttagagtttgggctaaaatgagcaaggagaaaaaaaccaccaagaacatttcctggggcatgttccagttttgaggggtgatatatctgccagatagggggtatctgacccagtcttcttttcagctggtctctggggggagctgagaactcgcttgctacctcacatccttttccccagactttttatctcctatgcatccctttgctttctatagctggtgtttcttccccaaaatggcgttcccatgcttacctttctcacattctagacaatgatggacaaagacgcatgcaagactcagacccggggaatggtgtggtgctaatctcaacacctgacattcacagcaagcatggcccagcccaactgcatgtctatctcaaaccgcagaaaggctttaatactggaaaaaaagaattcaagactacaggcagctcccctctgtaccccaactcatttaaaataggaggaatcactttttgccttacttaacgcttttttctgagcacagggatgggcacctgcaccccagaaggtgtgagctgtctctctgccaggagctaaggttcattaggggattggatggtttatcacttctttctttctgagtttacttttagtaacttttattgatggctacctttcatgtccctgtctaaagagactttctctttcatacgtcttaaatctcatcaatgaaatccagtgaaacagcaccatttcttagtatcattaaataactagaaagtatcaa

SEQ ID NO: 20940 - DNA, 858 bp, Homo sapiens
  misc_feature 1..858: note = ENST00000529340
  source 1..858: mol_type = unassigned DNA
gtgcccaccgaccggcctcgagcgccccggcgggaggtttttctatatgagtggagaagacagctgttaccagggaggtcatacaacatttttttaggatgtctgaagatgaagaaaaagtgaaattacgccgtcttgaaccagctatccagaaattcattaagatagtaatcccaacagacctggaaaggttaagaaagcaccagataaatattgagaaggtatacatacattaaagaagtaaatcattgtgagatatgagggaatttccttacttcacagcttccctttgaggaaagctcacaattgagaagtactgcctaattcagttgaggaaatagtatcaaaggtgcagaatctgggacaagttgcatgaagagcatatcaatgcaggacgtacagttcagcaactccgatccaatatccgagaaattgagaaactttgtttgaaagtccgaaaggatgacctagtacttctgaagagaatgatagatcctgttaaagaagaagcatcagcagcaacagcagaatttctccaactccatttggaatctgtagaagaacttaagaagcaatttaatgatgaagaaactttgctacagcctcctttgaccagatccatgactgttggtggacttaattgaacttagccaactggtcactgacttctctctcctagtgaattctcagcaggagaagattgacagcattgcagaccatgtcaacagtgctgctgtgaatgttgaagagggaaccaaaaacttagggaaggctgcaaaatacaagctggcagctctgcctgtggcaggtgcactcatcgggggaatggtagggggtcctattggcctccttgcaggc

SEQ ID NO: 20941 - DNA, 611 bp, Homo sapiens
  misc_feature 1..611: note = ENST00000533696
  source 1..611: mol_type = unassigned DNA
gcccaccgaccggcctcgagcgccccggcgggaggtttttctatatgagtggagaagacagctgttaccagggaggtcatacaacatttttttaggatgtctgaagatgaagaaaaagtgaaattacgccgtcttgaaccagctatccagaaattcattaagatagtaatcccaacagacctggaaaggttaagaaagcaccagataaatattgagaagtatcaaaggtgcagaatctgggacaagttgcatgaagagcatatcaatgcaggacgtacagttcaggtaaggctattatattttttctgctaaatcagtatgaaaaagacagtcttaagacaattttgctaaaatattacctttgcagctgaacccttttatacacatttgttactatttacttgaggatacatttttagcagaaattgctgaatcacatgccatacatattttcaaagttttgttttgttaccaaattttcctccagaaatgatacacagacttatactctcacaagcaatacattttgtaaaatcctttaacattggtattacccatttcttaaatttttgctaattgataggttaaaattgtgccacttcgttgttcta

SEQ ID NO: 20942 - DNA, 568 bp, Homo sapiens
  misc_feature 1..568: note = ENST00000531035
  source 1..568: mol_type = unassigned DNA
accgaccggcctcgagcgccccggcgggagagatgggattttggcatgttgcccaggctggccatgaactcctgggctcaagtggtcctcccgccttggcctcccaaagtgctggtattacagacatgagccaccgtacccggccccttcattcacaatttttcataaagattcagtggctccacaaagtctgtttttctatatgagtggagaagacagctgttaccagggaggtcatacaacatttttttaggatgtctgaagatgaagaaaaagtgaaattacgccgtcttgaaccagctatccagaaattcattaagatagtaatcccaacagacctggaaaggttaagaaagcaccagataaatattgagaagtatcaaaggtgcagaatctgggacaagttgcatgaagagcatatcaatgcaggacgtacagttcagcaactccgatccaatatccgagaaattgagaaactttgtttgaaagtccgaaaggatgacctagtacttctgaagagaatgatagatcctgttaaagaagaagcatcagcagcaacagcagaatt

SEQ ID NO: 20943 - DNA, 675 bp, Homo sapiens
  misc_feature 1..675: note = ENST00000525342
  source 1..675: mol_type = unassigned DNA
ccgaccggcctcgagcgccccggcgggaggtttttctatatgagtggagaagacagctgttaccagggaggtcatacaacatttttttaggatgtctgaagatgaagaaaaagtgaaattacgccgtcttgaaccagctatccagaaattcattaagatagtaatcccaacagacctggaaaggttaagaaagcaccagataaatattgagaagtatcaaaggtgcagaatctgggacaagttgcatgaagagcatatcaatgcaggacgtacagttcagtttaggaactacatttgagccttctccaaggatttcatcaactgtggaacaaaaattttttttttttaaatggacagttgcggccgggcgcggtggcttacgcctgtaatcccagcactttgggaggctgagcaactccgatccaatatccgagaaattgagaaactttgtttgaaagtccgaaaggatgacctagtacttctgaagagaatgatagatcctgttaaagaagaagcatcagcagcaacagcagaatttctccaactccatttggaatctgtagaagaacttaagaagcaatttaatgatgaagaaactttgctacagcctcctttgaccagatccatgactgttggtggagcatttcatactactgaagctgaagctagttctca

SEQ ID NO: 20944 - DNA, 941 bp, Homo sapiens
  misc_feature 1..941: note = ENST00000524405
  source 1..941: mol_type = unassigned DNA
cccggcgggaggtttttctatatgagtggagaagacagctgttaccagggaggtcatacaacatttttttaggatgtctgaagatgaagaaaaagtgaaattacgccgtcttgaaccagctatccagaaattcattaagatagtaatcccaacagacctggaaaggttaagaaagcaccagataaatattgagaagtatcaaaggtgcagaatctgggacaagttgcatgaagagcatatcaatgcaggacgtacagttcagcaactccgatccaatatccgagaaattgagaaactttgtttgaaagtccgaaaggatgacctagtacttctgaagagaatgatagatcctgttaaagaagaagcatcagcagcaacagcagaatttctccaactccatttggaatctgtagaagaacttaagaagcaatttaatgatgaagaaactttgctacagcctcctttgaccagatccatgactgttggtggacttaattgaacttagccaactggtcactgacttctctctcctagtgaattctcagcaggagaagattgacagcattgcagaccatgtcaacagtgctgctgtgaatgttgaagagggaaccaaaaacttagggaaggctgcaaaatacaagctggcagctctgcctgtggcaggtgcactcatcgggggaatggtagggggtcctattggcctccttgcaggcttcaaagtggcaggaattgcagctgcacttggtggtggggtgttgggcttcacaggtggaaaattgatacaaagaaagaaacagaaaatgatggagaagctcacttccagctgtccagatcttcccagccaaactgacaagaaatgcagttaaaaaccaaatttcagtattattggtgccaacatgtctatcctgaggacctttgctgctgttggacactccgtcacc

SEQ ID NO: 20945 - DNA, 2523 bp, Homo sapiens
  misc_feature 1..2523: note = ENST00000525640
  source 1..2523: mol_type = unassigned DNA
aaggggctctctggaggccgcctttgggggcgtcgggccctcacaggcttggtgggcctggcgcccgtgtggcgcgcgcaagaggcgctgggcggcaagtagggcattggatccgaagtgcgagcgccatggtggctcctcctgtttttcagaagtggcggagcctcgcttggtttcgtttttggaagctttattggaagctggtatagggaggccgcagacgatgcgagcaggacggcctcccggggtcgcggggtggaaaagtttccggcgcgcgtcctgtctctggcgcgctgtaggccccgggtcgccagggtcgctggcgtctgggtcccgggacagacccgcgcatccgttcgctggtgggggcgtttggtgtgtgtggcccaggtgtgctgtgggtgacactgcgaggaatgacgcgacgctcgatggtagtgaggctcggaggactgggagcgagaggccggaagcccctgctcgccaaacccagaggtggttggcagaaggtcccacaccttggctccctccttttagctaaccgaggttcagagaggagactttactttgacttttctctccaaattcggtatctcttccataagtcagaaacattaagcggcgggccggaagaaatcgggcgccactagtatcctgaaaagtgggagctctgggccgatggaaggtttttctatatgagtggagaagacagctgttaccagggaggtcatacaacatttttttaggatgtctgaagatgaagaaaaagtgaaattacgccgtcttgaaccagctatccagaaattcattaagatagtaatcccaacagacctggaaaggttaagaaagcaccagataaatattgagaagtatcaaaggtgcagaatctgggacaagttgcatgaagagcatatcaatgcaggacgtacagttcagcaactccgatccaatatccgagaaattgagaaactttgtttgaaagtccgaaaggatgacctagtacttctgaagagaatgatagatcctgttaaagaagaagcatcagcagcaacagcagaatttctccaactccatttggaatctgtagaagaacttaagaagcaatttaatgatgaagaaactttgctacagcctcctttgaccagatccatgactgttggtggagcatttcatactactgaagctgaagctagttctcagagtttgactcagatatatgccttacctgaaattcctcaagatcaaaatgctgcagaatcgtgggaaaccttagaagcggacttaattgaacttagccaactggtcactgacttctctctcctagtgaattctcagcaggagaagattgacagcattgcagaccatgtcaacagtgctgctgtgaatgttgaagagggaaccaaaaacttagggaaggctgcaaaatacaagctggcagctctgcctgtggcaggtgcactcatcgggggaatggtagggggtcctattggcctccttgcaggcttcaaagtggcaggaattgcagctgcacttggtggtggggtgttgggcttcacaggtggaaaattgatacaaagaaagaaacagaaaatgatggagaagctcacttccagctgtccagatcttcccagccaaactgacaagaaatgcagttaaaaaccaaatttcagtattattggtgccaacatgtctatcctgaggacctttgctgctgttggacactccgtcaccttttggaacacaagtatatcaagatagtggctactgatgttcaagtgggattgaagtgtgataaatggatatattttgttgtttgctggggtgttcatggagatgttaagagattgaggccctgggctgagggtatataatgtatgtcaggtaaagtttgaagactgccaaggagcagattttctccctggaaatgtgaaaactgaacctataactctgataaggacttgagatgtgtagaaacgttgggttatggaagactagtttcttccataaccctgaattggagaccttaatgctaagtgtagattattgaggtttgttagtgaggaaaagaataagagttcagaagcctttgttatcagatagcgaaatcagggcctagtgaggagcacaggtcgactacataatggagtccattggcgaaccctattgcaatttggtccaactatatcttctggtgaaggaaattaatgatgtaagaaaatgcaagaggctcaacttctcttccaaaaatcttctggcttctgaactcttcctctgcctctctttaaataaataacacagaatttcaagtggtaggagacttattaagccagtcaccaagcttggtctgtcagcctgtcttctaacacctcaaagatcttgtgccctgtgctgtccctcccttgtaattatgaaaagttctttggtttctggggtgaattctacccatgtataatgaggaattctctcataaccttttttgtcttgtctgtcatctctgttcatcccttcctataacctctaggt

SEQ ID NO: 20946 - DNA, 2424 bp, Homo sapiens
  misc_feature 1..2424: note = ENST00000534052
  source 1..2424: mol_type = unassigned DNA
gggctctctggaggccgcctttgggggcgtcgggccctcacaggcttggtgggcctggcgcccgtgtggcgcgcgcaagaggcgctgggcggcaagtagggcattggatccgaagtgcgagcgccatggtggctcctcctgtttttcagaagtggcggagcctcgcttggtttcgtttttggaagctttattggaagctggtatagggaggccgcagacgatgcgagcaggacggcctcccggggtcgcggggtggaaaagtttccggcgcgcgtcctgtctctggcgcgctgtaggccccgggtcgccagggtcgctggcgtctgggtcccgggacagacccgcgcatccgttcgctggtgggggcgtttggtgtgtgtggcccaggtgtgctgtgggtgacactgcgaggaatgacgcgacgctcgatggtagtgaggctcggaggactgggagcgagaggccggaagcccctgctcgccaaacccagaggtggttggcagaaggtcccacaccttggctccctccttttagctaaccgaggttcagagaggagactttactttgacttttctctccaaattcggtttttctatatgagtggagaagacagctgttaccagggaggtcatacaacatttttttaggatgtctgaagatgaagaaaaagtgaaattacgccgtcttgaaccagctatccagaaattcattaagatagtaatcccaacagacctggaaaggttaagaaagcaccagataaatattgagaagtatcaaaggtgcagaatctgggacaagttgcatgaagagcatatcaatgcaggacgtacagttcagcaactccgatccaatatccgagaaattgagaaactttgtttgaaagtccgaaaggatgacctagtacttctgaagagaatgatagatcctgttaaagaagaagcatcagcagcaacagcagaatttctccaactccatttggaatctgtagaagaacttaagaagcaatttaatgatgaagaaactttgctacagcctcctttgaccagatccatgactgttggtggagcatttcatactactgaagctgaagctagttctcagagtttgactcagatatatgccttacctgaaattcctcaagatcaaaatgctgcagaatcgtgggaaaccttagaagcggacttaattgaacttagccaactggtcactgacttctctctcctagtgaattctcagcaggagaagattgacagcattgcagaccatgtcaacagtgctgctgtgaatgttgaagagggaaccaaaaacttagggaaggctgcaaaatacaagctggcagctctgcctgtggcaggtgcactcatcgggggaatggtagggggtcctattggcctccttgcaggcttcaaagtggcaggaattgcagctgcacttggtggtggggtgttgggcttcacaggtggaaaattgatacaaagaaagaaacagaaaatgatggagaagctcacttccagctgtccagatcttcccagccaaactgacaagaaatgcagttaaaaaccaaatttcagtattattggtgccaacatgtctatcctgaggacctttgctgctgttggacactccgtcaccttttggaacacaagtatatcaagatagtggctactgatgttcaagtgggattgaagtgtgataaatggatatattttgttgtttgctggggtgttcatggagatgttaagagattgaggccctgggctgagggtatataatgtatgtcaggtaaagtttgaagactgccaaggagcagattttctccctggaaatgtgaaaactgaacctataactctgataaggacttgagatgtgtagaaacgttgggttatggaagactagtttcttccataaccctgaattggagaccttaatgctaagtgtagattattgaggtttgttagtgaggaaaagaataagagttcagaagcctttgttatcagatagcgaaatcagggcctagtgaggagcacaggtcgactacataatggagtccattggcgaaccctattgcaatttggtccaactatatcttctggtgaaggaaattaatgatgtaagaaaatgcaagaggctcaacttctcttccaaaaatcttctggcttctgaactcttcctctgcctctctttaaataaataacacagaatttcaagtggtaggagacttattaagccagtcaccaagcttggtctgtcagcctgtcttctaacacctcaaagatcttgtgccctgtgctgtccctcccttgtaattatgaaaagttctttggtttctggggtgaattctacccatgtataatgaggaattctctcataaccttttttgtcttgtctgtcatctctgttcatcccttcctataacctctaggt

SEQ ID NO: 20947 - DNA, 542 bp, Homo sapiens
  misc_feature 1..542: note = ENST00000526607
  source 1..542: mol_type = unassigned DNA
cgggccctcacaggcttggtgggcctggcgcccgtgtggcgcgcgcaagaggcgctgggcggcaagtagggcattggatccgaagtgcgagcgccatggtggctcctcctgtttttcagaagtggcggagcctcgcttggtttcgtttttggaagctttattggaagctggtatagggaggccgcagacgatgcgagcaggacggcctcccggggtcgcggggtggaaaagtttccggcgcgcgtcctgtctctggcgcgctgtaggccccgggtcgccagggtcgctggcgtctgggtcccgggacagacccgcgcatccgttcgctggtgggggcgtttggtgtgtgtggcccaggtttttctatatgagtggagaagacagctgttaccagggaggtcatacaacatttttttaggatgtctgaagatgaagaaaaagtgaaattacgccgtcttgaaccagctatccagaaattcattaagatagtaatcccaacagacctggaaaggttaagaaagcaccagataaatattgagaag

SEQ ID NO: 20948 - DNA, 342 bp, Homo sapiens
  misc_feature 1..342: note = ENST00000525579
  source 1..342: mol_type = unassigned DNA
tatcaaaggtgcagaatctgggacaagttgcatgaagagcatatcaatgcaggacgtacagttcagcaactccgatccaatatccgagaaattgagaaactttgtttgaaagtccgaaaggatgacctagtacttctgaagagaatgatagatcctgttaaagaagaagcatcagcagcaacagcagaatttctccaactccatttggaatctgtagaagaacttaagaagcaatttaatgatgaagaaactttgctacagcctcctttgaccagatccatgactgttggtggaagctgattggtatataaaaaaaaacttcggcagattttgaagaagtat

SEQ ID NO: 20949 - DNA, 828 bp, Homo sapiens
  misc_feature 1..828: note = ENST00000525847
  source 1..828: mol_type = unassigned DNA
agggtcttactcttatgattcattaggcttaactatagcgctgctcagtctgtggctaattatttctcatcatgggggcaaaacctttttgagtgcactactcaatgccctgtgaattaagagttttcccattttggctggtggcaacaggcagtgtctccagtgttgacaactccgatccaatatccgagaaattgagaaactttgtttgaaagtccgaaaggatgacctagtacttctgaagagaatgatagatcctgttaaagaagaagcatcagcagcaacagcagaatttctccaactccatttggaatctgtagaagaacttaagaagcaatttaatgatgaagaaactttgctacagcctcctttgaccagatccatgactgttggtggagcatttcatactactgaagctgaagctagttctcagagtttgactcagatatatgccttacctgaaattcctcaagatcaaaatgctgcagaatcgtgggaaaccttagaagcggacttaattgaacttagccaactggtcactgacttctctctcctagtgaattctcagcaggagaagattgacagcattgcagaccatgtcaacagtgctgctgtgaatgttgaagagggaaccaaaaacttagggaaggctgcaaaatacaagctggcagctctgcctgtggcaggtgcactcatcgggggaatggtagggggtcctattggcctccttgcaggcttcaaagtggcaggaattgcagctgcacttggtggtggggtgttgggcttcacaggtggaaaattgatacaaagaaagaaacagaaaatgat

SEQ ID NO: 20950 - DNA, 858 bp, Homo sapiens
  misc_feature 1..858: note = ENST00000529385
  source 1..858: mol_type = unassigned DNA
gtattttggggtttgattttgttgggttttttttttccatcaaacccaacatgacatgtaaatgcttatttggattttttttttctggaaagtagattcatttggagaataatatgtttgtatgtttgagtgaattttagcgtgagatgctttttgctgtaaagttgccacccttttattacctaataattaagaccccccccttttttttatgaaagttaatttgtcctttcgacatggcttatcagatgctattaatgaaccactattaagatggcaaggctgcagtacccagggccctgattacaggaattaaaatagtgtgtgttggctccctgctgctccccagcaggaccgctcactcataattcctttgcatctagtctcagcaggagaagattgacagcattgcagaccatgtcaacagtgctgctgtgaatgttgaagagggaaccaaaaacttagggaaggctgcaaaatacaagctggcagctctgcctgtggcaggtgcactcatcgggggaatggtagggggtcctattggcctccttgcaggcttcaaagtggcaggaattgcagctgcacttggtggtggggtgttgggcttcacaggtggaaaattgatacaaagaaagaaacagaaaatgatggagaagctcacttccagctgtccagatcttcccagccaaactgacaagaaatgcagttaaaaaccaaatttcagtattattggtgccaacatgtctatcctgaggacctttgctgctgttggacactccgtcaccttttggaacacaagtatatcaagatagtggctactgatgttcaagtgggattgaagtgtgataaatggatata

SEQ ID NO: 20951 - DNA, 549 bp, Homo sapiens
  misc_feature 1..549: note = ENST00000593535
  source 1..549: mol_type = unassigned DNA
gaagtgtgtgtctgaactcccatctgtgagcgtgtcgtcgaggtgtgcacctccagcgacttcgtgctcggcagcgcggacgcacctgcccgtcctccccgccagggactcaacttcctgggcctgggcgagaaccgacggcggggaggggccagaaattctgagcggagttattcggagtgtcaagaaggatggggagtggaaggtgcttatcatggatcacccaagcatgcgcatcttgtcttcctgctgcaaaatgtcagatatcctggctgagggcatcaccattgttgaagacatcaacaaacggcgggaacccattcccagtctggaggccatttatttgctgagccccacggagaagtcggttcaggccctgatcaaagacttccaggggaccccgactttcacctacaaagcggcccatatcttcttcaccgacacctgccccgagcccctgttcagtgagctaggccgctctcgtctggcaaaggtggtgaagacgttgaaggagattcaccttgccttcctcccctacgaggcccaggt

SEQ ID NO: 20952 - DNA, 821 bp, Homo sapiens
  misc_feature 1..821: note = ENST00000597467
  source 1..821: mol_type = unassigned DNA
accttgggacacacccggaagcggcggcggcgcccctcggggaagatggcgccctcggggctgaaggcggtggtgggggaaaaaattctgagcggagttattcggagtgtcaagaaggatggggagtggaaggtaggggtgaggcagatggctgggtacccagaggcagctcatcatcaggcctatggggaagaccctgaatgtgggacccccaagaactgcctgtccacatgggtggagttgggtgaatgggttctgggtcctcccacccagccagcccttgaaactgcccctcccactgccttggccccttctggggccagctgtggcctcttccgcctgctcctccatccatctgtccatccatctggacaggtgcttatcatggatcacccaagcatgcgcatcttgtcttcctgctgcaaaatgtcagatatcctggctgagggcatcaccagtgagtgaacgcgtccccagtgagatgggacctgagcgtgggaacccctgactgtgcccctctcccagggttcagcccttgagtgtaggatcccctcaaatcgtccagaactcccaagtacgcagctccctgcacggacagcccggatcatgtgaccaaatccattcttaaaccttgcaagctgactgcgggagcccatggattgcaggcctcccctgcagcactccctggctgcagccccttcctgaccgtgcagctccctcgtggagccctgtgtgggactcccagggtggactctggatgtggggtcccaagaatgcagagccttctatgggtgaccccaggtggtgtcccagtcactttg

SEQ ID NO: 20953 - DNA, 552 bp, Homo sapiens
  misc_feature 1..552: note = ENST00000595950
  source 1..552: mol_type = unassigned DNA
accttgggacacacccggaagcggcggcggcgcccctcggggaagatggcgccctcggggctgaaggcggtggtgggggaaaaaattctgagcggagttattcggagtgtcaagaaggatggggagtggaaggtgcttatcatggatcacccaagcatgcgcatcttgtcttcctgctgcaaaatgtcagatatcctggctgagggcatcaccacctgccccgagcccctgttcagtgagctaggccgctctcgtctggcaaaggtggtgaagacgttgaaggagattcaccttgccttcctcccctacgaggcccaggtgttctccctcgatgctccccacagcacctacaacctctactgccccttccgggcagaggagcgcacgcggcagctcgaggtgctggcccagcagattgccacgctgtgcgccaccctgcaggagtacccggccatccgctaccgcaagggcccagaggacacagcccagttggcccacgccgtcctggccaagctgaacgccttcaaggcagacactcccagtctgggcgag

SEQ ID NO: 20954 - DNA, 632 bp, Homo sapiens
  misc_feature 1..632: note = ENST00000595181
  source 1..632: mol_type = unassigned DNA
acacacccggaagcggcggcggcgcccctcggggaagatggcgccctcggggctgaaggcggtggtgggggaaaaaattctgagcggagttattcggagtgtcaagaaggatggggagtggaaggtgcttatcatggatcacccaagcatgcgcatcttgtcttcctgctgcaaaatgtcagatatcctggctgagggcatcaccattgttgaagacatcaacaaacggcgggaacccattcccagtctggaggccatttatttgctgagccccacggagaaggtgcctacatgagtgagcgtgtgtgtatgcgcgtgcatgcgtgtacatgtgcatgtgtgtgtatgtctgcatgcatgtgattgcatgtgtgcatgtgtatacgtgtgcatgtgtccatgtgtatgtgtgtgcatgtgtgtgcatgtgtgtgtgcatctgtgtatgcatgtgtgtgcgtgtttgcatgtgtgtctatgtatgtgtctgtgtgcatgtgcatgtgtgtgcgtctgtgtgtgcatttgtgtgtatgtgtgtatgcgtgtgtgtctgtgggtctgtgtgtgcatttgtgtctgtgcatgtgtgtatgcgtgtgtatgtatgtgtgtgtgcatctgtgtgcatc

SEQ ID NO: 20955 - DNA, 1914 bp, Homo sapiens
  misc_feature 1..1914: note = ENST00000441779
  source 1..1914: mol_type = unassigned DNA
acacacccggaagcggcggcggcgcccctcggggaagatggcgccctcggggctgaaggcggtggtgggggaaaaaattctgagcggagttattcggagtgtcaagaaggatggggagtggaaggtgcttatcatggatcacccaagcatgcgcatcttgtcttcctgctgcaaaatgtcagatatcctggctgagggcatcaccattgttgaagacatcaacaaacggcgggaacccattcccagtctggaggccatttatttgctgagccccacggagaaggctcaggcccagagagtgatccaccttccccagtcggttcaggccctgatcaaagacttccaggggaccccgactttcacctacaaagcggcccatatcttcttcaccgacacctgccccgagcccctgttcagtgagctaggccgctctcgtctggcaaaggtggtgaagacgttgaaggagattcaccttgccttcctcccctacgaggcccaggtgttctccctcgatgctccccacagcacctacaacctctactgccccttccgggcagaggagcgcacgcggcagctcgaggtgctggcccagcagattgccacgctgtgcgccaccctgcaggagtacccggccatccgctaccgcaagggcccagaggacacagcccagttggcccacgccgtcctggccaagctgaacgccttcaaggcagacactcccagtctgggcgagggcccagagaaaacccgctcccagctgctgataatggaccgggcagctgaccccgtgtccccactactgcatgagctcacgttccaggccatggcgtatgatctgctggacatagagcaggacacatacaggtatgagaccaccgggctgagcgaggcgcgggagaaggccgtcttgctggacgaggacgatgacttgtgggtggagcttcgccacatgcatatcgcagatgtgtccaagaaggtcacggagctcctgaggaccttctgtgagagcaagaggctgaccacggacaaggcgaacatcaaagacctatcccagatcctgaaaaagatgccgcagtaccagaaggagctgaataagtattctacgcacctgcatctagcagatgattgtatgaagcacttcaagggctcggtggagaagctgtgtagtgtggagcaggacctggccatgggctccgacgcagagggggagaagatcaaggactccatgaagctgatcgttccggtgctgctggacgcggcggtgcccgcctacgacaagatccgggtcctgctgctctacatcctccttcggaatggtgtgagtgaggagaacctggccaagctgatccagcatgccaatgtacaggcgcacagcagcctcatccgtaacctggagcagctgggaggcactgtcaccaaccccgggggctcggggacctccagccggctggagccgagagaacgcatggagcccacctatcagctgtcccgctggaccccggtcatcaaggatgtaatggaggacgccgtggaggaccggctggacaggaacctgtggcccttcgtatccgaccccgcccccacggccagctcccaggccgctgtcagtgcccgcttcggtcactggcacaagaacaaggctggcatagaagcccgggcgggcccccggctcatcgtgtatgtcatgggcggtgtggccatgtcagagatgagggccgcctacgaggtgaccagggccaccgagggcaagtgggaggtgctcattggctcctcacacatcctcaccccgacccgcttcctggatgacctgaaggcactggacaagaagctggaggacattgccctgccctgacccctggccccgccccctacccctccctttccagagaaataaactcttcccgtcgctctgcc

SEQ ID NO: 20956 - DNA, 589 bp, Homo sapiens
  misc_feature 1..589: note = ENST00000599905
  source 1..589: mol_type = unassigned DNA
acacccggaagcggcggcggcgcccctcggggaagatggcgccctcggggctgaaggcggtggtgggggaaaaaattctgagcggagttattcggagtgtcaagaaggatggggagtggaaggtgcttatcatggatcacccaagcatgcgcatcttgtcttcctgctgcaaaatgtcagatatcctggctgagggcatcaccagtgagtgaacgcgtccccagtgagatgggacctgagcgtgggaacccctgactgtgcccctctcccagggttcagcccttgagtgtaggatcccctcaaatcgtccagaactcccaagtacgcagctccctgcacggacagcccggatcatgtgaccaaatccattcttaaaccttgcaagctgactgcgggagcccatggattgcaggcctcccctgcagcactccctggctgcagccccttcctgaccgtgcagctccctcgtggagccctgtgtgggactcccagggtggactctggatgtggggtcccaagaatgcagagccttctatgggtgaccccaggtggtgtcccagtcactttgccattgagggataggtgctga

SEQ ID NO: 20957 - DNA, 1876 bp, Homo sapiens
  misc_feature 1..1876: note = ENST00000221283
  source 1..1876: mol_type = unassigned DNA
ccggaagcggcggcggcgcccctcggggaagatggcgccctcggggctgaaggcggtggtgggggaaaaaattctgagcggagttattcggagtgtcaagaaggatggggagtggaaggtgcttatcatggatcacccaagcatgcgcatcttgtcttcctgctgcaaaatgtcagatatcctggctgagggcatcaccattgttgaagacatcaacaaacggcgggaacccattcccagtctggaggccatttatttgctgagccccacggagaagtcggttcaggccctgatcaaagacttccaggggaccccgactttcacctacaaagcggcccatatcttcttcaccgacacctgccccgagcccctgttcagtgagctaggccgctctcgtctggcaaaggtggtgaagacgttgaaggagattcaccttgccttcctcccctacgaggcccaggtgttctccctcgatgctccccacagcacctacaacctctactgccccttccgggcagaggagcgcacgcggcagctcgaggtgctggcccagcagattgccacgctgtgcgccaccctgcaggagtacccggccatccgctaccgcaagggcccagaggacacagcccagttggcccacgccgtcctggccaagctgaacgccttcaaggcagacactcccagtctgggcgagggcccagagaaaacccgctcccagctgctgataatggaccgggcagctgaccccgtgtccccactactgcatgagctcacgttccaggccatggcgtatgatctgctggacatagagcaggacacatacaggtatgagaccaccgggctgagcgaggcgcgggagaaggccgtcttgctggacgaggacgatgacttgtgggtggagcttcgccacatgcatatcgcagatgtgtccaagaaggtcacggagctcctgaggaccttctgtgagagcaagaggctgaccacggacaaggcgaacatcaaagacctatcccagatcctgaaaaagatgccgcagtaccagaaggagctgaataagtattctacgcacctgcatctagcagatgattgtatgaagcacttcaagggctcggtggagaagctgtgtagtgtggagcaggacctggccatgggctccgacgcagagggggagaagatcaaggactccatgaagctgatcgttccggtgctgctggacgcggcggtgcccgcctacgacaagatccgggtcctgctgctctacatcctccttcggaatggtgtgagtgaggagaacctggccaagctgatccagcatgccaatgtacaggcgcacagcagcctcatccgtaacctggagcagctgggaggcactgtcaccaaccccgggggctcggggacctccagccggctggagccgagagaacgcatggagcccacctatcagctgtcccgctggaccccggtcatcaaggatgtaatggaggacgccgtggaggaccggctggacaggaacctgtggcccttcgtatccgaccccgcccccacggccagctcccaggccgctgtcagtgcccgcttcggtcactggcacaagaacaaggctggcatagaagcccgggcgggcccccggctcatcgtgtatgtcatgggcggtgtggccatgtcagagatgagggccgcctacgaggtgaccagggccaccgagggcaagtgggaggtgctcattggctcctcacacatcctcaccccgacccgcttcctggatgacctgaaggcactggacaagaagctggaggacattgccctgccctgacccctggccccgccccctacccctccctttccagagaaataaactcttcccgtcgctctgcca

SEQ ID NO: 20958 - DNA, 1785 bp, Homo sapiens
  misc_feature 1..1785: note = ENST00000597068
  source 1..1785: mol_type = unassigned DNA
gaagcggcggcggcgcccctcggggaagatggcgccctcggggctgaaggcggtggtgggggaaaaaattctgagcggagttattcggagtgtcaagaaggatggggagtggaaggtgcttatcatggatcacccaagcatgcgcatcttgtcttcctgctgcaaaatgtcagatatcctggctgagggcatcaccattgttgaagacatcaacaaacggcgggaacccattcccagtctggaggccatttatttgctgagccccacggagaagtcggttcaggccctgatcaaagacttccaggggaccccgactttcacctacaaagcggcccatatcttcttcaccgacacctgccccgagcccctgttcagtgagctaggccgctctcgtctggcaaaggtggtgaagacgttgaaggagattcaccttgccttcctcccctacgaggcccaggtgttctccctcgatgctccccacagcacctacaacctctactgccccttccgggcagaggagcgcacgcggcagctcgaggtgctggcccagcagattgccacgctgtgcgccaccctgcaggagtacccggccatccgctaccgcaagggcccagaggacacagcccagttggcccacgccgtcctggccaagctgaacgccttcaaggcagacactcccagtctgggcgagggcccagagaaaacccgctcccagctgctgataatggaccgggcagctgaccccgtgtccccactactgcatgagctcacgttccaggccatggcgtatgatctgctggacatagagcaggacacatacaggtatgagaccaccgggctgagcgaggcgcgggagaaggccgtcttgctggacgaggacgatgacttgtgggtggagcttcgccacatgcatatcgcagatgtgtccaagaaggtcacggagctcctgaggaccttctgtgagagcaagaggctgaccacggacaaggcgaacatcaaagacctatcccagatcctgaaaaagatgccgcagtaccagaaggagctgaataaggacctggccatgggctccgacgcagagggggagaagatcaaggactccatgaagctgatcgttccggtgctgctggacgcggcggtgcccgcctacgacaagatccgggtcctgctgctctacatcctccttcggaatgctacccctctggacccgggaaccctcctccattggcttggggattcctccactgaggtgtgagtgaggagaacctggccaagctgatccagcatgccaatgtacaggcgcacagcagcctcatccgtaacctggagcagctgggaggcactgtcaccaaccccgggggctcggggacctccagccggctggagccgagagaacgcatggagcccacctatcagctgtcccgctggaccccggtcatcaaggatgtaatggaggacgccgtggaggaccggctggacaggaacctgtggcccttcgtatccgaccccgcccccacggccagctcccaggccgctgtcagtgcccgcttcggtcactggcacaagaacaaggctggcatagaagcccgggcgggcccccggctcatcgtgtatgtcatgggcggtgtggccatgtcagagatgagggccgcctacgaggtgaccagggccaccgagggcaagtgggaggtgctcattggctcctcacacatcctcaccccgacccgcttcctggatgacctgaaggcactggacaagaagctggaggacattgccctgccctga

SEQ ID NO: 20959 - DNA, 1859 bp, Homo sapiens
  misc_feature 1..1859: note = ENST00000414284
  source 1..1859: mol_type = unassigned DNA
ggcggcggcgcccctcggggaagatggcgccctcggggctgaaggcggtggtgggggaaaaaattctgagcggagttattcggagtgtcaagaaggatggggagtggaaggtgcttatcatggatcacccaagcatgcgcatcttgtcttcctgctgcaaaatgtcagatatcctggctgagggcatcaccattgttgaagacatcaacaaacggcgggaacccattcccagtctggaggccatttatttgctgagccccacggagaaggccctgatcaaagacttccaggggaccccgactttcacctacaaagcggcccatatcttcttcaccgacacctgccccgagcccctgttcagtgagctaggccgctctcgtctggcaaaggtggtgaagacgttgaaggagattcaccttgccttcctcccctacgaggcccaggtgttctccctcgatgctccccacagcacctacaacctctactgccccttccgggcagaggagcgcacgcggcagctcgaggtgctggcccagcagattgccacgctgtgcgccaccctgcaggagtacccggccatccgctaccgcaagggcccagaggacacagcccagttggcccacgccgtcctggccaagctgaacgccttcaaggcagacactcccagtctgggcgagggcccagagaaaacccgctcccagctgctgataatggaccgggcagctgaccccgtgtccccactactgcatgagctcacgttccaggccatggcgtatgatctgctggacatagagcaggacacatacaggtatgagaccaccgggctgagcgaggcgcgggagaaggccgtcttgctggacgaggacgatgacttgtgggtggagcttcgccacatgcatatcgcagatgtgtccaagaaggtcacggagctcctgaggaccttctgtgagagcaagaggctgaccacggacaaggcgaacatcaaagacctatcccagatcctgaaaaagatgccgcagtaccagaaggagctgaataagtattctacgcacctgcatctagcagatgattgtatgaagcacttcaagggctcggtggagaagctgtgtagtgtggagcaggacctggccatgggctccgacgcagagggggagaagatcaaggactccatgaagctgatcgttccggtgctgctggacgcggcggtgcccgcctacgacaagatccgggtcctgctgctctacatcctccttcggaatggtgtgagtgaggagaacctggccaagctgatccagcatgccaatgtacaggcgcacagcagcctcatccgtaacctggagcagctgggaggcactgtcaccaaccccgggggctcggggacctccagccggctggagccgagagaacgcatggagcccacctatcagctgtcccgctggaccccggtcatcaaggatgtaatggaggacgccgtggaggaccggctggacaggaacctgtggcccttcgtatccgaccccgcccccacggccagctcccaggccgctgtcagtgcccgcttcggtcactggcacaagaacaaggctggcatagaagcccgggcgggcccccggctcatcgtgtatgtcatgggcggtgtggccatgtcagagatgagggccgcctacgaggtgaccagggccaccgagggcaagtgggaggtgctcattggctcctcacacatcctcaccccgacccgcttcctggatgacctgaaggcactggacaagaagctggaggacattgccctgccctgacccctggccccgccccctacccctccctttccagagaaataaactcttcccgtcgctctgcca

SEQ ID NO: 20960 - DNA, 1523 bp, Homo sapiens
  misc_feature 1..1523: note = ENST00000599737
  source 1..1523: mol_type = unassigned DNA
ggagttattcggagtgtcaagaaggatggggagtggaaggtgcttatcatggatcacccaagcatgcgcatcttgtcttcctgctgcaaaatgtcagatatcctggctgagggcatcaccattgttgaagacatcaacaaacggcgggaacccattcccagtctggaggccatttatttgctgagccccacggagaagtcggttcaggccctgatcaaagacttccaggggaccccgactttcacctacaaagcggcccatatcttcttcaccgacacctgccccgagcccctgttcagtgagctaggccgctctcgtctggcaaaggtggtgaagacgttgaaggagattcaccttgccttcctcccctacgaggcccaggggcccagaggacacagcccagttggcccacgccgtcctggccaagctgaacgccttcaaggcagacactcccagtctgggcgagggcccagagaaaacccgctcccagctgctgataatggaccgggcagctgaccccgtgtccccactactgcatgagctcacgttccaggccatggcgtatgatctgctggacatagagcaggacacatacaggtatgagaccaccgggctgagcgaggcgcgggagaaggccgtcttgctggacgaggacgatgacttgtgggtggagcttcgccacatgcatatcgcagatgtgtccaagaaggtcacggagctcctgaggaccttctgtgagagcaagaggctgaccacggacaaggcgaacatcaaagacctatcccagatcctgaaaaagatgccgcagtaccagaaggagctgaataagtattctacgcacctgcatctagcagatgattgtatgaagcacttcaagggctcggtggagaagctgtgtagtgtggagcaggacctggccatgggctccgacgcagagggggagaagatcaaggactccatgaagctgatcgttccggtgctgctggacgcggcggtgcccgcctacgacaagatccgggtcctgctgctctacatcctccttcggaatggtgtgagtgaggagaacctggccaagctgatccagcatgccaatgtacaggcgcacagcagcctcatccgtaacctggagcagctgggaggcactgtcaccaaccccggggacgccgtggaggaccggctggacaggaacctgtggcccttcgtatccgaccccgcccccacggccagctcccaggccgctgtcagtgcccgcttcggtcactggcacaagaacaaggctggcatagaagcccgggcgggcccccggctcatcgtgtatgtcatgggcggtgtggccatgtcagagatgagggccgcctacgaggtgaccagggccaccgagggcaagtgggaggtgctcattggctcctcacacatcctcaccccgacccgcttcctggatgacctgaaggcactggacaagaagctggaggacattgccctgccctgacccctggccccgccccctacccctccctttccag

SEQ ID NO: 20961 - DNA, 472 bp, Homo sapiens
  misc_feature 1..472: note = ENST00000599648
  source 1..472: mol_type = unassigned DNA
ccctgatcaaagacttccaggggaccccgactttcacctacaaagcggcccatatcttcttcaccgacagtgagtgaggagagcctagggtgttggtgggtggggcaaggaggtgtgggggctgctctggcctgatgccccactcctgcctcaccccagcctgccccgagcccctgttcagtgagctaggccgctctcgtctggcaaaggtggtgaagacgttgaaggagattcaccttgccttcctcccctacgaggcccaggtgttctccctcgatgctccccacagcacctacaacctctactgccccttccgggcagaggagcgcacgcggcagctcgaggtgctggcccagcagattgccacgctgtgcgccaccctgcaggagtacccggccatccgctaccgcaagtggggaccccacccagccccaccccgatgccgacccccccttaaccgcgtgcaacacct

SEQ ID NO: 20962 - DNA, 747 bp, Homo sapiens
  misc_feature 1..747: note = ENST00000594221
  source 1..747: mol_type = unassigned DNA
gtacccggccatccgctaccgcaagggcccagaggacacagcccagttggcccacgccgtcctggccaagctgaacgccttcaaggcagacactcccagtctgggcgagggcccagagaaaacccgctcccagctgctgataatggaccgggcagctgaccccgtgtccccactactgcatgagctcacgttccaggccatggcgtatgatctgctggacatagagcaggacacatacaggtatgagaccaccgggctgagcgaggcgcgggagaaggccgtcttgctggacgaggacgatgacttgtgggtggagcttcgccacatgcatatcgcagatgtgtccaagtgcgtgcacacggggaccggatcccccccccaccgcccactgtgggcctggtagcggccttgggatccctggctgctgccaagtctttggccctcatgagcacccctcgtgtgactccagactggcctccaatttcaccccacctctccctgtcccccctgagtgggctcacccatggcctgtggctcctctcccctcactctcacccccgcccaccctcatggccaggaaggtcacggagctcctgaggaccttctgtgagagcaagaggctgaccacggacaaggcgaacatcaaagacctatcccagatcctgaaaaagatgccgcagtaccagaaggagctgaataagtattctacgcacctgcatctagcagatgattgtatgaagcacttca

SEQ ID NO: 20963 - DNA, 430 bp, Homo sapiens
  misc_feature 1..430: note = ENST00000595861
  source 1..430: mol_type = unassigned DNA
cagctgaccccgtgtccccactactgcatgagctcacgttccaggccatggcgtatgatctgctggacatagagcaggacacatacaggtatgagaccaccgggctgagcgaggcgcgggagaaggccgtcttgctggacgaggacgatgacttgtgggtggagcttcgccacatgcatatcgcagatgtgtccaagaaggtcacggagctcctgaggaccttctgtgagagcaagaggctgaccacggacaaggcgaacatcaaagacctatcccagatcctgaaaaagatgccgcagtaccagaaggagctgaataagtattctacgcacctgcatctagcagatgattgtatgaagcacttcaagggctcggtggagaagctgtgtagtgtggagcaggtggggcagggcttgcggggggcaggggt

SEQ ID NO: 20964 - DNA, 770 bp, Homo sapiens
  misc_feature 1..770: note = ENST00000600702
  source 1..770: mol_type = unassigned DNA
cctgaggaccttctgtgagagcaagaggctgaccacggacaaggcgaacatcaaagacctatcccagatcctgaaaaagatgccgcagtaccagaaggagctgaataagtattctacgcacctgcatctagcagatgattgtatgaagcacttcaagggctcggtggagaagctgtgtagtgtggagcaggacctggccatgggctccgacgcagagggggagaagatcaaggactccatgaagctgatcgttccggtgctgctggacgcggcggtgcccgcctacgacaagatccgggtcctgctgctctacatcctccttcggaatggtgtgagtgaggagaacctggccaagctgatccagcatgccaatgtacaggcgcacagcagcctcatccgtaacctggagcagctgggaggcactgtcaccaaccccgggggctcggggacctccagccggctggagccgagagaacgcatggagcccacctatcagctgtcccgctggaccccggtcatcaaggatgtaatggaggacgccgtggaggaccggctggacaggaacctgtggcccttcgtatccgaccccgcccccacggccagctcccaggccgctgtcaggctcctcacacatcctcaccccgacccgcttcctggatgacctgaaggcactggacaagaagctggaggacattgccctgccctgacccctggccccgccccctacccctccctttccagagaaataaactcttcccgtcgctctgcca

SEQ ID NO: 20965 - DNA, 811 bp, Homo sapiens
  misc_feature 1..811: note = ENST00000599400
  source 1..811: mol_type = unassigned DNA
ctcggtggagaagctgtgtagtgtggagcaggacctggccatgggctccgacgcagagggggagaagatcaaggactccatgaagctgatcgttccggtgctgctggacgcggcggtgcccgcctacgacaagatccgggtcctgctgctctacatcctccttcggaatggtgtgagtgaggagaacctggccaagctgatccagcatgccaatgtacaggcgcacagcagcctcatccgtaacctggagcagctgggaggcactgtcaccaaccccgggccacaccaggcgcagcccctctgtgaccagcctccttcccctcaatccccctgctgccctccctgccctgcctgtagggctcggggacctccagccggctggagccgagagaacgcatggagcccacctatcagctgtcccgctggaccccggtcatcaaggatgtaatggaggacgccgtggaggaccggctggacaggaacctgtggcccttcgtatccgaccccgcccccacggccagctcccaggccgctgtcagtgcccgcttcggtcactggcacaagaacaaggctggcatagaagcccgggcgggcccccggctcatcgtgtatgtcatgggcggtgtggccatgtcagagatgagggccgcctacgaggtgaccagggccaccgagggcaagtgggaggtgctcattggctcctcacacatcctcaccccgacccgcttcctggatgacctgaaggcactggacaagaagctggaggacattgccctgccctgacccctggccccgccccctacccctccct

SEQ ID NO: 20966 - DNA, 704 bp, Homo sapiens
  misc_feature 1..704: note = ENST00000593854
  source 1..704: mol_type = unassigned DNA
ggagccttggagaggtagtctcaggatagtggtgtgacctgtgtgtaggtgggtggggcactggaaaggtgggacctgggtgaggagcagggcctgtggagagactgtccctggacaggggtgggaccttgagagacctggtgctgagatgaggtaggacccaaatgtcctcttgccgaggatcctggggatgtccttggcccgcctctcccatccccttccctgacacatagcggccggtggacggctgaccccatgcccgcaggacctggccatgggctccgacgcagagggggagaagatcaaggactccatgaagctgatcgttccggtgctgctggacgcggcggtgcccgcctacgacaagatccgggtcctgctgctctacatcctccttcggaatggtgtgagtgaggagaacctggccaagctgatccagcatgccaatgtacaggcgcacagcagcctcatccgtaacctggagcagctgggaggcactgtcaccaaccccgggggctcggggacctccagccggctggagccgagagaacgcatggagcccacctatcagctgtcccgctggaccccggtcatcaaggatgtaatggaggtactgggtggcaggtcagggtgggggccagccctccgcatcggctggcggctcagcctccctcctgctgaggtgctaagcctcagggcttagg

SEQ ID NO: 20967 - DNA, 1974 bp, Homo sapiens
  misc_feature 1..1974: note = ENST00000595800
  source 1..1974: mol_type = unassigned DNA
atgtcctcttgccgaggatcctggggatgtccttggcccgcctctcccatccccttccctgacacatagcggccggtggacggctgaccccatgcccgcaggacctggccatgggctccgacgcagagggggagaagatcaaggactccatgaagctgatcgttccggtgctgctggacgcggcggtgcccgcctacgacaagatccgggtcctgctgctctacatcctccttcggaatggtgtgagtgaggagaacctggccaagctgatccagcatgccaatgtacaggcgcacagcagcctcatccgtaacctggagcagctgggaggcactgtcaccaaccccgggggctcggggacctccagccggctggagccgagagaacgcatggagcccacctatcagctgtcccgctggaccccggtcatcaaggatgtaatggaggtactgggtggcaggtcagggtgggggccagccctccgcatcggctggcggctcagcctccctcctgctgaggtgctaagcctcagggcttaggggaaaatgctcattgctggcattcccttggcaccgatctgctctgctgaggggggcacgccaagcccgcagctgaggaattggggtgacagcggggcctgtgctggggagcctcacttcctccccacctgccggctgcctccgctatatctctctagtctgttcccctgtcccgcaggagtgcccctgagccccagccctggccttcccaggatcccagggcagcaccatccaatggcaatgggcctggggcggcttcctggcttcctccttgtccctctaagagccccggcccctctttctgcgtgggggccagagacctgggcctcctcatccccatggaccttgaatacctggacttctggggctctgaggggctgagagcccagacactgggttccccaaagggctgggggtattgactgatggtccccaagggcctggaggcccagactactgggttgccgaggaactgtgggtttagacttctgggtacccaaggagttatggaattagattcgtgggtccccagtgagttatggatctagatttctaggtccccaatggactagaggcctagactcctgggtcccccagaggcaggaggtggagatgctggttcctgtctgccaggatcttggcccctgaataccccgtggggggcactcctgaccccggaccccatgcctggggttcctcccctaacctgcctctcggccgccaggacgccgtggaggaccggctggacaggaacctgtggcccttcgtatccgaccccgcccccacggccagctcccaggccgctgtcaggtgaggccccggggccgcccccgcccacgcctgggtctgtgttaggtgggcggcctggcggcggtgagggcctcctgcctggactttctgcccctgccctgcacagtgcccgcttcggtcactggcacaagaacaaggctggcatagaagcccgggcgggcccccggctcatcgtgtatgtcatgggcggtgtggccatgtcagagatgagggccgcctacgaggtgaccagggccaccgagggcaagtgggaggtgctcattggtaagtcaccaggactgggaccctggggtctggggcttgggttcccggggcctgggcttgtaccttctaggtgtctggactccagagtccttggagtcagggacctggtttgctgagggacagggacagccccacaccagccgggaccgggagcctgtcaaagacgaaggcagcgccccccaacatcttccccaaacctctgcccctgcacaggctcctcacacatcctcaccccgacccgcttcctggatgacctgaaggcactggacaagaagctggaggacattgccctgccctgacccctggccccgccccctacccctccctttccagagaaataaactcttcccgtcgctctgcc

SEQ ID NO: 20968 - DNA, 385 bp, Homo sapiens
  misc_feature 1..385: note = ENST00000599558
  source 1..385: mol_type = unassigned DNA
cttccctgacacatagcggccggtggacggctgaccccatgcccgcaggacctggccatgggctccgacgcagagggggagaagatcaaggactccatgaagctgatcgttccggtgctgctggacgcggcggtgcccgcctacgacaagatccgggtcctgctgctctacatcctccttcggaatggtgtgagtgaggagaacctggccaagctgatccagcatgccaatgtacaggcgcacagcagcctcatccgtaacctggagcagctgggaggcactgtcaccaaccccggggtacgccaggagcgggcatggggggaccctgggagagggtgcggatcacagccggggctctgcaaggcagagggccattggtgcacag

SEQ ID NO: 20969 - DNA, 706 bp, Homo sapiens
  misc_feature 1..706: note = ENST00000601061
  source 1..706: mol_type = unassigned DNA
ggtgtgagtgaggagaacctggccaagctgatccagcatgccaatgtacaggcgcacagcagcctcatccgtaacctggagcagctgggaggcactgtcaccaaccccgggggctcggggacctccagccggctggagccgagagaacgcatggagcccacctatcagctgtcccgctggaccccggtcatcaaggatgtaatggaggacgccgtggaggaccggctggacaggaacctgtggcccttcgtatccgaccccgcccccacggccagctcccaggccgctgtcaggtgaggccccggggccgcccccgcccacgcctgggtctgtgttaggtgggcggcctggcggcggtgagggcctcctgcctggactttctgcccctgccctgcacagtgcccgcttcggtcactggcacaagaacaaggctggcatagaagcccgggcgggcccccggctcatcgtgtatgtcatgggcggtgtggccatgtcagagatgagggccgcctacgaggtgaccagggccaccgagggcaagtgggaggtgctcattggctcctcacacatcctcaccccgacccgcttcctggatgacctgaaggcactggacaagaagctggaggacattgccctgccctgacccctggccccgccccctacccctccctttccagagaaataaactcttcccgtcgctctgcca

SEQ ID NO: 20970 - DNA, 716 bp, Homo sapiens
  misc_feature 1..716: note = ENST00000602355
  source 1..716: mol_type = unassigned DNA
ttgccttcatactttgtctcactgcttcttatctctttgcctatctctgcctctgtctttgtctttctctggctcgctctctctccctttggctttctctctccgtctctctctggctcactgtttctctctctcgctttcttgctgtctctcgctctctctcgctctctgttccacttccccatctttgcctgccatcccccaccctaccagccacaccaggcgcagcccctctgtgaccagcctccttcccctcaatccccctgctgccctccctgccctgcctgtagggctcggggacctccagccggctggagccgagagaacgcatggagcccacctatcagctgtcccgctggaccccggtcatcaaggatgtaatggaggacgccgtggaggaccggctggacaggaacctgtggcccttcgtatccgaccccgcccccacggccagctcccaggccgctgtcagtgcccgcttcggtcactggcacaagaacaaggctggcatagaagcccgggcgggcccccggctcatcgtgtatgtcatgggcggtgtggccatgtcagagatgagggccgcctacgaggtgaccagggccaccgagggcaagtgggaggtgctcattggctcctcacacatcctcaccccgacccgcttcctggatgacctgaaggcactggacaagaagctggaggacattgccctgccctga

SEQ ID NO: 20971 - DNA, 295 bp, Homo sapiens
  misc_feature 1..295: note = ENST00000599278
  source 1..295: mol_type = unassigned DNA
ggttcctgtctgccaggatcttggcccctgaataccccgtggggggcactcctgaccccggaccccatgcctggggttcctcccctaacctgcctctcggccgccaggacgccgtggaggaccggctggacaggaacctgtggcccttcgtatccgaccccgcccccacggccagctcccaggccgctgtcagtgcccgcttcggtcactggcacaagaacaaggctggcatagaagcccgggcgggcccccggctcatcgtgtatgtcatgggcggtgtggccatgtcagagat

SEQ ID NO: 20972 - DNA, 1188 bp, Homo sapiens
  misc_feature 1..1188: note = ENST00000612033
  source 1..1188: mol_type = unassigned DNA
tgcatgcgtgtacatgtgcatgtgtgcatgtgtgtgcatgtgtgtgtgcatctgtgtatgcatgtgtgtgcgtgcatgtgtgtctatgtatgtgtctgtgtgcatgtgcatgtgtgtgcgtctgtgtgtgcatttgtgtgtatgtgtgtatgcgtgtgtgtctgtgggtctgtgtgtgcatttgtgtctgtgcatgtgtgtatgcgtgtgtattgtgtgtgcatctgtgtgcatctgtatgtgtgtgtgtgcgtctgtctgtgtgcatgtgtgtatgcgtgtgtatgtatgtgtctgcgtctgtgtgtgcgtctgtgtgtatctgtgtgtgcatgtgtgtatgcgtgtatatgtatgtgcatctgtgtgcatgtgtctatgtatgtgtgtgcatctgtgtgtgcgtgtgtatgcgtgtgtgtatgcgtctgtcatgtgtgtatgcgtgtgtgtgcgcatcagtgtctgcatgtgtgtatatgtgtgtatgtatgttgcgcgcgcatctgtgtgtgtgcatgtgtgtatgtatgtgtgtgcatctctgtgtgtgcatgtgtgtatgtgtgtgtgcatctgtgtgtgtgtgcatgtgtgcatgcgtgtgtatgtgtgtgtgcgtgcgtgcatctgtgtgtgtgcgcgtgtgcccatgtgggtgcgacactagtgtgcatttgcacatatacatgtccccgtccgtccatgtttgcacatggtggcagatggggggtggctgggaggcctaggcagccaatgagcctaggtgtgcaggctcaggcccagagagtgatccaccttccccagtcggttcaggccctgatcaaagacttccaggggaccccgactttcacctacaaagcggcccatatcttcttcaccgacacctgccccgagcccctgttcagtgagctaggccgctctcgtctggcaaaggtggtgaagacgttgaaggagattcaccttgccttcctcccctacgaggcccaggtacggcccgggctcatcctgggcagggggtgggggtttgtgaccaaatgtcccctgttccctcagaaacagacactgaggctgggcgcagtggctcatacctgtaatcccagcgctgtgggaggccagggcaggaggatcacttggggccaggagtttgagaccagcctgggtacagagcaagaccccgtctcttaa

SEQ ID NO: 20973 - DNA, 561 bp, Homo sapiens
  misc_feature 1..561: note = ENST00000483586
  source 1..561: mol_type = unassigned DNA
gcttctgcggccaaagtaggttgggagtggaaggtggtggctgctgctccgcagtgtcgggaagatggcgccgccggtggcagagagggggctaaagagcgtcgtgtggcagaagataaaagcaacagtgtttgatgactgcaagaaagaaggcgaatggaagataatgcttttagatgaatttaccactaagcttttggcatcgtgttgcaaaatgacagatcttctagaagaaggtattactgttgtagagaatatttataagaaccgtgaacctgtcagacaaatgaaagctctttatttcatcactccgacatcaaaggtgagtattttgagaccttaaaaagcaggttcatcaatatttcaccattgttatggtttactaacagaaaattcaaagtaataaagtacactttagtagaaaaatattgccataaactagtttgcttaggaaagtttttttctgtgttagaagattatttgcattcttccgaatgagaatgtataagtaaaaggattccttttttccccatatatgaaagcagaattaaattgtataaa

SEQ ID NO: 20974 - DNA, 294 bp, Homo sapiens
  misc_feature 1..294: note = ENST00000469338
  source 1..294: mol_type = unassigned DNA
ggccaaagtaggttgggagtggaaggtggtggctgctgctccgcagtgtcgggaagatggcgccgccggtggcagagagggggctaaagagcgtcgtgtggcagaagataaaagcaacagtgtttgatgactgcaagaaagaaggcgaatggaagataatgcttttagatgaatttaccactaagcttttggcatcgtgttgcaaaatgacagatcttctagaagaaggtattactggtaagtgttattcttggcatgaacactttttaattgtaattgggggagatctgaggt

SEQ ID NO: 20975 - DNA, 2478 bp, Homo sapiens
  misc_feature 1..2478: note = ENST00000370008
  source 1..2478: mol_type = unassigned DNA
agtaggttgggagtggaaggtggtggctgctgctccgcagtgtcgggaagatggcgccgccggtggcagagagggggctaaagagcgtcgtgtggcagaagataaaagcaacagtgtttgatgactgcaagaaagaaggcgaatggaagataatgcttttagatgaatttaccactaagcttttggcatcgtgttgcaaaatgacagatcttctagaagaaggtattactgttgtagagaatatttataagaaccgtgaacctgtcagacaaatgaaagctctttatttcatcactccgacatcaaagtctgtagattgtttcttacatgattttgcaagtaaatcggagaacaagtataaagcagcatatatttacttcactgacttttgccctgataatctctttaacaaaattaaggcttcttgctccaagtcaataagaagatgtaaagaaataaatatttccttcattccacatgaatctcaggtgtatactcttgatgtaccagatgcattctattactgttatagtccagaccctggtaatgcaaagggaaaagatgccattatggaaacaatggctgaccagatagttacagtgtgtgccaccttggatgaaaatcccggagtaagatataaaagtaaacctctagataatgccagtaagcttgcacagcttgttgaaaaaaagcttgaagactactacaagattgatgaaaagagcctaataaagggtaaaactcattcacagctcttaataattgatcgtggctttgatcctgtgtccactgtcctgcatgaactgacctttcaggcaatggcatatgatctactaccaattgagaatgatacatacaaatataaaacagatggaaaagaaaaggaggccatccttgaagaagaagatgacctctgggttagaattcgacatcgacatattgcggttgtgttagaggaaattcccaagcttatgaaagaaatttcatcaacaaagaaagcaacagaaggaaagacatcacttagtgctcttacccagctgatgaaaaagatgccccatttccgaaaacagattactaagcaagttgtccatcttaacttagcagaagattgcatgaataagttcaagcttaatatagaaaagctctgcaaaactgaacaggacctggcacttggaactgatgcagaaggacagaaggtgaaagattccatgcgagtactccttccagttctactcaacaaaaatcatgataattgtgataaaataagagcaattctactttatatcttcagtattaatggaactacggaagaaaatttggacaggttgatccagaatgtaaagatagaaaatgagagtgacatgattcgtaactggagttaccttggtgttcccattgttccccaatctcaacaaggcaaaccgttaagaaaggatcggtctgcagaagaaacttttcagctctctcggtggacaccttttatcaaagatattatggaggatgctattgataatagattagattcaaaagaatggccatattgttcccagtgtccagcagtatggaatggttcaggagctgtaagtgctcgccagaaacccagagctaattatttagaagaccgaaaaaatgggtcaaagctgattgtttttgtaattggagggatcacatactctgaagtgcgttgtgcttatgaagtttctcaggcacataaatcctgtgaagttattattggttctacacatgttttaacacccaaaaagctgttggatgatataaagatgctgaataaacccaaggataaagtctccttaattaaagatgaatagcatttctttttggagggtttagagattcttactaatatgttgaactaaaatagaaagaaaatgttgctgtcatgtaatttaaacaatgtaaatattttatggaataatggcttttcaaatacatttcttaaggaactgtttatgattattactggatttgtcatttttgataatttaaatattgctgctgctttgtagatgatgagaagaaatgttaaagtgctttctaaaaggaaattttttcacctttggaggagaatatattagagttgtgggtaatttttcacagccacctatgtacatactaattacccattggatacttatatctaaaagtctcatgctgaagtatagtttttgggaaagaatgattttaaataaagagattgtaaaagtaaaaaactgtaaatgtatatgtatgatagaattgtttcctctaagtgtagtttttctttcaactaaaattcagtttatgtgtaaaataattcagtcattaatagaaatggagtgatttcacagtgtgtactgttttgccacatacttctaaagaacacaattttatataattttgaaatcatgtatgtttaaattagaaaaccaaaaatcatgaacattctaagagaaaataaatatagaatttaaaaaatta

SEQ ID NO: 20976 - DNA, 514 bp, Homo sapiens
  misc_feature 1..514: note = ENST00000486601
  source 1..514: mol_type = unassigned DNA
actctgccatatgatcacatagaaaactggtaactaaagaatcacagagaagtccaaagacacatacaattctgtcttatgttacatgttatataatatacttcaaaataaaaatatcatatctaagttaagtcttggtctctgctgttagagattcctcactttaatttgccctgataatctctttaacaaaattaaggcttcttgctccaagtcaataagaagatgtaaagaaataaatatttccttcattccacatgaatctcaggtgtatactcttgatgtaccagatgcattctattactgttatagtccagaccctggtaatgcaaagggaaaagatgccattatggaaacaatggctgaccagatagttacagtgtgtgccaccttggatgaaaatcccggagtaagatataaaagtaaacctctagataatgccagtaagcttgcacagcttgttgaaaaaaagcttgaagactactacaagattgatgaaaagagcctaataaag

SEQ ID NO: 20977 - DNA, 2536 bp, Homo sapiens
  misc_feature 1..2536: note = ENST00000485167
  source 1..2536: mol_type = unassigned DNA
ataaatatttccttcattccacatgaatctcaggtgtatactcttgatgtaccagatgcattctattactgttatagtccagaccctggtaatgcaaagggaaaagatgccattatggaaacaatggctgaccagatagttacagtgtgtgccaccttggatgaaaatcccggagtaagatataaaagtaaacctctagataatgccagtaagcttgcacagcttgttgaaaaaaagcttgaagactactacaagattgatgaaaagagcctaataaagggtaaaactcattcacagctcttaataattgatcgtggctttgatcctgtgtccactgtcctgcatgaactgacctttcaggcaatggcatatgatctactaccaattgagaatgatacatacaagcaagtataacttgaagggcatataaagggcatatacaaacaggatagaatatgagcatttaatgatttatataggcaccagaaatctgaaagcccctataaccttttctattcagagactttatccttctcttattcctacagttatagtctttgacagataatgttgaccttgtaaattaaagtgtaatttgattgctttggagcatttttggtgtgtttgcttccttaactgtgtgtacagtagagctacatttaaacacagggaatttggcccttttgcttttaaaagtaaataccaggctcactatcattgaaggagaaaccatattcaaaattgttaggctataattgttctgaatcatacattcaaaagtgtatgtgtcttatcaacataaagtattttaaaagattggaacactagaaaactaaataggatggctattgaggacaacaggcatagttttaccattttggtaccttctactgagttaatcttggtataaacatatttactttaaaagtaatgtcaaataaaaacctaaatgaaaaatgaaatagttttctatcaaggaatcatcttactgtatctctgtatcatttatggtgtatgtgttacatacattacaaatgttatttgatgtcatgatttctgaatccaaactggtatttgtcagctaagatttactgcttgagtacagtaataaaaatgaaaatagttttctgaaattttatgtttaaactaatttgttagttttaagatacagacacttgtgatagttatgatactgttttttttcttaaatattgttaaaatttgtattttctattgtatttttatttgcattctggtcaaatcttggtttctgagtttttctctgtattatctgtattaatgttagataacatagctatttttctaatataaaagttattttaagcagtttattcagaggggatattatttacctctgttaccctgtaggtctctaaacttttaagtagacttattttttaaaaagctactatactcccttctttctgaatcaaaaacattcagagataagaattagatggaagtaaagctccctgtggtttgtgctccatcacaattttttttttttttttttttttttttagtagaggcagggtttccccatgttggccaggctagtcttgaactcctgacctcaggtgatccccctgcctcggcctcccaaagtgctgggattgcaggggtgagccaccacgcccagccttcatcacagttttttatggaaacagaatacaaagcagcaggaagctctaagtgtccagattcaagttttcatgttggtgccttctttaaatttacttttttttttttttctttttttgagacagagtcttactctgtcacccaggctggagtgcagtggcgcgatctctgctcattgcagccttcgtcccctgagttcaaatgattcccagcctcagcctcccaagtaactgggactacaagtgtgcaccactgcgcctggctcatttttgtgtttttagtagaaatggggttttgctgtgttggccaggctggtctcgaactcctggcctcacatgatccacccacctcggcctcccaactaaatttacttttaaaatgggatattcatcacctgagtattgtcaggcttgttactcttatctctgtttacagatcacttataagtcaaaggtattgtgtaagaacaaagtggtattttaaatgacaaaagggctttcatccttagtgcagccttatataattgagcacagtgattctgtctttggtcatctgtaatccacacaggtggatggttttatagattgatgtgtaatttgtgggggttatagaaacgattatattcatatagcaaagtctatatgtattatttgtagttcagagctaggaaaactcaatgcagtccttcctgatcttgactcaggaaatcagtagttccaaggatgattcagtcttgtctagttccacaaatggaaggagggtgtctgcataaaaagataaggggaatcagtcaggaagcccattttgaatagcttcatgaatcccttaaattgttgctcacttcagcagaactcattaaagctatcacaatttt

SEQ ID NO: 20978 - DNA, 765 bp, Homo sapiens
  misc_feature 1..765: note = ENST00000495245
  source 1..765: mol_type = unassigned DNA
accacaccctgctaagtttttgtatttttttttagagacagggtttcaccttgttagccaggctggttttgaactcctgacctcaagtgatccgcccaccttggcctccgaaagtgctaaaattacaggcgtgagccactgcacctggccgatattcctgttcttaatggaaatttgataattgtactgtgggttattagcacatcaaaacaatgttgtagggaattagaacacaaagcgttagtatattgagtcttgttcttaaagttaactgtaggacgttgaattttttttataaagtacaattttgctgaactaaaactctaataatggcacctaaactgaatatttgaaaatgtcttggtaggcttaggacttatttttaatgtaaggatagcagcgtgccttagttttgagtaggtattcattacccccctaaaatagtggattttacttttcagtttcttgagttgtgtcttgaaattattgtttgtaaaaatgtttcttttgattttggagggaaaaaaatcaaaaagttttagtgcttctgtctacttgtagatataaaacagatggaaaagaaaaggaggccatccttgaagaagaagatgacctctgggttagaattcgacatcgacatattgcggttgtgttagaggaaattcccaagcttatgaaagaaatttcatcaacaaagaaagcaacagaaggaaagacatcacttagtgctcttacccagctgatgaaaaagatgccccatttccg

SEQ ID NO: 20979 - DNA, 752 bp, Homo sapiens
  misc_feature 1..752: note = ENST00000472099
  source 1..752: mol_type = unassigned DNA
acctggcacttggaactgatgcagaaggacagaaggtgaaagattccatgcgagtactccttccagttctactcaacaaaaatcatgataattgtgataaaataagagcaattctactttatatcttcagtattaatggtaatggagataatcactttttaataagtattttactattgatcataaaagaatctttgaaaactgaaagatagttgctgaacttggttaagataaaagggaaaatatgaaatcgagagaagactgaaggagatataatttgactgttttttattttaaaagcttcattcatgggtactacctaaagccttgaaattattttggtagcaattgtgtgattgtgcactcatatttttacctatttaaggaactacggaagaaaatttggacaggttgatccagaatgtaaagatagaaaatgagagtgacatgattcgtaactggagttaccttggtgttcccattgttccccaatctcaacaaggcaaaccgttaagaaaggatcggtctgcagaagaaacttttcagctctctcggtggacaccttttatcaaagatattatggaggatgctattgataatagattagattcaaaagaatggccatattgttcccagtgtccagcagtatggaatggttcaggagctgtaagtgctcgccagaaacccagagctaattatttagaagaccgaaaaaatgggtcaaagctgattgtttttgtaattggagggat

SEQ ID NO: 20980 - DNA, 412 bp, Homo sapiens
  misc_feature 1..412: note = ENST00000479472
  source 1..412: mol_type = unassigned DNA
aaaagaaatgaagttgatgtatgtcccaagttttgatgaaactgtatttgtaaaaaaaattttgtagtttaagtattgtcatacagtgttcaaaaccccagccaatgaccagcagttggtatgaagaacctttgacattttgtaaaaggccatttcttgggagttttttggtgtgtctgtttttttaaagtattcaagatactaccagtcaacatctttttggaagaaaatgccttgggtttagaagattttcttaaaaggggagtagatggttgtagattgactaaaaagtctaccatacttcaagggactacagctgcacccacctctggatcaaagaacttctaggacatcaagccaattatcttctgtaataccctacccctaatatagatacccccaactcacctca

SEQ ID NO: 20981 - DNA, 4915 bp, Homo sapiens
  misc_feature 1..4915: note = ENST00000359930
  source 1..4915: mol_type = unassigned DNA
cacttgagccgaagttaatttctcggggagttctcgggcgcgcacaggcagctcggtttgccctgcgattgagctgcgggtcgcggccggcgccggcctctccaatggcaaatgtgtgtggctggaggcgagcgcgaggctttcggcaaaggcagtcgagtgtttgcagaccggggcgagtcctgtgaaagcagataaaagaaaacatttattaacgtgtcattacgaggggagcgcccggccggggctgtcgcactccccgcggaacatttggctccctccagctccgagagaggagaagaagaaagcggaaaagaggcagattcacgtcgtttccagccaagtggacctgatcgatggccctcctgaatttatcacgatatttgatttattagcgatgccccctggtttgtgtgttacgcacacacacgtgcacacaaggctctggctcgcttccctccctcgtttccagctcctgggcgaatcccacatctgtttcaactctccgccgagggcgagcaggagcgagagtgtgtcgagtgagtgtgcgtctgtgtgtcccggcgagggtgcgcgctcggcgccgggagcgcggccagccgagtccggaggcatcgggaggtcgagagccgccgggaccccagctctgcgttcactgccccgtccggagctggacttcggggccggggccggggccgtgcgccggggacaggcagggccgggtcgcgggccgcgcgtcccccaggccggagatctgcgagtgaagagggacgagggaaaagaaacaaagccacagacgcaacttgagactcccgcatcccaaaagaagcaccagatcagcaaaaaaagaagatgggccccccgagcctcgtgctgtgcttgctgtccgcaactgtgttctccctgctgggtggaagctcggccttcctgtcgcaccaccgcctgaaaggcaggtttcagagggaccgcaggaacatccgccccaacatcatcctggtgctgacggacgaccaggatgtggagctgggttccatgcaggtgatgaacaagacccggcgcatcatggagcagggcggggcgcacttcatcaacgccttcgtgaccacacccatgtgctgcccctcacgctcctccatcctcactggcaagtacgtccacaaccacaacacctacaccaacaatgagaactgctcctcgccctcctggcaggcacagcacgagagccgcacctttgccgtgtacctcaatagcactggctaccggacagctttcttcgggaagtatcttaatgaatacaacggctcctacgtgccacccggctggaaggagtgggtcggactccttaaaaactcccgcttttataactacacgctgtgtcggaacggggtgaaagagaagcacggctccgactactccaaggattacctcacagacctcatcaccaatgacagcgtgagcttcttccgcacgtccaagaagatgtacccgcacaggccagtcctcatggtcatcagccatgcagccccccacggccctgaggattcagccccacaatattcacgcctcttcccaaacgcatctcagcacatcacgccgagctacaactacgcgcccaacccggacaaacactggatcatgcgctacacggggcccatgaagcccatccacatggaattcaccaacatgctccagcggaagcgcttgcagaccctcatgtcggtggacgactccatggagacgatttacaacatgctggttgagacgggcgagctggacaacacgtacatcgtatacaccgccgaccacggttaccacatcggccagtttggcctggtgaaagggaaatccatgccatatgagtttgacatcagggtcccgttctacgtgaggggccccaacgtggaagccggctgtctgaatccccacatcgtcctcaacattgacctggcccccaccatcctggacattgcaggcctggacatacctgcggatatggacgggaaatccatcctcaagctgctggacacggagcggccggtgaatcggtttcacttgaaaaagaagatgagggtctggcgggactccttcttggtggagagaggcaagctgctacacaagagagacaatgacaaggtggacgcccaggaggagaactttctgcccaagtaccagcgtgtgaaggacctgtgtcagcgtgctgagtaccagacggcgtgtgagcagctgggacagaagtggcagtgtgtggaggacgccacggggaagctgaagctgcataagtgcaagggccccatgcggctgggcggcagcagagccctctccaacctcgtgcccaagtactacgggcagggcagcgaggcctgcacctgtgacagcggggactacaagctcagcctggccggacgccggaaaaaactcttcaagaagaagtacaaggccagctatgtccgcagtcgctccatccgctcagtggccatcgaggtggacggcagggtgtaccacgtaggcctgggtgatgccgcccagccccgaaacctcaccaagcggcactggccaggggcccctgaggaccaagatgacaaggatggtggggacttcagtggcactggaggccttcccgactactcagccgccaaccccattaaagtgacacatcggtgctacatcctagagaacgacacagtccagtgtgacctggacctgtacaagtccctgcaggcctggaaagaccacaagctgcacatcgaccacgagattgaaaccctgcagaacaaaattaagaacctgagggaagtccgaggtcacctgaagaaaaagcggccagaagaatgtgactgtcacaaaatcagctaccacacccagcacaaaggccgcctcaagcacagaggctccagtctgcatcctttcaggaagggcctgcaagagaaggacaaggtgtggctgttgcgggagcagaagcgcaagaagaaactccgcaagctgctcaagcgcctgcagaacaacgacacgtgcagcatgccaggcctcacgtgcttcacccacgacaaccagcactggcagacggcgcctttctggacactggggcctttctgtgcctgcaccagcgccaacaataacacgtactggtgcatgaggaccatcaatgagactcacaatttcctcttctgtgaatttgcaactggcttcctagagtactttgatctcaacacagacccctaccagctgatgaatgcagtgaacacactggacagggatgtcctcaaccagctacacgtacagctcatggagctgaggagctgcaagggttacaagcagtgtaacccccggactcgaaacatggacctgggacttaaagatggaggaagctatgagcaatacaggcagtttcagcgtcgaaagtggccagaaatgaagagaccttcttccaaatcactgggacaactgtgggaaggctgggaaggttaagaaacaacagaggtggacctccaaaaacatagaggcatcacctgactgcacaggcaatgaaaaaccatgtgggtgatttccagcagacctgtggtattggccaggaggcctgagaaagcaagcacgcactctcagtcaacatgacagattctggaggataaccagcaggagcagagataacttcaggaagtccatttttgcccctgcttttgctttggattatacctcaccagctgcacaaaatgcattttttcgtatcaaaaagtcaccactaaccctcccccagaagctcacaaaggaaaacggagagagcgagcgagagagatttccttggaaatttctcccaagggcgaaagtcattggaatttttaaatcataggggaaaagcagtcctgttctaaatcctcttattcttttggtttgtcacaaagaaggaactaagaagcaggacagaggcaacgtggagaggctgaaaacagtgcagagacgtttgacaatgagtcagtagcacaaaagagatgacatttacctagcactataaaccctggttgcctctgaagaaactgccttcattgtatatatgtgactatttacatgtaatcaacatgggaacttttaggggaacctaataagaaatcccaattttcaggagtggtggtgtcaataaacgctctgtggccagtgtaaaagaaaatccctcgcagttgtggacatttctgttcctgtccagataccatttctcctagtatttctttgttatgtcccagaactgatgttttttttttaaggtactgaaaagaaatgaagttgatgtatgtcccaagttttgatgaaactgtatttgtaaaaaaaattttgtagtttaagtattgtcatacagtgttcaaaaccccagccaatgaccagcagttggtatgaagaacctttgacattttgtaaaaggccatttcttgggagttttttggtgtgtctgtttttttaaagtattcaagatactaccagtcaacatctttttggaagaaaatgccttgggtttagaagattttcttaaaaggggagtagatggttgtagattgactaaaaagtctaccatacttcaagggactacaggtaagtctcatagtataccagctttggtacttcattttttaaaaaagtattaatcaattgcaaagaaattcgccttggccaacccttctttgtgtatcaggtagtctaacctgatacaagtagttgacagatttcaactatcaatcaccagtccaacccatttctcatttaacagatgacggagataatccctaaaagcacccacatttgtttcaatgccccaaacaggccaaggctccctagcaactccctagtggcgttttttaacttctcagaaactgttaccattatttgaaataggcttccttaacctcctttacccttaacccaacagggattt

SEQ ID NO: 20982 - DNA, 1319 bp, Homo sapiens
  misc_feature 1..1319: note = ENST00000479970
  source 1..1319: mol_type = unassigned DNA
gacttaaagatggaggaagctatgagcaatacaggtatttcgttttattattaaagcctaaacaaagttctcctatcttggcccatccttcagtctcatctctgtgagtctgcacctgttatcttgagaaactgcccttccctctggtctgcccgagaccaggatcacccaccaaagataggtgtcacctaggagaccttctttgtatagttctttggggactttttctttcttggtgatggttaacattcattctcctttgacacttgaaaacttaggcagtttcagcgtcgaaagtggccagaaatgaagagaccttcttccaaatcactgggacaactgtgggaaggctgggaaggttaagaaacaacagaggtggacctccaaaaacatagaggcatcacctgactgcacaggcaatgaaaaaccatgtgggtgatttccagcagacctgtggtattggccaggaggcctgagaaagcaagcacgcactctcagtcaacatgacagattctggaggataaccagcaggagcagagataacttcaggaagtccatttttgcccctgcttttgctttggattatacctcaccagctgcacaaaatgcattttttcgtatcaaaaagtcaccactaaccctcccccagaagctcacaaaggaaaacggagagagcgagcgagagagatttccttggaaatttctcccaagggcgaaagtcattggaatttttaaatcataggggaaaagcagtcctgttctaaatcctcttattcttttggtttgtcacaaagaaggaactaagaagcaggacagaggcaacgtggagaggctgaaaacagtgcagagacgtttgacaatgagtcagtagcacaaaagagatgacatttacctagcactataaaccctggttgcctctgaagaaactgccttcattgtatatatgtgactatttacatgtaatcaacatgggaacttttaggggaacctaataagaaatcccaattttcaggagtggtggtgtcaataaacgctctgtggccagtgtaaaagaaaatccctcgcagttgtggacatttctgttcctgtccagataccatttctcctagtatttctttgttatgtcccagaactgatgttttttttttaaggtactgaaaagaaatgaagttgatgtatgtcccaagttttgatgaaactgtatttgtaaaaaaaattttgtagtttaagtattgtcatacagtgttcaaaaccccagccaatgaccagcagttggtatgaagaacctttgacattttgtaaaaggccatttcttggga

SEQ ID NO: 20983 - DNA, 4238 bp, Homo sapiens
  misc_feature 1..4238: note = ENST00000484875
  source 1..4238: mol_type = unassigned DNA
gggccatttctggacaacagctgctattttcacttgagccgaagttaatttctcggggagttctcgggcgcgcacaggcagctcggtttgccctgcgattgagctgcgggtcgcggccggcgccggcctctccaatggcaaatgtgtgtggctggaggcgagcgcgaggctttcggcaaaggcagtcgagtgtttgcagaccggggcgagtcctgtgaaagcagataaaagaaaacatttattaacgtgtcattacgaggggagcgcccggccggggctgtcgcactccccgcggaacatttggctccctccagctccgagagaggagaagaagaaagcggaaaagaggcagattcacgtcgtttccagccaagtggacctgatcgatggccctcctgaatttatcacgatatttgatttattagcgatgccccctggtttgtgtgttacgcacacacacgtgcacacaaggctctggctcgcttccctccctcgtttccagctcctgggcgaatcccacatctgtttcaactctccgccgagggcgagcaggagcgagagtgtgtcgaatctgcgagtgaagagggacgagggaaaagaaacaaagccacagacgcaacttgagactcccgcatcccaaaagaagcaccagatcagcaaaaaaagaagatgggccccccgagcctcgtgctgtgcttgctgtccgcaactgtgttctccctgctgggtggaagctcggccttcctgtcgcaccaccgcctgaaaggcaggtttcagagggaccgcaggaacatccgccccaacatcatcctggtgctgacggacgaccaggatgtggagctgggttccatgcaggtgatgaacaagacccggcgcatcatggagcagggcggggcgcacttcatcaacgccttcgtgaccacacccatgtgctgcccctcacgctcctccatcctcactggcaagtacgtccacaaccacaacacctacaccaacaatgagaactgctcctcgccctcctggcaggcacagcacgagagccgcacctttgccgtgtacctcaatagcactggctaccggacagctttcttcgggaagtatcttaatgaatacaacggctcctacgtgccacccggctggaaggagtgggtcggactccttaaaaactcccgcttttataactacacgctgtgtcggaacggggtgaaagagaagcacggctccgactactccaaggattacctcacagacctcatcaccaatgacagcgtgagcttcttccgcacgtccaagaagatgtacccgcacaggccagtcctcatggtcatcagccatgcagccccccacggccctgaggattcagccccacaatattcacgcctcttcccaaacgcatctcagcacatcacgccgagctacaactacgcgcccaacccggacaaacactggatcatgcgctacacggggcccatgaagcccatccacatggaattcaccaacatgctccagcggaagcgcttgcagaccctcatgtcggtggacgactccatggagacgatttacaacatgctggttgagacgggcgagctggacaacacgtacatcgtatacaccgccgaccacggttaccacatcggccagtttggcctggtgaaagggaaatccatgccatatgagtttgacatcagggtcccgttctacgtgaggggccccaacgtggaagccggctgtctgaatccccacatcgtcctcaacattgacctggcccccaccatcctggacattgcaggcctggacatacctgcggatatggacgggaaatccatcctcaagctgctggacacggagcggccggtgaatcggtttcacttgaaaaagaagatgagggtctggcgggactccttcttggtggagagaggcaagctgctacacaagagagacaatgacaaggtggacgcccaggaggagaactttctgcccaagtaccagcgtgtgaaggacctgtgtcagcgtgctgagtaccagacggcgtgtgagcagctgggacagaagtggcagtgtgtggaggacgccacggggaagctgaagctgcataagtgcaagggccccatgcggctgggcggcagcagagccctctccaacctcgtgcccaagtactacgggcagggcagcgaggcctgcacctgtgacagcggggactacaagctcagcctggccggacgccggaaaaaactcttcaagaagaagtacaaggccagctatgtccgcagtcgctccatccgctcagtggccatcgaggtggacggcagggtgtaccacgtaggcctgggtgatgccgcccagccccgaaacctcaccaagcggcactggccaggggcccctgaggaccaagatgacaaggatggtggggacttcagtggcactggaggccttcccgactactcagccgccaaccccattaaagtgacacatcggtgctacatcctagagaacgacacagtccagtgtgacctggacctgtacaagtccctgcaggcctggaaagaccacaagctgcacatcgaccacgagattgaaaccctgcagaacaaaattaagaacctgagggaagtccgaggtcacctgaagaaaaagcggccagaagaatgtgactgtcacaaaatcagctaccacacccagcacaaaggccgcctcaagcacagaggctccagtctgcatcctttcaggaagggcctgcaagagaaggacaaggtgtggctgttgcgggagcagaagcgcaagaagaaactccgcaagctgctcaagcgcctgcagaacaacgacacgtgcagcatgccaggcctcacgtgcttcacccacgacaaccagcactggcagacggcgcctttctggacactggggcctttctgtgcctgcaccagcgccaacaataacacgtactggtgcatgaggaccatcaatgagactcacaatttcctcttctgtgaatttgcaactggcttcctagagtactttgatctcaacacagacccctaccagctgatgaatgcagtgaacacactggacagggatgtcctcaaccagctacacgtacagctcatggagctgaggagctgcaagggttacaagcagtgtaacccccggactcgaaacatggacctgggacttaaagatggaggaagctatgagcaatacaggcagtttcagcgtcgaaagtggccagaaatgaagagaccttcttccaaatcactgggacaactgtgggaaggctgggaaggttaagaaacaacagaggtggacctccaaaaacatagaggcatcacctgactgcacaggcaatgaaaaaccatgtgggtgatttccagcagacctgtggtattggccaggaggcctgagaaagcaagcacgcactctcagtcaacatgacagattctggaggataaccagcaggagcagagataacttcaggaagtccatttttgcccctgcttttgctttggattatacctcaccagctgcacaaaatgcattttttcgtatcaaaaagtcaccactaaccctcccccagaagctcacaaaggaaaacggagagagcgagcgagagagatttccttggaaatttctcccaagggcgaaagtcattggaatttttaaatcataggggaaaagcagtcctgttctaaatcctcttattcttttggtttgtcacaaagaaggaactaagaagcaggacagaggcaacgtggagaggctgaaaacagtgcagagacgtttgacaatgagtcagtagcacaaaagagatgacatttacctagcactataaaccctggttgcctctgaagaaactgccttcattgtatatatgtgactatttacatgtaatcaacatgggaacttttaggggaacctaataagaaatcccaattttcaggagtggtggtgtcaataaacgctctgtggccagtgtaaaagaaaatccctcgcagttgtggacatttctgttcctgtccagataccatttctcctagtatttctttgttatgtcccagaactgatgttttttttttaaggtactgaaaagaaatgaagttgatgtatgtcccaagttttgatgaaactgtatttgtaaaaaaaattttgtagtttaagtattgtcatacagtgttcaaaaccccagccaatgaccagcagttggtatgaagaacctttgacattttgtaaaaggccatttcttggga

SEQ ID NO: 20984 - DNA, 1550 bp, Homo sapiens
  misc_feature 1..1550: note = ENST00000495544
  source 1..1550: mol_type = unassigned DNA
gggaagtccgaggtcacctgaagaaaaagcggccagaagaatgtgactgtcacaaaatcagctaccacacccagcacaaaggccgcctcaagcacagaggctccagtctgcatcctttcaggaagggcctgcaagagaaggacaaggtgtggctgttgcgggagcagaagcgcaagaagaaactccgcaagctgctcaagcgcctgcagaacaacgacacgtgcagcatgccaggcctcacgtgcttcacccacgacaaccagcactggcagacggcgcctttctggacactggggcctttctgtgcctgcaccagcgccaacaataacacgtactggtgcatgaggaccatcaatgagactcacaatttcctcttctgtgaatttgcaactggcttcctagagtactttgatctcaacacagacccctaccagctgatgaatgcagtgaacacactggacagggatgtcctcaaccagctacacgtacagctcatggagctgaggagctgcaagggttacaagcagtgtaacccccggactcgaaacatggacctgggacttaaagatggaggaagctatgagcaatacaggggacaactgtgggaaggctgggaaggttaagaaacaacagaggtggacctccaaaaacatagaggcatcacctgactgcacaggcaatgaaaaaccatgtgggtgatttccagcagacctgtggtattggccaggaggcctgagaaagcaagcacgcactctcagtcaacatgacagattctggaggataaccagcaggagcagagataacttcaggaagtccatttttgcccctgcttttgctttggattatacctcaccagctgcacaaaatgcattttttcgtatcaaaaagtcaccactaaccctcccccagaagctcacaaaggaaaacggagagagcgagcgagagagatttccttggaaatttctcccaagggcgaaagtcattggaatttttaaatcataggggaaaagcagtcctgttctaaatcctcttattcttttggtttgtcacaaagaaggaactaagaagcaggacagaggcaacgtggagaggctgaaaacagtgcagagacgtttgacaatgagtcagtagcacaaaagagatgacatttacctagcactataaaccctggttgcctctgaagaaactgccttcattgtatatatgtgactatttacatgtaatcaacatgggaacttttaggggaacctaataagaaatcccaattttcaggagtggtggtgtcaataaacgctctgtggccagtgtaaaagaaaatccctcgcagttgtggacatttctgttcctgtccagataccatttctcctagtatttctttgttatgtcccagaactgatgttttttttttaaggtactgaaaagaaatgaagttgatgtatgtcccaagttttgatgaaactgtatttgtaaaaaaaattttgtagtttaagtattgtcatacagtgttcaaaaccccagccaatgaccagcagttggtatgaagaaccttt

SEQ ID NO: 20985 - DNA, 3905 bp, Homo sapiens
  misc_feature 1..3905: note = ENST00000467815
  source 1..3905: mol_type = unassigned DNA
ctcgggcgcgcacaggcagctcggtttgccctgcgattgagctgcgggtcgcggccggcgccggcctctccaatggcaaatgtgtgtggctggaggcgagcgcgaggctttcggcaaaggcagtcgagtgtttgcagaccggggcgagtcctgtgaaagcagataaaagaaaacatttattaacgtgtcattacgaggggagcgcccggccggggctgtcgcactccccgcggaacatttggctccctccagctccgagagaggagaagaagaaagcggaaaagaggcagattcacgtcgtttccagccaagtggacctgatcgatggccctcctgaatttatcacgatatttgatttattagcgatgccccctggtttgtgtgttacgcacacacacgtgcacacaaggctctggctcgcttccctccctcgtttccagctcctgggcgaatcccacatctgtttcaactctccgccgagggcgagcaggagcgagagtgtgtcgaatctgcgagtgaagagggacgagggaaaagaaacaaagccacagacgcaacttgagactcccgcatcccaaaagaagcaccagatcagcaaaaaaagaagatgggccccccgagcctcgtgctgtgcttgctgtccgcaactgtgttctccctgctgggtggaagctcggccttcctgtcgcaccaccgcctgaaaggcaggtttcagagggaccgcaggaacatccgccccaacatcatcctggtgctgacggacgaccaggatgtggagctgggttccatgcaggtgatgaacaagacccggcgcatcatggagcagggcggggcgcacttcatcaacgccttcgtgaccacacccatgtgctgcccctcacgctcctccatcctcactggcaagtacgtccacaaccacaacacctacaccaacaatgagaactgctcctcgccctcctggcaggcacagcacgagagccgcacctttgccgtgtacctcaatagcactggctaccggacagctttcttcgggaagtatcttaatgaatacaacggctcctacgtgccacccggctggaaggagtgggtcggactccttaaaaactcccgcttttataactacacgctgtgtcggaacggggtgaaagagaagcacggctccgactactccaaggattacctcacagacctcatcaccaatgacagcgtgagcttcttccgcacgtccaagaagatgtacccgcacaggccagtcctcatggtcatcagccatgcagccccccacggccctgaggattcagccccacaatattcacgcctcttcccaaacgcatctcagcacatcacgccgagctacaactacgcgcccaacccggacaaacactggatcatgcgctacacggggcccatgaagcccatccacatggaattcaccaacatgctccagcggaagcgcttgcagaccctcatgtcggtggacgactccatggagacgatttacaacatgctggttgagacgggcgagctggacaacacgtacatcgtatacaccgccgaccacggttaccacatcggccagtttggcctggtgaaagggaaatccatgccatatgagtttgacatcagggtcccgttctacgtgaggggccccaacgtggaagccggctgtctgaatccccacatcgtcctcaacattgacctggcccccaccatcctggacattgcaggcctggacatacctgcggatatggacgggaaatccatcctcaagctgctggacacggagcggccggtgaatcggtttcacttgaaaaagaagatgagggtctggcgggactccttcttggtggagagaggcaagctgctacacaagagagacaatgacaaggtggacgcccaggaggagaactttctgcccaagtaccagcgtgtgaaggacctgtgtcagcgtgctgagtaccagacggcgtgtgagcagctgggacagaagtggcagtgtgtggaggacgccacggggaagctgaagctgcataagtgcaagggccccatgcggctgggcggcagcagagccctctccaacctcgtgcccaagtactacgggcagggcagcgaggcctgcacctgtgacagcggggactacaagctcagcctggccggacgccggaaaaaactcttcaagaagaagtacaaggccagctatgtccgcagtcgctccatccgctcagtggccatcgaggtggacggcagggtgtaccacgtaggcctgggtgatgccgcccagccccgaaacctcaccaagcggcactggccaggggcccctgaggaccaagatgacaaggatggtggggacttcagtggcactggaggccttcccgactactcagccgccaaccccattaaagtgacacatcggtgctacatcctagagaacgacacagtccagtgtgacctggacctgtacaagtccctgcaggcctggaaagaccacaagctgcacatcgaccacgagattgaaaccctgcagaacaaaattaagaacctgagggaagtccgaggtcacctgaagaaaaagcggccagaagaatgtgactgtcacaaaatcagctaccacacccagcacaaaggccgcctcaagcacagaggctccagtctgcatcctttcaggaagggcctgcaagagaaggacaaggtgtggctgttgcgggagcagaagcgcaagaagaaactccgcaagctgctcaagcgcctgcagaacaacgacacgtgcagcatgccaggcctcacgtgcttcacccacgacaaccagcactggcagacggcgcctttctggacactggggcctttctgtgcctgcaccagcgccaacaataacacgtactggtgcatgaggaccatcaatgagactcacaatttcctcttctgtgaatttgcaactggcttcctagagtactttgatctcaacacagacccctaccagctgatgaatgcagtgaacacactggacagggatgtcctcaaccagctacacgtacagctcatggagctgaggagctgcaagggttacaagcagtgtaacccccggactcgaaacatggacctggatggaggaagctatgagcaatacaggcagtttcagcgtcgaaagtggccagaaatgaagagaccttcttccaaatcactgggacaactgtgggaaggctgggaaggttaagaaacaacagaggtggacctccaaaaacatagaggcatcacctgactgcacaggcaatgaaaaaccatgtgggtgatttccagcagacctgtggtattggccaggaggcctgagaaagcaagcacgcactctcagtcaacatgacagattctggaggataaccagcaggagcagagataacttcaggaagtccatttttgcccctgcttttgctttggattatacctcaccagctgcacaaaatgcattttttcgtatcaaaaagtcaccactaaccctcccccagaagctcacaaaggaaaacggagagagcgagcgagagagatttccttggaaatttctcccaagggcgaaagtcattggaatttttaaatcataggggaaaagcagtcctgttctaaatcctcttattcttttggtttgtcacaaagaaggaactaagaagcaggacagaggcaacgtggagaggctgaaaacagtgcagagacgtttgacaatgagtcagtagcacaaaagagatgacatttacctagcactataaaccctggttgcctctgaagaaactgccttcattgtatatatgtgactatttacatgtaatcaacatgggaacttttaggggaacctaataagaaatcccaattttcaggagtggtggtgtcaataaacgctctgtggccagtgtaaaagaaaa

SEQ ID NO: 20986 - DNA, 552 bp, Homo sapiens
  misc_feature 1..552: note = ENST00000433632
  source 1..552: mol_type = unassigned DNA
agctgctcaagcgcctgcagaacaacgacacgtgcagcatgccaggcctcacgtgcttcacccacgacaaccagcactggcagacggcgcctttctggacactggggcctttctgtgcctgcaccagcgccaacaataacacgtactggtgcatgaggaccatcaatgagactcacaatttcctcttctgtgaatttgcaactggcttcctagagtactttgatctcaacacagacccctaccagctgatgaatgcagtgaacacactggacagggatgtcctcaaccagctacacgtacagctcatggagctgaggagctgcaagggttacaagcagtgtaacccccggactcgaaacatggacctgggcagatgacctttaacaagctgtgattcctgagagaggaacacctgcaccaactgcccaggaaacacacggaattccgtctcatttcattgtcctcccttttgtccactcatgcattcaacaaacacttcctgagaacttacacctgaaaccatgttgactaaagatgaccccatcctcgctg

SEQ ID NO: 20987 - DNA, 398 bp, Homo sapiens
  misc_feature 1..398: note = ENST00000465769
  source 1..398: mol_type = unassigned DNA
cacacatgcctccggggctcctccagagctgagaggccggccccgcggctcctgctctctgccccatagcaagctgctacacaagagagacaatgacaaggtggacgcccaggaggagaactttctgcccaagtaccagcgtgtgaaggacctgtgtcagcgtgctgagtaccagacggcgtgtgagcagctgggacagaagtggcagtgtgtggaggacgccacggggaagctgaagctgcataagtgcaagggccccatgcggctgggcggcagcagagccctctccaacctcgtgcccaagtactacgggcagggcagcgaggcctgcacctgtgacagcggggactacaagctcagcctggccggacgccggaaaaaactcttcaagaagagta

SEQ ID NO: 20988 - DNA, 363 bp, Homo sapiens
  misc_feature 1..363: note = ENST00000474450
  source 1..363: mol_type = unassigned DNA
gtccgcaactgtgttctccctgctgggtggaagctcggccttcctgtcgcaccaccgcctgaaaggcaggtttcagagggaccgcaggaacatccgccccaacatcatcctggtgctgacggacgaccaggatgtggagctggctttcttcgggaagtatcttaatgaatacaacggctcctacgtgccacccggctggaaggagtgggtcggactccttaaaaactcccgcttttataactacacgctgtgtcggaacggggtgaaagagaagcacggctccgactactccaagcacgccgagctacaactacgcgcccaacccggacaaacactggatcatgcgctacacggggcccatga

SEQ ID NO: 20989 - DNA, 1635 bp, Homo sapiens
  misc_feature 1..1635: note = ENST00000463221
  source 1..1635: mol_type = unassigned DNA
gtgtcgagtgagtgtgcgtctgtgtgtcccggcgagggtgcgcgctcggcgccgggagcgcggccagccgagtccggaggcatcgggaggtcgagagccgccgggaccccagctctgcgttcactgccccgtccggagctggacttcggggccggggccggggccgtgcgccggggacaggcagggccgggtcgcgggccgcgcgtcccccaggccggagatctgcgagtgaagagggacgagggaaaagaaacaaagccacagacgcaacttgagactcccgcatcccaaaagaagcaccagatcagcaaaaaaagaagatgggccccccgagcctcgtgctgtgcttgctgtccgcaactgtgttctccctgctgggtggaagctcggccttcctgtcgcaccaccgcctgaaaggcaggtttcagagggaccgcaggaacatccgccccaacatcatcctggtgctgacggacgaccaggatgtggagctgggttccatgcaggtgatgaacaagacccggcgcatcatggagcagggcggggcgcacttcatcaacgccttcgtgaccacacccatgtgctgcccctcacgctcctccatcctcactggcaagtacgtccacaaccacaacacctacaccaacaatgagaactgctcctcgccctcctggcaggcacagcacgagagccgcacctttgccgtgtacctcaatagcactggctaccggacagctttcttcgggaagtatcttaatgaatacaacggctcctacgtgccacccggctggaaggagtgggtcggactccttaaaaactcccgcttttataactacacgctgtgtcggaacggggtgaaagagaagcacggctccgactactccaaggattacctcacagacctcatcaccaatgacagcgtgagcttcttccgcacgtccaagaagatgtacccgcacaggccagtcctcatggtcatcagccatgcagccccccacggccctgaggattcagccccacaatattcacgcctcttcccaaacgcatctcagcacatgtaagcctcagcactctgcctgccagaggcactgcttagcatgaagggggagggtcaggctttagcaacagtactgtcaccaccatgacttcactgtgcctcctctctaatcctcctggtttaaagaccccaagaacatactgcttgtccatggtgaaactgggatgcaactccagacagcctgggcaacagaccaaggcaggagaatttttaacttgggatacacggcctcccaccaagaggtgtgtggatggaactgcatagaataggtttccttttaatgccatgtgtattttatttaagacatctaaaaacattcttttgaggagggggtctatagttttaccagactaattatttgccaccatttattgagctgtgggctatgtagcaggtgctgtgctaagcccttggcattattgtccagtccctgaatattcacagtgacccttggtgtaccagttatctattgccatgtaacaaatcatcccagaatctagcaacttaaaacaacaaacacaaattatctcacggtgtctgtgagtcaggaatctgggagtggctgttctgagcttctg

SEQ ID NO: 20990 - DNA, 814 bp, Homo sapiens
  misc_feature 1..814: note = ENST00000437955
  source 1..814: mol_type = unassigned DNA
ggggatgcagcagcggcagcggcggcggcggcggcggcagcggcagcggcggcgcggagtcccctgcgcccagcggcccggccgggctgcggcagaggcggcggcggcgccccgctccgggtgaggttgccggggccgtgcgcgctgatctgcgagtgaagagggacgagggaaaagaaacaaagccacagacgcaacttgagactcccgcatcccaaaagaagcaccagatcagcaaaaaaagaagatgggccccccgagcctcgtgctgtgcttgctgtccgcaactgtgttctccctgctgggtggaagctcggccttcctgtcgcaccaccgcctgaaaggcaggtttcagagggaccgcaggaacatccgccccaacatcatcctggtgctgacggacgaccaggatgtggagctgggttccatgcaggtgatgaacaagacccggcgcatcatggagcagggcggggcgcacttcatcaacgccttcgtgaccacacccatgtgctgcccctcacgctcctccatcctcactggcaagtacgtccacaaccacaacacctacaccaacaatgagaactgctcctcgccctcctggcaggcacagcacgagagccgcacctttgccgtgtacctcaatagcactggctaccggacagctttcttcgggaagtatcttaatgaatacaacggctcctacgtgccacccggctggaaggagtgggtcggactccttaaaaactcccgcttttataactacacgctgtgtcggaacggggtgaaagagaagcacggctccgactactccaag

SEQ ID NO: 20991 - DNA, 632 bp, Homo sapiens
  misc_feature 1..632: note = ENST00000478766
  source 1..632: mol_type = unassigned DNA
ggttccatgcaggtgatgaacaagacccggcgcatcatggagcagggcggggcgcacttcatcaacgccttcgtgaccacacccatgtgctgcccctcacgctcctccatcctcactggcaagtacgtccacaaccacaacacctacaccaacaatgagaactgctcctcgccctcctggcaggcacagcacgagagccgcacctttgccgtgtacctcaatagcactggctaccggacaggtcctgagccgattaagaaatcagacccaagagtcagctgatgaaagtcaacactgcactctgatgaatctggtgaaggctgggtttgagggcatggcttccttctgagagcatttgggcttcctgactaaactccagagtgtgacagacttcccactgatgcaggtccacacctctcctccccgcgcagacaggacaagcctcctgaaaactagccctccccgggggcagctcagtccccagaggaaaagcaagggaagggattgggctatgcatgcccacttcggcccttcaaatccactaggcacatgctaggggtcagcaaaccacagccaatggacctaaccaggccctccatttgttttagtaaataaagttttattggaacata

SEQ ID NO: 20992 - DNA, 842 bp, Homo sapiens
  misc_feature 1..842: note = ENST00000371964
  source 1..842: mol_type = unassigned DNA
gcgagcggcttccgccgggctgctccgcgggcgcgtcggccatgagcgagttgccgggcgacgtgcgggcgtttctgcgggagcacccgagcctgcggctccagacggacgcccgcaaggtgaggtgcatcctgacaggtcacgagctgccctgccgcctgccggagctccaggtctacacccgcggcaaaaagtaccagcggctggtccgcgcctccccggccttcgactatgcagagttcgagccgcacatcgtgcccagcaccaagaacccgcaccagttgttctgcaaactcaccctgcggcacatcaacaagtgcccagaacacgtgctgaggcacacccagggccggcggtaccagcgagctctgtgtaaatatgaagaatgtcagaagcaaggggtggagtacgtgcctgcctgcctggtgcaccggaggaggaggagggaggaccagatggacggtgacgggcctcgcccgcgggaagccttctgggagcccacatccagtgatgaggggggagctgcaagtgatgacagcatgacagacctgtacccacctgagctattcaccagaaaggaccttggaagcacggaggatggggatggcactgatgactttttgacagacaaagaggatgagaaggcaaagcccccaagagagaaggccactgatgagggcaggagagagacgaccgtgtaccgagggctggtccagaagcgcgggaagaagcagttgggctcgttgaaaaagaagttcaagagtcatcaccgcaaacccaagagcttcagctcctgtaaacagccaggttaataaaagcacatgccgtgaagtttcgagaaa

SEQ ID NO: 20993 - DNA, 676 bp, Homo sapiens
  misc_feature 1..676: note = ENST00000495524
  source 1..676: mol_type = unassigned DNA
gcgggcgcgtcggccatgagcgagttgccgggcgacgtgcgggcgtttctgcgggagcacccgagcctgcggctccagacggacgcccgcaaggtgaggtgcatcctgacaggtcacgagctgccctgccgcctgccggagctccaggtctacacccgcggcaaaaagtaccagcggctggtccgcgcctccccggccttcgactatgcagagttcgagccgcacatcgtgcccagcaccaagaacccgtaggtggtccgcggcggcgcggggaggcccagggcaattaggacagcccctccgctggactccgccagtgctgcagcccctactctttcagagttgggagccctgggacccaggtgggcgcccgggtgctggaatcacctgcggtcccagcggcgaggcctcttggcaccagttgttctgcaaactcaccctgcggcacatcaacaagtgcccagaacacgtgctgaggcacacccagggccggcggtaccagcgagctctgtgtaaatatgaagaatgtcagaagcaaggggtggagtacgtgcctgcctgcctggtgcaccggaggaggaggagggaggaccagatggacggtgacgggcctcgcccgcgggaagccttctgggagcccacatccagtgatgaggggggagctgcaagtgatgac

SEQ ID NO: 20994 - DNA, 314 bp, Homo sapiens
  misc_feature 1..314: note = ENST00000486887
  source 1..314: mol_type = unassigned DNA
cgtgcccagcaccaagaacccgtaggtggtccgcggcggcgcggggaggcccagggcaattaggacagcccctccgctggactccgccagtgctgcagcccctactctttcagagttgggagccctgggacccaggcaccagttgttctgcaaactcaccctgcggcacatcaacaagtgcccagaacacgtgctgaggcacacccagggccggcggtaccagcgagctctgtgtaaatatgaagaatgtcagaagcaaggggtggagtacgtgcctgcctgcctggtgcaccggaggaggaggagggaggacc

SEQ ID NO: 20995 - DNA, 842 bp, Homo sapiens; identical to SEQ ID NO: 20992
  misc_feature 1..842: note = ENST00000630633
  source 1..842: mol_type = unassigned DNA

SEQ ID NO: 20996 - DNA, 676 bp, Homo sapiens; identical to SEQ ID NO: 20993
  misc_feature 1..676: note = ENST00000627396
  source 1..676: mol_type = unassigned DNA

SEQ ID NO: 20997 - DNA, 314 bp, Homo sapiens; identical to SEQ ID NO: 20994
  misc_feature 1..314: note = ENST00000626704
  source 1..314: mol_type = unassigned DNA

SEQ ID NO: 20998 - DNA, 5008 bp, Homo sapiens
  misc_feature 1..5008: note = ENST00000309558
  source 1..5008: mol_type = unassigned DNA
gccaagggtcccccagacgggcgggggctccttgcggccggctagctactctccccgcctccctgcgccctcgccctccgccccgctgtacccgcagagcgcgcggcccagcgcagccccttttggcaccgaggtttccaggtgcccagcgcgaaggcggagccgggttacagccgcctcctcggcgccacagagaagacccccgggagttcggcggcccaggcgctccggctctgcgtcccgagcctcccccggctctccgcgctcctccctctcggcgcgcccggcgcgaagcctgcgattcgtgagccgagcgcagagcgcagagccgagtggcgcacgctgggcagtggcctgggcaaccccaaacgcagccagagccctcacccgagtccgctggcccgcgcactcccggaccatgactgccgagggacccagcccgcctgcccgttggcacagacgcctccccgggctctgggcggcggcgctgctcctgctcggtctgccgcgcctttcggtgcgggcggatggaaagttctttgtgctggagtctcagaatggctctcagggcctacaactggaggctgctcggctttcctgcaagagcaggggcgctcacctggcatctgcagacgagctgcggagagtggtacaggattgctcctttgcggtgtgcaccactggctggctagcagatggtactcttggaacaactgtgtgtagcaaaggaagtggagaacagcaaatcatgagagctgtcgatgtgagaattgagagcaacccagttcctggtggcacatacagtgccctttgtattaaggatgaagagaagccgtgtggagacccgccttcgttcccacacaccatcctgcagggccgcaccggcttggaaatgggggatgaactgctgtacgtgtgtgccccaggccacatcatgggccaccgggagaccgccttcaccttgctatgtaacagctgtggggagtggtacggcctggtgcaggcctgtgggaaagatgaggctgaggcacacattgactatgaagataacttccctgatgacagatctgtgtcattcagagagctcatggaggattcccggacagaggcagatgaggacaggggtcagggagactcctctgaggaggctccaaaacaggaccgtctggtctccatttctgtggggagagaaaacatagcccgggataaagtctttgtgccaaccacaggcttgcctggtgctgggagcagtgtccccgcagattcaccaggatcacggctgctccagaagcacttgttctggtttcctgctgaggctttccacaagcctgggttggaaaaggaggtggatgatgacaccaaaaagcagttttctgctggagacaaccacagtggtgtaaaattggtcccaggtgaacctgaaaccaaggtgatctacggcaacactgatggtccctcggggccatttgtgggcaagaatgacagcaaggcaggagatccagtggtgagcagcagtgatgagtcctggttagatggctaccctgtgacagagggggcttggaggaagacagaggcagaagaggaagaagatggggacagaggggatgggtcagtagggctggatgaaaacgtcctagttactcctgatcagcccattcttgtggaagttaagaagcccaagagtagcaccctcacaccaagcgagggcatgacccatagttcagttcttccatctcaaatgctagatgtggaagctttggcgctcagacccgtgaatgcttccgagactgagggcattggggatggtgacttgacgaagtaccagtcaactctaccctggagattcatcacagaggaatctcccatggccaccctgtcctatgagctcaccagctccaccctggagatattaacagtgaacactgtcaagcagacacctaaccacatcccctcaacgatcatggcaaccacccagcctccagtagaaaccactgttcctgagatccaggatagcttcccatacctgctgtctgaagacttctttggacaggaaggccccgggccaggtgcaagtgaggagcttcatcccaccttggagtcgtgtgtgggggacggatgtcctggcctcagcagaggccctgtgatcgccaccattgtcaccgtcctgtgcctactgctgctcctggcaggtgtggggatggtgtggggctaccgcaagtgccagcacaagagctctgtgtacaagctgaatgttggccagcggcaggctcggcactaccaccagcagatcgagatggagaaggtctaggcacctttggagtgggttctcccaaagccacttgggaggaaaataactgtgacacatcacacgataattcactagagcatgacgcaggtggactgaggctcatcattttttcctcagccctttgttttataggctgagaagtgtctctggagcacctgggagggcagggaggctttggtgacatcatcactcatgtcaatgtctcctccaccatctgccctggaattgactacactaatcccagacctgtgcttgggccctgtttccagtgtgaggtcaaaaatcgcctcttccttcatcacagtattatctttttttttttgagacagagtctcatgctgttgcccaggctggagtgcagtgtcccgatctgagctcactgcaacctctgcctcccaagttcaagcaattctcctgcctcagcctcccaagtaggtgggattacaggcatgcaccaccatgcccagctaatttttttatatttttagtagagatggagtttcaccatgttggccaggctggtcaagaactcctgacctcaagtgatctgccctccttagcctcccaaagtgctaggattccaggtgtgagccacatcacagtattacctttttgaagaaagaaaatcaccagcttcatgccctgaaattttataaatagtcatgataaaccaagtgtatgagagcagtattatctaggacatggatattgaattattgggagaggaatatggaagaataatgggttgtttccttttaatgttgtgatgttgctgagggcagatgaaccaagagccaggacacagtctagaagctttgaggtttcttttttcattgtttcttgaaattagaatttaagactgacattttgttgggggagttgaggagtgaagaaacacacatccccctctgttccctccattctgtgggacagtctgtcatttattttattttattttcaatatttcatggttaaggatttgccattattttttaaaaacaaagttagctttgtaccagtaagtaccatttcctctcagaagcagtggcctagttgtccttgaccagtctgtgcctaggaatgtcttggaatttttgccaggactaacaaaactcagtccttggtttcctctctcaggattaaccatttctctgaactccagtaagagagaatgacacgggagaaaaaaaaaagaaatgttttcagagggccgaacaccaggttatcaagtatgggcacatacttgatggagaagcagaagaatctgtgaaagaatatgaaatgatctgtgctgatctgttctctagtgtggaaactgggagctctgtggaaacagaatccatcctgtctgttgggtaacccatttcgtagcatctaaatcatcttagggtggctcagcgaggatggtttatggcagtggttctcaaagtgtggtcctcagaccagtagcatcagcgtcacctgggaatttgttggagatgcaaattctctagtcccaccctggactcaggaaacaggaaccctgggagtagggcccagttctgtttttaacaagccctccaggtgattttgatatgcactcaagtttgagagcctgttggtttataataatctcaaatgtgaacttcgaggccagctgaagccctaaaggcacagatgagtatgtggtgtgtgttgtgtggaagtcaggcatggctgtgtgcagctgaggtggcatttgaagctgcctaaatgccacctgcaatagtctcctgtatgttggcacagaaatgaaacatgttatatttttctaatatgaatcaccttcttagaaatagttatcagtggtaaaaagtgatgaatgcaacacatttattttgagacaccatagcagtctaagtgtttttgtgtggtagagggaaatcctgatcttttttatgattgaaaaattgttggtggtgttttacctaaggaaaaaaaacattcgcaacatgttttctaccctgccacctcttttcagcaagctttggaaaagtaataggcgaagtagctgtaaagagaggcagcataatcaaagatcttattccccatagttgggtaaaataaagcctgaaggtaccaactagaatacctgtgcatcagacgaagtcaagaacaataggaataaaatgctttctgcatgtagccaaagcaaaacataatagaataaaagccagagactgtatatatttataaattagatcctaatctactgcaagataacttttctatttttaactatataaaataacctctgtctcagcattgggactgtgttagcaactattattgtggaataacccagaacattggatttataccaacaaataggcaatattaatacagtgtattaataaatttattacaaattattaatacagtgtattaataaatttattacaaattattaatacaggtaaatgttttatttgtagacatggactgtgaaataaacccaacacatcagtttttaagttcttattggtgtggtatcctctaaattaatgttatagaatctaaaaattcatgttgaaagggaatgattaaaacaatgtaaatctaaattgtatgtcatgcatgttttgagaatggtgaatgtttaatgctcatgaaaattgggggagggggttctattaacacaaagcttctgagatatttaaaataaataattattgccccaac

SEQ ID NO: 20999 - DNA, 729 bp, Homo sapiens
  misc_feature 1..729: note = ENST00000412539
  source 1..729: mol_type = unassigned DNA
ctgccgagggacccagcccgcctgcccgttggcacagacgcctccccgggctctgggcggcggcgctgctcctgctcggtctgccgcgcctttcggtgcgggcggatggaaagttctttgtgctggagtctcagaatggctctcagggcctacaactggaggctgctcggctttcctgcaagagcaggggcgctcacctggcatctgcagacgagctgcggagagtggtacaggattgctcctttgcggtgtgcaccactggctggctagcagatggtactcttggaacaactgtgtgtagcaaaggaagtggagaacagcaaatcatgagagctgtcgatgtgagaattgagagcaacccagttcctggtggcacatacagtgccctttgtattaaggatgaagatgaggctgaggcacacattgactatgaagataacttccctgatgacagatctgtgtcattcagagagctcatggaggattcccggacagaggcagatgaggacaggggtcagggagactcctctgaggaggctccaaaacaggaccgtctggtctccatttctgtggggagagaaaacatagcccgggataaagtctttgtgccaaccacaggcttgcctggtgctgggagcagtgtccccgcagattcaccaggatcacggctgctccagaagcacttgttctggtttcctgctgaggctttccacaagcctgggttggaaa

SEQ ID NO: 21000 - DNA, 5388 bp, Homo sapiens
  misc_feature 1..5388: note = ENST00000342745
  source 1..5388: mol_type = unassigned DNA
agtgacgcgggcgctgcagccgtcgctaccgccgcgttctattctccgaagccggcgaccgccccacctcctccctccctcccgcccgcttcctctgcccacagcgccggccagagcgagctagacaagggcacgcggggcctcgcctagacccgagaagactgcgggcgcgcgcaagcggcggcgtggaagctgtgagcgcccccatcccggaggtctccgccggctcccgggtgaatcagctcccggccgactttaggattcttctggattttaaattttttctttttaaaaaaacttggacggataaaagatgtgccatggcaggatagcaccaaagagcacctcagtgtttgccgtggcctccgtgggacatggagtgttccttccgctagtgatcctttgcaccctgcttggagacggacttgcttccgtgtgccccctaccaccggagccagagaatggtggctacatctgccacccccggccctgcagagaccccctgacagcaggcagtgtcatcgaatacctgtgtgctgaaggctacatgttgaagggcgattacaaatacctgacgtgtaagaatggcgagtggaaaccagccatggagattagctgccgtctcaacgaggataaagacacccacacatcacttggggtccccacgctgtctatagtggcttctactgccagctccgtggcgctcattctcctcctcgtggtgctgtttgtgctgctgcagccaaagctgaagtctttccatcatagcaggcgtgaccagggggtatctggggaccaggtctccatcatggtggatggagtccaggttgcactaccatcatacgaggaggctgtatatggcagttctggtcactgtgtgccacctgctgaccccagagtacagattgtgctgtcagaagggtctgggcccagtgggaggagcgtgccaagggagcaacagctgccggaccaaggggcctgctcctctgcaggtggagaagatgaggccccaggccagtctggactatgtgaagcctggggctctcgggcctcagagactgtgatggtgcatcaggcaaccacctcttcctgggtggccggctcagggaaccgccaactggcacacaaagaaactgcagattcagagaacagtgacatacaaagccttttatccctcacgtcagaggagtacacagatgatattccactgttgaaagaagcatgagggcagcggccagcctttcctctctgcgaggttctctcagcccttcctccctctccctgtgggattgagcaccctgtactctccagccaccttacctggatacctgagctgccacctgtgtatctgtgtatctctgagggccctataggcccaccttgctggaaactcaaggaagattctcgccatctgcctgttggacagctggaggagctggctctttgcctggccccgccttcccatctgtcagagacatatttgaatgtgctggatcaaaccctcccttttcctaagcctctgggtcccctccagccagctctttggcggcagcccccaccagctcctgtgggcctgagtgctgctgtgtttacttgtgcctttcccccaccctgtccagtttccctgtcatgcagacttgttgctgtccacaagccttagtggctgcactgctgccccctgccacacagggggccgggcctgggtctgtcctgtttcctttgagggttgcccctactgccctttgcaggaacagatccaggtgtgagagctcttgagtcaagagtggcagaagtggctctaattggggtgagagtgtagtccctgggcttgccctgggttgaccctggtggcatatttccttggctgaggatggaagatttggagaatcatgtccatgctggcccaggacccagccatctggcccaaaggcacaagctcctggccctgttgagttgagagtttccaagaagcatccagaagatcccaagggagagaaggaaaatggctgataatgattgtcttcctaatatgcaagttctcacttcctacttccagcatcggccttcctggccttgtcttttttttgtttccctggagtataatgggaagttgcatgctgcctcctgggttttatcccagatagctctggctttcttgctgcccacaggggcctggggcaggaaggagacttgctgagatgccatggagtgcccatctggtcactggcagtctgggcaggttgcccctttctgggtttgtggtgacggaggggaggccgagaggcacagaccaagtccccgggtggctgcaggcagctccagcccggtcctgaggatcctcctcaccatggtcacgtgccttagtaactgtgcccaggaagtggcctgctgcttgctgtgctgctgcttttcctacttctgcccttccctgccacccctcgcatgtcacagctgacaagcaattccttgtcttccctggccccctgggggaagggctgagaaacagtccgtgtgcaccccaaccttaatggcctgaggtgggcagaggggtgtggagcagcctggagtacagggccctgggggaggagcccactgatgaggggcgctctcccatagccatgtgttgaatgctaactaggctggggtggacgaactctgccaactgctgtcatcttagaagatagatgcagcagtaaggaatgtttgttttgcttttttctgaaattttctgaagcactgtggctgggaaacttcgaagcggaccctgtgctgcatgtctgctcctcccctgagcctgtctgcttgggggtggtaaaaataaaaatcccagtttattttcagtaccttacctaacagggttggctccaggcgtgggtggcctagaagatgaggggagtggtcttctcccagccttttaccctcttgcctcctgcctccgcgcttacacacgcactttaccacccggtcattccctggcctcttgctgccacttgtagtcttccttccttcctctcagggtaagggcagtgcctgctgtgcctgttggccactcccacacttcccctcccccaggagccctcatctgctgtgctgagtccaggaaagcatagttaggtagggagctggttggagaaggtgctagaactagaaggcagatgagactagcatgggcccacctggagggctgtccctaatggccccagtcgccttacctcacccacagcagtgcccttgtcttcctccaaaacagaaagcagtgacaaaagggggaggggtggtaatctgaagtctcactgctgagccttcagcttttatttttcactgtttcaaaacccgcattctattctagaatggtttttaaaatggaagatcttacctttttctatcttgttactctggggttttgtccccctaagagattgcactttttgtttggggtttattcagctgcatagatgaccagcttgatccctggtgaaatgaaaagccttccttctcctgaagcctctttccgccctgccctccactaacaacactgaggagcacaagcccaggcttgcccacctggtaggaaaggaagaaattagaacaatgggagccttggctcccctctcgtctcctcccctccttcttgtcactggctttgatgaggcccacttcccagaggctcctgggcctgtgagtgcaggagctcattctcccctcactgctgaagtctgtgacagcttcttcctccagttatgtctttcttccaaagcaatttcttaaccatcagccatgtgctgctatttctagggcttctgggctttgtcccttactgagagattagggactccacagctgccttgaggtagggcctggctgagagacaagggtagcagcaggtggcaggctgttaaaagacaggctgcctgaggagcctggagcaggtggaaacaggtggaagaaaccggccacagccctgctttaccgggctcacctctagggcattccagcaagaggctgatgcaggagaatggccagcaccaaaggacatttaaaagagtttttgggtttttttgtttgtttgttgttggtgtttgtttttttttttttttttttggcacacttgagctgactcagtgcaggtttaatatcctggtgacttgcagtcacattctaatgactttcaagggccagaatatggtgaaaatcacttaaaatatccgtcccttccatgccttagtttagcaggtaggctctatcttttgccatttctgtattttatgtgctgtgttcccgtttcactgggtatgaactgtgaaatcgactgaatcctggccactttatgagtttgtttggttttataaggcatttcaatgtacattctataaatacaagcactccatttgcaaacagatcttaagctaatattttctttcccattcatcttgccctccccctcctcccgccagctttaaagttcagtggagaagccagatggcaattcagacaaaggtatactcttcctgcttcatgggtggtggcacgggaatagatagcccttagccctttccctcccagtcccagctgagccctcagaccacttgcttcccacataacaatgtcgcctccatttccgaggaacatccttgcgtagagaatgaaatatgctgcaatcatttctgcatccttactcctcacccccaaagaaaaaaaaaaggcctagcagggaagcagcatgcaggcttcacagcttaatgccaaggacagcgagtgaggctgggagcttctcttgggcctgctgggtctgtcagctctcggaatagggacagtccttactggtgccccaaggtgggacttggagaatattttgcttggcatatgtttggtctgaatggtgtagttgctggttccctagagaggaaaaggtggcaggcccagctttgctgggaaatggctcttaatttccagttgaaaccctagtagaattgtgaatgaaaacctcaaggttgagcccctctgccaagcagcagagctagtagaaggggatgcaggggcaaagcactcagttgccaagcaaggaggagagatgtacgtgggctgtgtggcagtccccacaccctgccctggcttcttcaggttatcgcaccactatggaatcctttgcagaatggtactcatataatggtttaaaacaacacattcataattgactctgtgcaggatgtcactcaatcagtttgggtttgctttattttattttatatatatattttttggtatcctgtacattgcagtgggtgtgaagatagtattttaatatttgtacaaagtttaatttaattttaattgttctatgtatataactgcatttctaaataattaaaaaaaagttcttatgaaggc

SEQ ID NO: 21001 - DNA, 424 bp, Homo sapiens
  misc_feature 1..424: note = ENST00000553497
  source 1..424: mol_type = unassigned DNA
tctccgaagccggcgaccgccccacctcctccctccctcccgcccgcttcctctgcccacagcgccggccagagcgagctagacaagggcacgcggggcctcgcctagacccgagaagactgcgggcgcgcgcaagcggcggcgtggaagctgtgagcgcccccatcccggaggtctccgccggctcccggttttttttggcctggaaaccagcagggtgcctccatttgctctctcatcctctggttcttacttgagtgtggaagtcgctccactggtggaccttgcagtggcactgagctgggtcacttcagccgtgaaaggccaactgtactactgtcaaggcttgggacagttaagcgtccgtgaaggtactggatacagcgacagcaggaagtgcagcagtgagaactgaaactaattt

SEQ ID NO: 21002 - DNA, 608 bp, Homo sapiens
  misc_feature 1..608: note = ENST00000556993
  source 1..608: mol_type = unassigned DNA
caggtgaatcagctcccggccgactttaggattcttctggattttaaattttttctttttaaaaaaacttggacggataaaagatgtgccatggcaggatagcaccaaagagcacctcagtgtttgccgtggcctccgtgggacatggagtgttccttccgctagtgatcctttgcaccctgcttggagacggacttgcttccgtgtgccccctaccaccggagccagagaatggtggctacatctgccacccccggccctgcagagaccccctgacagcaggcagtgtcatcgaatacctgtgtgctgaaggctacatgttgaagggcgattacaaatacctgacgtgtaagaatggcgagtggaaaccagccatggagattagctgccgtctcaacgagggtcagtctggcagatgaaaaagggatgctgctggggttctgctttctgttaactcacaggatgcaaagcatgcttcctccagagcactctttgctgtggtgcagcccagccccagttgatgctctgcagcctcccttccttgggtcttcatgtctttgtggaagatacttgaggttgctggtgcatgtcctattgcatttcattga

SEQ ID NO: 21003 - DNA, 2099 bp, Homo sapiens
  misc_feature 1..2099: note = ENST00000545111
  source 1..2099: mol_type = unassigned DNA
atatttattggtctgcaaatccggagaccttgcggcctcactggtcctccttccctctgagctatctccacacccagccttcgatcagaaggagatttagaagcagagctgcccgcagcgaatacttttaatgcccgggccgggaagaaagcgggttaggatctgatcccgctgagtagaggacccaggagcctcccgccccgcgtgctctgtagcgcgggggcgcgctgcgcgctgcgcctgggcggctggcgggggcggcgtgggcgcggtgatgcaggtgtgacacccgccggcgcctgcctccgcccggatcgcccagctccgcgttagccggagctgcacgcggggctgccggggcggacgctgctctgcctgcatccggaggcggccgccagcggatttgccacccagggatgatagtctacttgggaatgatggcgggcgccttcatcctgggaggcctggctgataagctgggaaggaagcgagtcctcagcatgtctctggccgtcaatgcctccttcgcctccctctcttccttcgtgcagggatatggagccttcctcttctgccgactcatctcaggcatcggtattgggggtgctctaccgattgtttttgcctatttttctgaattcttgtctcgggagaagcgaggagaacacctcagttggctgggcatcttctggatgactgggggcctgtacgcatctgccatggcctggagcatcatcccacactatggctggggcttcagcatggggaccaattaccacttccatagctggagagtgtttgtcatcgtctgtgctctgccctgcaccgtgtccatggtggccctgaagttcatgccagagagcccaaggtttctgctagagatgggcaaacatgatgaagcctggatgattctcaagcaagtccatgacaccaacatgagagctaaggggaccccagagaaagtgttcacggtttccaacatcaaaactcccaagcaaatggatgaattcattgagatccaaagttcaacaggaacctggtaccagcgctggctggtcagattcaagaccattttcaagcaggtctgggataatgccctgtactgtgtgatggggccctacagaatgaatacactgattctggccgtggtttggtttgccatggcattcagttactatggactgacagtttggtttcctgatatgatccgctattttcaagatgaagaatacaagtctaaaatgaaggtgttttttggtgagcatgtgtacggcgccacaatcaacttcacgatggaaaatcagatccaccaacatgggaaacttgtgaatgataagttcacaagaatgtactttaaacatgtactctttgaggacacattctttgacgagtgctattttgaagacgtaacatcaacagatacctacttcaaaaattgtaccattgaatcaaccatcttttacaacacagacctctacgagcacaagttcatcaactgtcggtttatcaactccaccttcctggagcagaaggagggctgccacatggacttggagcaagataatgacttcctgatttacctcgtcagcttcctgggcagcctgtctgtcttacccgggaacatcatttctgccctgctcatggatagaattggaaggctcaagatgattggtggctccatgctaatctctgcagtctgctgcttcttcctgttttttggcaacagtgagtctgcaatgatcggctggcagtgcctgttctgtgggacaagcattgcagcctggaatgctctggatgtgatcacagtggagctgtatcccaccaaccagagagcaacagccttcggcattctcaatggattatgcaaatttggcgccatcctgggaaacaccatctttgcttcttttgttgggataaccaaagtggtccccatccttctggctgctgcttctctggttgggggtggcctgattgcccttcgactgccagagactcgagaacaggtcctgatgtgaacaacctatgggaaaaggaaaggtcgagagaatcttgtccaggacactgaaatgcatccacacttcctgcctatcacggtccgg

SEQ ID NO: 21004 - DNA, 11279 bp, Homo sapiens
  misc_feature 1..11279: note = ENST00000394232
  source 1..11279: mol_type = unassigned DNA
ggagctgcacgcggggctgccggggcggacgctgctctgcctgcatccggaggcggccgccagcggatttgccacccagagcataaccttcggtggcaggacaaatcaggccagcacgcagtctgccaagtcctgctcgctccctgtcaagaaaaacagctggatccatttctaatcaacacttcccaacgcaacacttctgagtctctgaaggagaccagagcttgaaactttccagacttccaacagacatcgagtgcaaaaggatatttaggttgtctttgcacaaatctggttgatttgagagataaagggggggggaaccagtgtgactttcacctaagaagtcacatgaacatatttcacatttgaactacataatgaatgatggttattgaaatagcccaaacctctaccacagagcgagggatatagctcaaggggcaaccaggcagtcgcagaaccaaggaatggatgactacaagtatcaggacaattatgggggctatgctcccagtgatggctattaccgcggcaatgagtccaacccagaagaagatgcacagagtgatgtcaccgaaggccatgatgaggaagacgagatctatgagggcgagtaccagggtatccctcacccagatgatgtcaaggccaagcaggccaagatggcgccctccagaatggacagccttcggggccagacagacctgatggctgagaggctggaagatgaggagcagttggcccaccagtacgagaccatcatggatgagtgtggccatggccgcttccagtggatcctctttttcgtcttgggtttggccctgatggccgatggggtggaagtgttcgtggtgagttttgccctgcccagtgcagagaaggacatgtgtctgtccagttccaaaaaaggaatgctagggatgatagtctacttgggaatgatggcgggcgccttcatcctgggaggcctggctgataagctgggaaggaagcgagtcctcagcatgtctctggccgtcaatgcctccttcgcctccctctcttccttcgtgcagggatatggagccttcctcttctgccgactcatctcaggcatcggtattgggggtgctctaccgattgtttttgcctatttttctgaattcttgtctcgggagaagcgaggagaacacctcagttggctgggcatcttctggatgactgggggcctgtacgcatctgccatggcctggagcatcatcccacactatggctggggcttcagcatggggaccaattaccacttccatagctggagagtgtttgtcatcgtctgtgctctgccctgcaccgtgtccatggtggccctgaagttcatgccagagagcccaaggtttctgctagagatgggcaaacatgatgaagcctggatgattctcaagcaagtccatgacaccaacatgagagctaaggggaccccagagaaagtgttcacggtttccaacatcaaaactcccaagcaaatggatgaattcattgagatccaaagttcaacaggaacctggtaccagcgctggctggtcagattcaagaccattttcaagcaggtctgggataatgccctgtactgtgtgatggggccctacagaatgaatacactgattctggccgtggtttggtttgccatggcattcagttactatggactgacagtttggtttcctgatatgatccgctattttcaagatgaagaatacaagtctaaaatgaaggtgttttttggtgagcatgtgtacggcgccacaatcaacttcacgatggaaaatcagatccaccaacatgggaaacttgtgaatgataagttcacaagaatgtactttaaacatgtactctttgaggacacattctttgacgagtgctattttgaagacgtaacatcaacagatacctacttcaaaaattgtaccattgaatcaaccatcttttacaacacagacctctacgagcacaagttcatcaactgtcggtttatcaactccaccttcctggagcagaaggagggctgccacatggacttggagcaagataatgacttcctgatttacctcgtcagcttcctgggcagcctgtctgtcttacccgggaacatcatttctgccctgctcatggatagaattggaaggctcaagatgattggtggctccatgctaatctctgcagtctgctgcttcttcctgttttttggcaacagtgagtctgcaatgatcggctggcagtgcctgttctgtgggacaagcattgcagcctggaatgctctggatgtgatcacagtggagctgtatcccaccaaccagagagcaacagccttcggcattctcaatggattatgcaaatttggcgccatcctgggaaacaccatctttgcttcttttgttgggataaccaaagtggtccccatccttctggctgctgcttctctggttgggggtggcctgattgcccttcgactgccagagactcgagaacaggtcctgatgtgaacaacctatgggaaaaggaaaggtcgagagaatcttgtccaggacactgaaatgcatccacacttcctgcctatcacggtccggaggacaccttggatagcacgggaggagaagttgactttgtgacccctagtttaggacccacttcagctgtcaatatgtttgtaactcaggtgactgatttgggggtgccctgagccacccttagaatcacagagctgcgtgtttaacttcaagtcttcccagtccaaggcagggagaggattctccagtgagtgcacacactatgcgaggagcaagcatttctctaagtcaagtgcaaggacttaacttgcgtttgaaaaggaattagagggtcagaaacacccaggttcctccagaaagctccttggagcccaacaacttaacaaatcaacttggctggaagttagagtcattatatgaagattgggcttgaagtatatatttttgcatttaaaagtatcacctatcatattttccactcgaaaattgacatagtagcattgaggatactctgatctagaaagccaagtatttgagcaacatctatagagatctacttttctcctatgtctcctaggctttccatgataattaggtaatacatttaagaaggatatttatttctgttttgctctattcaaagaaacggaatgggatagttattctgtaaactaagtttgtatataactttatttgggtttaatttccacaactggtatctgcaaatattgccagcattttagccatattttgggagaacttggtgtttgaggtcccaggaaatgaggtctgatcaaatgaaatgcaagcacaatttcttacagccatttaactttctgttgggaggatgaattaacaaactcacattgtgcagtctgcttaatccaggcacttttctttgtgcaggtgtagtgagtagttacttctctcccttacacagatgacttgtgaaactcaagctcaccatcttcagtgctggcattttactttgccactacccaaaaacaatgtgagatgtgttcagtggcctctggtactctttgcaggcaagaatcaaacaacatggggactgagggaaggatggggaagtgtagccacagttcttccaaatgtaaatactttttgtttgttctagtggtaaaatgcaaatgcaatccatatttgttaggatggtcaggtctcatgagaaatctatgctatgtgtccagagcttttgaaacagagtccattggagtgggagttagggagtgtagtggatgccaaatatgtttttcttcagtgcttaagagaactgtttcctgaagtccagctttgaacataaacaggggtgtgggttgggggaggagcttaggacaaacctctctgatgaaggtcagcaatagactgaagtcttgactgcatggaagaggaaaaacatcagaactgtctgacaatggaggggacagtgagctacgcacaactgccagcggaggtgaacttgcacctgcccaggccggatgaacatcagcctgcaagaactagttgtttgagttgatttgcagtgctctcaatgggcaagtgccacattttccctggcagagatctccaaaaatttaaaacagaataataatggctatatcgagtgttttctcagtattggagaaatgcttaggtcctatgatagcttcgggacatctttctgtaattttcctcaattaacgggttggtaggggtaaatcttatgacacctttccaccgtcgatttgagatcagttttaatggttaaaatgtttactctccttctgtcaaccctcacctttttatttacacccctccctttttttctgtacagggagagaagacatattgactctgactggacaccctgattcctccaaatatatataccactgtgtattaatctttctctcagtgttttataggagtactaacatttattgctctgtcaataatgaaaggctcgatgtaatatagctgtaatttactttccatatgaatacagtggctaggttcataaaagagaattgtgtgagtctgggattaccacatctaaaacattattctttaatgggataatacaattcattgagcagctaccacttaaaaaacttgcaggacagttagagcctgcatttctagttaagatggatcttgtaaatttaaaattggattaacattggagtgctggggtggctgcaataatttgggggctaactccatttggtttccaagatctcacttctgcattatctttatggctctttaaaccagccacctagccaatcaagggcaattcccatctcatccatcactcaggtctttgtaaagggtgcagccaagctctgcagacttttgcaggattgtctagcctgagtaccgggctacttcttaaatgccgtcactcctgctgagataaatgcgtctttaaaaatagtctctgtggcaggtcactgggggacaatgtacagcattctggccatccacttctttttcacttcatgttctaccccaagagactcccgatgtcggctgtggagggttaaagggatgaggctttcctttgtttagcaaatctgttcacagttcttgatgatgtattttatgatgcccagcttggaaatagttgctttccatagtctcaactgtattgtgtcatctcctgatgctgatttttgatcttttgttttattaaaaataattagtgaaagaggtgtgcctatctgtgaagtttgtagtacatcatcctgaggtcatgtaacaagtaaaccccaacccagcgttccctcctacgttgtgttagttcattaaaactaaataataaaaataactgtaagaaaaccttaaggactggggttagagattattttcaggcactaaggtctcttctgtattccaaaattgattgaatcagctgggagaaacattgagaatcgcttccttcaacttttattttgcaacatggggaccttgagaggttaaacgatgtggcccagattacatgtaatgtgaggagtgggcgagaaggcctaaggtgatgctctcatgacagttctggggaagcctgcagtttggggaatgggacaatgtgacaaatactcgccattccctgagaccattcattgactattcccttgatggctttactataatgagaggaagcatcagtttaaacataaaaagattagtatttatccatccatttattcattcagcaaatccttattgagccctgaccatgggccagtctctctgccaagccctggggacacagtgatgaaaaaactggccacagtttctgcttcctgcctcattccacttgcagtgagcggatattaaattggccataaacaccgagtacgatgaccttacaatccgcaaactgcacctttcatgtgtaaaaggattgctactactttacttgtcagctgtggatttccaaatgtggtggctccctcttatttttttttctttgaggagtgtaccaattttttatctttataaaccaggtaagggaaatgatgcccttgcccattttctacagacctaatcgatttttacctaatcagttttacagaaagggttacatggaagaagagataggggccaggaatgcaagagggacattggtgagtggggtaagaatccccgtagccctgggaaaggtgtctccacttccacatctggcttttctagggggcatctgtgctaactgacctgggattatgttggatggcatatgactgcaaattcaaagaaaccaatttataataagtttatagtaagttaaaggtttgttttactctcatgtgaagggaatctggaggaaggaaagccagggctggagtggctgcctttgatcatgggagcacactccttctgcccgatcattgggagcacactccttctgcctgatcgttgggagcacactcctgcctgatcatgggcgcacgttccttctgcctgatcgttgggagcacactccttctgcctgatcatgggagcacactccttctgcctgatcattgggagcacgctccttctgcctgatcgttgggagcacactctttctgcctgatcgttgggagcacaccccttctgcctgatcattgggagcacactccttctgcctgatcatgggcacacgctccttctgcccgatcatgggcacacgctccttctgcccgatcgttgggagcacactccttctgcccaatcattgggctcacgctccttctgcccgatcgctgggctcacgctccttctgcccgatcttgggcgcacgctccttctgcccgatcgttgggcgcacgctccttctgcccgatcgttgggcgcatgctccttctgcccgatcgttgggagcacgctcattctgcccgattgttgggagcacgctccttctgcccgatcgttgggcgcacgctccttctgcccgatcgttgggcgcacgcttcttctgcctgatcgttgggcgcacgctccttctgcctgatcgttgggcgcacgctccttctgcctgatcgttgggagcacgctccttctgcctgattgttggaagcacgctccttctgccttcagactccttgatttttagtgcagtttccatcactgaggctgcctcatgggctgagatggctgttgaagcactgaacctcacatccacaattcaggcaggaagcagaaggaagggcaatgggcaaaggggctgtgccttgcagccgatccagcctccctttgctgcagaggaggcagggaaatgcggtatttactgggaacattgctgcccctcctccaaattgagggtcttggctcgaaggacaaaagccagaaaggataggtggattagtgcttcttaaacttttgcgtgcatcagaatcacccagaaagatgttaaaactcactcttcaaggccccatccccagagattcggattctggggatttggaatctggggtggggtctgaagaatctgcattttttaacaaactcccaggtgacatagatggcatcaattctcaagccatattttgagtagcactgacactcttccaataggtggtactttgacttgtcagggaagttctattgctctgataacttaaaaccaacccaaccagaagctcacaaaaactagcagcctgtgaaaaatgatcaccattttcctagagctccgagacaactagtggtagtgcaacagtaacccaaaaatgtcaatgaaaatatttccttccccagaaactgcttggtttcactcaggtcctgtccttatgggcctgtgtctggttgcagggcttgaagtatttcggaagctcagcagaggttgaaccctttcccctgggggttggtgatctttgttttggccatttccacctggtgaagattttcatagacaaatatgcttgtggcatcctgtaattcattgtgccttatgatggacctctgattctataagcttccccctagctagggatgcacgggggtgatcaagacatgactagatgtgaacctgacctgcagacagtccacctgaacgtgcctggaaatgtctcccgaaaaggatgaaaagcctcctcctttagacaaggaagacagagtggagcaaatttctctacatagatctcattcgaaaacaaatttacagaatgcagaatggctactgtgtgtcttgtgctatgctaggtctctctctctctaagtggactctgaccctgtccaaaacattgtgcttttgcatgtagctgtgtcgcatttaggcccagctctaagaaccgtttggaaataaatcacatagagcctttgattgtgaggcaggcttaaagtacattttgtttgatttgcagaggcatggtgaggaatttatatgcatggctgttgtggcagcagcgagatttccaaaaagatgaatgatgaaatgaaacagactgaagctatctcacaaatgttaaatggagaaataaaagttgttatagtcattgctaattacagaatgagcaagagatttatttagcaggaccatactatgccccctggaaggttcagtttatgagctggagcacaaggatttactgtcatttcacctgaaaacacacatttagctgtccatttacctttaatcctacaggcttaaaatactttaaaatttcagagaccattaatatgtattcctttagaaagcaaaggtctttcagaagctgtcctctaccaaagttaatgtggtcaccacatttgatgattttgctaggtagggaggtttatttaatcacagctactgtcactcaggaggatgagccatttaaaaatggtggccctgtcctccacttcttacctaccatatataatctcagtaattcagatttctctaaatcagcattagtgatcatttcaatagggtatgaacaaaaggcctataaaaatagctttccaattcgccaccaaaaatgcaaaaatgacaagtaagtgaggtaacgcatgagctaaatagcttgatttagtcactctaaaatgtgggtgtgtatatatacatacatatatatacacacacacattatgttatacaccataaatatatagaagttttacttgtcaattaaaactataaataaagtggctttccagaaaaattagatattggactctatcacaaaggaattgcataaaaatacttacaaacataactataagcaattgatgagcaaattacaaatgactgttttttattaaaacattcctccaaaagaacggcaaagcaaatcccatagacacccaaaatactaaaagtgacaaaacaatacttctttaaaaatgtattttatgatctatttattgatattctaatggttttaagaaggataattttccaaaacctaaatgctacacattttacagtggcaatatcaaccttatcatgagctaaagatttgcaatcagaacattggtagagtgcattgctgagttataacaagtgtctcaggacgaggatatttggtaggtatccttaaatatatagatgcttaccagtaggtttaatagaagatttctgaaaggtagcgcaagtttttatttcattatttttatttttatttttttgagacagagtctcactctgtcatctaggctggagtgcagtggtgcaatcttggcttgctgcaatctccacctcccaggttcaagcgattctcccacctcagcctcccgagtagctgggattacaggcatgcgccaccatgcctggctaatttttgtatttttagtagagacggggtttcgccatgttggccaggctcgtctcgaactcctggcctcaagtgatctgcccgcctcagcctcccaaagtgctgggattacaaatgtgagctactatgcctggtcccaacttcttaaaattaaattttggggaagttcatggagatatttttgacatgtaaaagtagaaaacaaaccatccatagtgtgtgcatatatacacacaaggtttggtttaatatacttgctgtgcactagtcagttttgattcaggttacataagggataaaatatagaaagacattttaaagtttgaaatatgtgctaagtagttagagatttggcagttttgccacatttcaaatgggccaaacattaaaataacttatccatgaatttcaggtttcaaggaaggaggaatatctgactatttttttttgtgtgtgagatttggtctcagctttttggtccatctgaatcctggaagtccccaactctaccagaccaaaagggtgtctctattttttgttgttacttctctgttcttgatgtaatgagttaagtagatgaaagagattaaggtgcagggaagggctcttaaaagtttaatgtttcagctttccatagtcattcatacttgtgaatcttcttcctcttctacttcaaagtagccaaaacttggaaagttcaaattaatctttgggctccaaagagcaattctgaaggattaacaggtttcattctctccagtgggaggtggcctagacaggtgccggttttggggagaggtgagagtacccagatgtgggtgactatttcctgttcttccctgaaagtcaggccagtggtctcgaatcattcccacagcaactgctacaaaagtgactatcttaatcctttggctagatgggatacctcttctaccttttcagaggtgagctgttgagtagtaatgtccgctacaacaccacgctcccggaatggtggttcctaagagcaaagtcagttaatacaatttctccaggtatccagctatctccaggtgtgcggtcctgtgaagcactctaagaactgtaaaaaatatttcataggtatagaaggcatttgtaatactgttggttcaaatgtgctgacatgtagccagtggaggaagatgtttctttggaagcctgccatctttctgtaacgcaccttcaacctgagataattaagagtcattacgtttcccagtcccatgtcacattgaccagtcctgtggtcctatggctaagcggaggacacggccacaagctgtgagtcatgaaaaggagggtgcaggtgataggcaaagggacccattagccagtttacaatgactggcaactgaccagatagagcttaccgtatgtccatgtagagttgctcatattagtctgtaaataattctatgcatagtgaatgcagcttctgaattattaaactgatgctataaatgtgaactgacaaaaccca

SEQ ID NO: 21005 - DNA, 4077 bp, Homo sapiens
  misc_feature 1..4077: note = ENST00000557410
  source 1..4077: mol_type = unassigned DNA
gctgctctgcctgcatccggaggcggccgccagcggatttgccacccaggtcctaagactctcagtccagagagggccctgccccacacccagaaggaaggaatgctgcccagagatgaccagaggaatctagacagagcataaccttcggtggcaggacaaatcaggccagcacgcagtctgccaagtcctgctcgctccctgtcaagaaaaacagctggatccatttctaatcaacacttcccaacgcaacacttctgagtctctgaaggagaccagagcttgaaactttccagacttccaacagacatcgagtgcaaaaggatatttaggttgtctttgcacaaatctggttgatttgagagataaagggggggggaaccagtgtgactttcacctaagaagtcacatgaacatatttcacatttgaactacataatgaatgatggttattgaaatagcccaaacctctaccacagagcgagggatatagctcaaggggcaaccaggcagtcgcagaaccaaggaatggatgactacaagtatcaggacaattatgggggctatgctcccagtgatggctattaccgcggcaatgagtccaacccagaagaagatgcacagagtgatgtcaccgaaggccatgatgaggaagacgagatctatgagggcgagtaccagggtatccctcacccagatgatgtcaaggccaagcaggccaagatggcgccctccagaatggacagccttcggggccagacagacctgatggctgagaggctggaagatgaggagcagttggcccaccagtacgagaccatcatggatgagtgtggccatggccgcttccagtggatcctctttttcgtcttgggtttggccctgatggccgatggggtggaagtgttcgtggtgagttttgccctgcccagtgcagagaaggacatgtgtctgtccagttccaaaaaaggaatgctagggatgatagtctacttgggaatgatggcgggcgccttcatcctgggaggcctggctgataagctgggaaggaagcgagtcctcagcatgtctctggccgtcaatgcctccttcgcctccctctcttccttcgtgcagggatatggagccttcctcttctgccgactcatctcaggcatcggtattgggggtgctctaccgattgtttttgcctatttttctgaattcttgtctcgggagaagcgaggagaacacctcagttggctgggcatcttctggatgactgggggcctgtacgcatctgccatggcctggagcatcatcccacactatggctggggcttcagcatggggaccaattaccacttccatagctggagagtgtttgtcatcgtctgtgctctgccctgcaccgtgtccatggtggccctgaagttcatgccagagagcccaaggtttctgctagagatgggcaaacatgatgaagcctggatgattctcaagcaagtccatgacaccaacatgagagctaaggggaccccagagaaagtgttcacggtttccaacatcaaaactcccaagcaaatggatgaattcattgagatccaaagttcaacaggaacctggtaccagcgctggctggtcagattcaagaccattttcaagcaggtctgggataatgccctgtactgtgtgatggggccctacagaatgaatacactgattctggccgtggtttggtttgccatggcattcagttactatggactgacagtttggtttcctgatatgatccgctattttcaagatgaagaatacaagtctaaaatgaaggtgttttttggtgagcatgtgtacggcgccacaatcaacttcacgatggaaaatcagatccaccaacatgggaaacttgtgaatgataagttcacaagaatgtactttaaacatgtactctttgaggacacattctttgacgagtgctattttgaagacgtaacatcaacagatacctacttcaaaaattgtaccattgaatcaaccatcttttacaacacagacctctacgagcacaagttcatcaactgtcggtttatcaactccaccttcctggagcagaaggagggctgccacatggacttggagcaagataatgacttcctgatttacctcgtcagcttcctgggcagcctgtctgtcttacccgggaacatcatttctgccctgctcatggatagaattggaaggctcaagatgattggtggctccatgctaatctctgcagtctgctgcttcttcctgttttttggcaacagtgagtctgcaatgatcggctggcagtgcctgttctgtgggacaagcattgcagcctggaatgctctggatgtgatcacagtggagctgtatcccaccaaccagagagcaacagccttcggcattctcaatggattatgcaaatttggcgccatcctgggaaacaccatctttgcttcttttgttgggataaccaaagtggtccccatccttctggctgctgcttctctggttgggggtggcctgattgcccttcgactgccagagactcgagaacaggtcctgatgtgaacaacctatgggaaaaggaaaggtcgagagaatcttgtccaggacactgaaatgcatccacacttcctgcctatcacggtccggaggacaccttggatagcacgggaggagaagttgactttgtgacccctagtttaggacccacttcagctgtcaatatgtttgtaactcaggtgactgatttgggggtgccctgagccacccttagaatcacagagctgcgtgtttaacttcaagtcttcccagtccaaggcagggagaggattctccagtgagtgcacacactatgcgaggagcaagcatttctctaagtcaagtgcaaggacttaacttgcgtttgaaaaggaattagagggtcagaaacacccaggttcctccagaaagctccttggagcccaacaacttaacaaatcaacttggctggaagttagagtcattatatgaagattgggcttgaagtatatatttttgcatttaaaagtatcacctatcatattttccactcgaaaattgacatagtagcattgaggatactctgatctagaaagccaagtatttgagcaacatctatagagatctacttttctcctatgtctcctaggctttccatgataattagggagagaagacatattgactctgactggacaccctgattcctccaaatatatataccactgtgtattaatctttctctcagtgttttataggagtactaacatttattgctctgtcaataatgaaaggctcgatgtaatatagctgtaatttactttccatatgaatacagtggctaggttcataaaagagaattgtgtgagtctgggattaccacatctaaaacattattctttaatgggataatacaattcattgagcagctaccacttaaaaaacttgcaggacagttagagcctgcatttctagttaagatggatcttgtaaatttaaaattggattaacattggagtgctggggtggctgcaataatttgggggctaactccatttggtttccaagatctcacttctgcattatctttatggctctttaaaccagccacctagccaatcaagggcaattcccatctcatccatcactcaggtctttgtaaagggtgcagccaagctctgcagacttttgcaggattgtctagcctgagtaccgggctacttcttaaatgccgtcactcctgctgagataaatgcgtctttaaaaatagtctctgtggcaggtcactgggggacaatgtacagcattctggccatccacttctttttcacttcatgttctaccccaagagactcccgatgtcggctgtggagggttaaagggatgaggctttcctttgtttagcaaatctgttcacagttcttgatgatgtattttatgatgcccagcttggaaatagttgctttccatagtctcaactgtattgtgtcatctcctgatgctgatttttgatcttttgttttattaaaaataattagtgaaaga

SEQ ID NO: 21006 - DNA, 601 bp, Homo sapiens
  misc_feature 1..601: note = ENST00000557291
  source 1..601: mol_type = unassigned DNA
gacacccagagaggagcacacacaatacaagtcagactttaattttttccttttttaatgaatgcttttcctgaattccaggactatgaaggttttgaagcaacacttcacaaaggcagggactctggaaaattctgagggagtttcagagcagatgaacttctgtctgcttctccctgggtccccgacctatctgttcttgtcccagcccagttcaaaaggaaaactctcccttgattttccctaaatgggtggaataagggaaaactaaagctgttactaccagtcttttctgggagatgaaaatccaatctcaaggatgtttcttcctggaccaaagctgtgatgggtgacgaaaaatgatagaatgaaaagctcttgtgttatgtatttgccagagatgtgtgttacatgcgcctacatcatcattaaggtatttgaaaagcagcgtgcactacaagaagcatgagcgtggatgctcaaacagacctagggatgatagtctacttgggaatgatggcgggcgccttcatcctgggaggcctggctgataagctgggaaggaagcgagtcctcagcatgtctctggccgtcaatgcct

SEQ ID NO: 21007 - DNA, 535 bp, Homo sapiens
  misc_feature 1..535: note = ENST00000553727
  source 1..535: mol_type = unassigned DNA
atcgtctgtgctctgccctgcaccgtgtccatggtggccctgaagttcatgccagagagcccaaggtttctgctagagatgggcaaacatgatgaagcctggatgattctcaagcaagtccatgacaccaacatgagagctaaggggaccccagagaaagtgttcacggtttccaacatcaaaactcccaagcaaatggatgaattcattgagatccaaagttcaacaggaacctggtaccagcgctggctggtcagattcaagaccattttcaagcaggtatgattgggaacttactttggatgaggatgcgtctctatgggagtctcttaccttagtggatgaaaaatgcagctcctgaacatccccaccaacctgggccagcgtgatggagaggaagcaaccctggaggggggcgtttgggctccagcccacgtctgcctctagcttgctgtgtgccctggagctgaaaactctctaaatcttagtttcttttctttgttcttccttcccaaggcagggattttgaatgtag

SEQ ID NO: 21008 - DNA, 11202 bp, Homo sapiens
  misc_feature 1..11202: note = ENST00000330276
  source 1..11202: mol_type = unassigned DNA
cagagcataaccttcggtggcaggacaaatcaggccagcacgcagtctgccaagtcctgctcgctccctgtcaagaaaaacagctggatccatttctaatcaacacttcccaacgcaacacttctgagtctctgaaggagaccagagcttgaaactttccagacttccaacagacatcgagtgcaaaaggatatttaggttgtctttgcacaaatctggttgatttgagagataaagggggggggaaccagtgtgactttcacctaagaagtcacatgaacatatttcacatttgaactacataatgaatgatggttattgaaatagcccaaacctctaccacagagcgagggatatagctcaaggggcaaccaggcagtcgcagaaccaaggaatggatgactacaagtatcaggacaattatgggggctatgctcccagtgatggctattaccgcggcaatgagtccaacccagaagaagatgcacagagtgatgtcaccgaaggccatgatgaggaagacgagatctatgagggcgagtaccagggtatccctcacccagatgatgtcaaggccaagcaggccaagatggcgccctccagaatggacagccttcggggccagacagacctgatggctgagaggctggaagatgaggagcagttggcccaccagtacgagaccatcatggatgagtgtggccatggccgcttccagtggatcctctttttcgtcttgggtttggccctgatggccgatggggtggaagtgttcgtggtgagttttgccctgcccagtgcagagaaggacatgtgtctgtccagttccaaaaaaggaatgctagggatgatagtctacttgggaatgatggcgggcgccttcatcctgggaggcctggctgataagctgggaaggaagcgagtcctcagcatgtctctggccgtcaatgcctccttcgcctccctctcttccttcgtgcagggatatggagccttcctcttctgccgactcatctcaggcatcggtattgggggtgctctaccgattgtttttgcctatttttctgaattcttgtctcgggagaagcgaggagaacacctcagttggctgggcatcttctggatgactgggggcctgtacgcatctgccatggcctggagcatcatcccacactatggctggggcttcagcatggggaccaattaccacttccatagctggagagtgtttgtcatcgtctgtgctctgccctgcaccgtgtccatggtggccctgaagttcatgccagagagcccaaggtttctgctagagatgggcaaacatgatgaagcctggatgattctcaagcaagtccatgacaccaacatgagagctaaggggaccccagagaaagtgttcacggtttccaacatcaaaactcccaagcaaatggatgaattcattgagatccaaagttcaacaggaacctggtaccagcgctggctggtcagattcaagaccattttcaagcaggtctgggataatgccctgtactgtgtgatggggccctacagaatgaatacactgattctggccgtggtttggtttgccatggcattcagttactatggactgacagtttggtttcctgatatgatccgctattttcaagatgaagaatacaagtctaaaatgaaggtgttttttggtgagcatgtgtacggcgccacaatcaacttcacgatggaaaatcagatccaccaacatgggaaacttgtgaatgataagttcacaagaatgtactttaaacatgtactctttgaggacacattctttgacgagtgctattttgaagacgtaacatcaacagatacctacttcaaaaattgtaccattgaatcaaccatcttttacaacacagacctctacgagcacaagttcatcaactgtcggtttatcaactccaccttcctggagcagaaggagggctgccacatggacttggagcaagataatgacttcctgatttacctcgtcagcttcctgggcagcctgtctgtcttacccgggaacatcatttctgccctgctcatggatagaattggaaggctcaagatgattggtggctccatgctaatctctgcagtctgctgcttcttcctgttttttggcaacagtgagtctgcaatgatcggctggcagtgcctgttctgtgggacaagcattgcagcctggaatgctctggatgtgatcacagtggagctgtatcccaccaaccagagagcaacagccttcggcattctcaatggattatgcaaatttggcgccatcctgggaaacaccatctttgcttcttttgttgggataaccaaagtggtccccatccttctggctgctgcttctctggttgggggtggcctgattgcccttcgactgccagagactcgagaacaggtcctgatgtgaacaacctatgggaaaaggaaaggtcgagagaatcttgtccaggacactgaaatgcatccacacttcctgcctatcacggtccggaggacaccttggatagcacgggaggagaagttgactttgtgacccctagtttaggacccacttcagctgtcaatatgtttgtaactcaggtgactgatttgggggtgccctgagccacccttagaatcacagagctgcgtgtttaacttcaagtcttcccagtccaaggcagggagaggattctccagtgagtgcacacactatgcgaggagcaagcatttctctaagtcaagtgcaaggacttaacttgcgtttgaaaaggaattagagggtcagaaacacccaggttcctccagaaagctccttggagcccaacaacttaacaaatcaacttggctggaagttagagtcattatatgaagattgggcttgaagtatatatttttgcatttaaaagtatcacctatcatattttccactcgaaaattgacatagtagcattgaggatactctgatctagaaagccaagtatttgagcaacatctatagagatctacttttctcctatgtctcctaggctttccatgataattaggtaatacatttaagaaggatatttatttctgttttgctctattcaaagaaacggaatgggatagttattctgtaaactaagtttgtatataactttatttgggtttaatttccacaactggtatctgcaaatattgccagcattttagccatattttgggagaacttggtgtttgaggtcccaggaaatgaggtctgatcaaatgaaatgcaagcacaatttcttacagccatttaactttctgttgggaggatgaattaacaaactcacattgtgcagtctgcttaatccaggcacttttctttgtgcaggtgtagtgagtagttacttctctcccttacacagatgacttgtgaaactcaagctcaccatcttcagtgctggcattttactttgccactacccaaaaacaatgtgagatgtgttcagtggcctctggtactctttgcaggcaagaatcaaacaacatggggactgagggaaggatggggaagtgtagccacagttcttccaaatgtaaatactttttgtttgttctagtggtaaaatgcaaatgcaatccatatttgttaggatggtcaggtctcatgagaaatctatgctatgtgtccagagcttttgaaacagagtccattggagtgggagttagggagtgtagtggatgccaaatatgtttttcttcagtgcttaagagaactgtttcctgaagtccagctttgaacataaacaggggtgtgggttgggggaggagcttaggacaaacctctctgatgaaggtcagcaatagactgaagtcttgactgcatggaagaggaaaaacatcagaactgtctgacaatggaggggacagtgagctacgcacaactgccagcggaggtgaacttgcacctgcccaggccggatgaacatcagcctgcaagaactagttgtttgagttgatttgcagtgctctcaatgggcaagtgccacattttccctggcagagatctccaaaaatttaaaacagaataataatggctatatcgagtgttttctcagtattggagaaatgcttaggtcctatgatagcttcgggacatctttctgtaattttcctcaattaacgggttggtaggggtaaatcttatgacacctttccaccgtcgatttgagatcagttttaatggttaaaatgtttactctccttctgtcaaccctcacctttttatttacacccctccctttttttctgtacagggagagaagacatattgactctgactggacaccctgattcctccaaatatatataccactgtgtattaatctttctctcagtgttttataggagtactaacatttattgctctgtcaataatgaaaggctcgatgtaatatagctgtaatttactttccatatgaatacagtggctaggttcataaaagagaattgtgtgagtctgggattaccacatctaaaacattattctttaatgggataatacaattcattgagcagctaccacttaaaaaacttgcaggacagttagagcctgcatttctagttaagatggatcttgtaaatttaaaattggattaacattggagtgctggggtggctgcaataatttgggggctaactccatttggtttccaagatctcacttctgcattatctttatggctctttaaaccagccacctagccaatcaagggcaattcccatctcatccatcactcaggtctttgtaaagggtgcagccaagctctgcagacttttgcaggattgtctagcctgagtaccgggctacttcttaaatgccgtcactcctgctgagataaatgcgtctttaaaaatagtctctgtggcaggtcactgggggacaatgtacagcattctggccatccacttctttttcacttcatgttctaccccaagagactcccgatgtcggctgtggagggttaaagggatgaggctttcctttgtttagcaaatctgttcacagttcttgatgatgtattttatgatgcccagcttggaaatagttgctttccatagtctcaactgtattgtgtcatctcctgatgctgatttttgatcttttgttttattaaaaataattagtgaaagaggtgtgcctatctgtgaagtttgtagtacatcatcctgaggtcatgtaacaagtaaaccccaacccagcgttccctcctacgttgtgttagttcattaaaactaaataataaaaataactgtaagaaaaccttaaggactggggttagagattattttcaggcactaaggtctcttctgtattccaaaattgattgaatcagctgggagaaacattgagaatcgcttccttcaacttttattttgcaacatggggaccttgagaggttaaacgatgtggcccagattacatgtaatgtgaggagtgggcgagaaggcctaaggtgatgctctcatgacagttctggggaagcctgcagtttggggaatgggacaatgtgacaaatactcgccattccctgagaccattcattgactattcccttgatggctttactataatgagaggaagcatcagtttaaacataaaaagattagtatttatccatccatttattcattcagcaaatccttattgagccctgaccatgggccagtctctctgccaagccctggggacacagtgatgaaaaaactggccacagtttctgcttcctgcctcattccacttgcagtgagcggatattaaattggccataaacaccgagtacgatgaccttacaatccgcaaactgcacctttcatgtgtaaaaggattgctactactttacttgtcagctgtggatttccaaatgtggtggctccctcttatttttttttctttgaggagtgtaccaattttttatctttataaaccaggtaagggaaatgatgcccttgcccattttctacagacctaatcgatttttacctaatcagttttacagaaagggttacatggaagaagagataggggccaggaatgcaagagggacattggtgagtggggtaagaatccccgtagccctgggaaaggtgtctccacttccacatctggcttttctagggggcatctgtgctaactgacctgggattatgttggatggcatatgactgcaaattcaaagaaaccaatttataataagtttatagtaagttaaaggtttgttttactctcatgtgaagggaatctggaggaaggaaagccagggctggagtggctgcctttgatcatgggagcacactccttctgcccgatcattgggagcacactccttctgcctgatcgttgggagcacactcctgcctgatcatgggcgcacgttccttctgcctgatcgttgggagcacactccttctgcctgatcatgggagcacactccttctgcctgatcattgggagcacgctccttctgcctgatcgttgggagcacactctttctgcctgatcgttgggagcacaccccttctgcctgatcattgggagcacactccttctgcctgatcatgggcacacgctccttctgcccgatcatgggcacacgctccttctgcccgatcgttgggagcacactccttctgcccaatcattgggctcacgctccttctgcccgatcgctgggctcacgctccttctgcccgatcttgggcgcacgctccttctgcccgatcgttgggcgcacgctccttctgcccgatcgttgggcgcatgctccttctgcccgatcgttgggagcacgctcattctgcccgattgttgggagcacgctccttctgcccgatcgttgggcgcacgctccttctgcccgatcgttgggcgcacgcttcttctgcctgatcgttgggcgcacgctccttctgcctgatcgttgggcgcacgctccttctgcctgatcgttgggagcacgctccttctgcctgattgttggaagcacgctccttctgccttcagactccttgatttttagtgcagtttccatcactgaggctgcctcatgggctgagatggctgttgaagcactgaacctcacatccacaattcaggcaggaagcagaaggaagggcaatgggcaaaggggctgtgccttgcagccgatccagcctccctttgctgcagaggaggcagggaaatgcggtatttactgggaacattgctgcccctcctccaaattgagggtcttggctcgaaggacaaaagccagaaaggataggtggattagtgcttcttaaacttttgcgtgcatcagaatcacccagaaagatgttaaaactcactcttcaaggccccatccccagagattcggattctggggatttggaatctggggtggggtctgaagaatctgcattttttaacaaactcccaggtgacatagatggcatcaattctcaagccatattttgagtagcactgacactcttccaataggtggtactttgacttgtcagggaagttctattgctctgataacttaaaaccaacccaaccagaagctcacaaaaactagcagcctgtgaaaaatgatcaccattttcctagagctccgagacaactagtggtagtgcaacagtaacccaaaaatgtcaatgaaaatatttccttccccagaaactgcttggtttcactcaggtcctgtccttatgggcctgtgtctggttgcagggcttgaagtatttcggaagctcagcagaggttgaaccctttcccctgggggttggtgatctttgttttggccatttccacctggtgaagattttcatagacaaatatgcttgtggcatcctgtaattcattgtgccttatgatggacctctgattctataagcttccccctagctagggatgcacgggggtgatcaagacatgactagatgtgaacctgacctgcagacagtccacctgaacgtgcctggaaatgtctcccgaaaaggatgaaaagcctcctcctttagacaaggaagacagagtggagcaaatttctctacatagatctcattcgaaaacaaatttacagaatgcagaatggctactgtgtgtcttgtgctatgctaggtctctctctctctaagtggactctgaccctgtccaaaacattgtgcttttgcatgtagctgtgtcgcatttaggcccagctctaagaaccgtttggaaataaatcacatagagcctttgattgtgaggcaggcttaaagtacattttgtttgatttgcagaggcatggtgaggaatttatatgcatggctgttgtggcagcagcgagatttccaaaaagatgaatgatgaaatgaaacagactgaagctatctcacaaatgttaaatggagaaataaaagttgttatagtcattgctaattacagaatgagcaagagatttatttagcaggaccatactatgccccctggaaggttcagtttatgagctggagcacaaggatttactgtcatttcacctgaaaacacacatttagctgtccatttacctttaatcctacaggcttaaaatactttaaaatttcagagaccattaatatgtattcctttagaaagcaaaggtctttcagaagctgtcctctaccaaagttaatgtggtcaccacatttgatgattttgctaggtagggaggtttatttaatcacagctactgtcactcaggaggatgagccatttaaaaatggtggccctgtcctccacttcttacctaccatatataatctcagtaattcagatttctctaaatcagcattagtgatcatttcaatagggtatgaacaaaaggcctataaaaatagctttccaattcgccaccaaaaatgcaaaaatgacaagtaagtgaggtaacgcatgagctaaatagcttgatttagtcactctaaaatgtgggtgtgtatatatacatacatatatatacacacacacattatgttatacaccataaatatatagaagttttacttgtcaattaaaactataaataaagtggctttccagaaaaattagatattggactctatcacaaaggaattgcataaaaatacttacaaacataactataagcaattgatgagcaaattacaaatgactgttttttattaaaacattcctccaaaagaacggcaaagcaaatcccatagacacccaaaatactaaaagtgacaaaacaatacttctttaaaaatgtattttatgatctatttattgatattctaatggttttaagaaggataattttccaaaacctaaatgctacacattttacagtggcaatatcaaccttatcatgagctaaagatttgcaatcagaacattggtagagtgcattgctgagttataacaagtgtctcaggacgaggatatttggtaggtatccttaaatatatagatgcttaccagtaggtttaatagaagatttctgaaaggtagcgcaagtttttatttcattatttttatttttatttttttgagacagagtctcactctgtcatctaggctggagtgcagtggtgcaatcttggcttgctgcaatctccacctcccaggttcaagcgattctcccacctcagcctcccgagtagctgggattacaggcatgcgccaccatgcctggctaatttttgtatttttagtagagacggggtttcgccatgttggccaggctcgtctcgaactcctggcctcaagtgatctgcccgcctcagcctcccaaagtgctgggattacaaatgtgagctactatgcctggtcccaacttcttaaaattaaattttggggaagttcatggagatatttttgacatgtaaaagtagaaaacaaaccatccatagtgtgtgcatatatacacacaaggtttggtttaatatacttgctgtgcactagtcagttttgattcaggttacataagggataaaatatagaaagacattttaaagtttgaaatatgtgctaagtagttagagatttggcagttttgccacatttcaaatgggccaaacattaaaataacttatccatgaatttcaggtttcaaggaaggaggaatatctgactatttttttttgtgtgtgagatttggtctcagctttttggtccatctgaatcctggaagtccccaactctaccagaccaaaagggtgtctctattttttgttgttacttctctgttcttgatgtaatgagttaagtagatgaaagagattaaggtgcagggaagggctcttaaaagtttaatgtttcagctttccatagtcattcatacttgtgaatcttcttcctcttctacttcaaagtagccaaaacttggaaagttcaaattaatctttgggctccaaagagcaattctgaaggattaacaggtttcattctctccagtgggaggtggcctagacaggtgccggttttggggagaggtgagagtacccagatgtgggtgactatttcctgttcttccctgaaagtcaggccagtggtctcgaatcattcccacagcaactgctacaaaagtgactatcttaatcctttggctagatgggatacctcttctaccttttcagaggtgagctgttgagtagtaatgtccgctacaacaccacgctcccggaatggtggttcctaagagcaaagtcagttaatacaatttctccaggtatccagctatctccaggtgtgcggtcctgtgaagcactctaagaactgtaaaaaatatttcataggtatagaaggcatttgtaatactgttggttcaaatgtgctgacatgtagccagtggaggaagatgtttctttggaagcctgccatctttctgtaacgcaccttcaacctgagataattaagagtcattacgtttcccagtcccatgtcacattgaccagtcctgtggtcctatggctaagcggaggacacggccacaagctgtgagtcatgaaaaggagggtgcaggtgataggcaaagggacccattagccagtttacaatgactggcaactgaccagatagagcttaccgtatgtccatgtagagttgctcatattagtctgtaaataattctatgcatagtgaatgcagcttctgaattattaaactgatgctataaatgtgaactgacaaaaccc

SEQ ID NO: 21009 - DNA, 11035 bp, Homo sapiens
  misc_feature 1..11035: note = ENST00000502798
  source 1..11035: mol_type = unassigned DNA
gacttgccggagcaccgcgagtggcgcgcgggtcccgcctcccccgcgcgccgtgactccctgcgcaccgctggtactctcgccacgccgccgcccggcactgcagcaccagggggaggaggcaggcggaggagaggaggaggaccgcagcgtgcaagccgggagccactttcccgcccctcctctcgccgctgacacgctcagaggagtcaccactccgcgcgctgcaggcgagagtggcagacggaggcagcccggggaagcgagccggagcggcgcccgcactgaggcggctgcagtgctgacaccactcagggcaagggtgtccgacggctggagcgttctgttttgaacccaaagtggatgatgctgtcagagctgaaccactgaaaggaggctgtgaaaatttcccatcttctcattggccatcagttgagataagatggaagactcttacaaggataggacttcactgatgaagggtgccaaggacattgccagagaggtgaagaaacaaacagtaaagaaggtgaatcaagctgtggaccgagcccaggatgaatacacccagaggtcctacagtcggttccaagatgaagaagatgatgatgactactacccggctggagaaacctataatggtgaggccaacgatgacgaaggctcaagtgaagccactgaggggcatgatgaagatgatgagatctatgagggggagtatcagggcatccccagtatgaaccaagcgaaggacagcatcgtgtcagtggggcagcccaagggcgatgagtacaaggaccggcgggagctggaatcagaaaggagagctgacgaggaagagttagcccagcagtatgagctgataatccaagaatgcggtcatggtcgttttcagtgggcccttttcttcgtcctgggcatggctcttatggcagacggtgtagaggtgtttgtcgttggcttcgtgttacccagtgctgagacagacctctgcatcccaaattcaggatctggatggctaggcagcatagtgtacctcgggatgatggtgggggcgttcttctggggaggactggcagacaaagtgggaaggaaacagtctcttctgatttgcatgtctgtcaacggattctttgccttcctttcttcatttgtccaaggttatggcttctttctcttctgtcgcttactttctggattcgggattggaggagccatacccactgtgttctcgtactttgctgaagtcctggcccgggaaaagcggggcgaacacttgagctggctctgcatgttctggatgatcggtggcatctacgcctctgccatggcctgggccatcatcccgcactacgggtggagcttcagcatgggatcggcctaccagtttcacagttggcgtgtgtttgtcatcgtctgtgcactcccctgtgtctcctccgtggtggccctcacattcatgcctgaaagcccacgattcttgttggaggttggaaaacatgatgaagcttggatgattctgaagttaattcatgacaccaacatgagagcccggggtcagcctgagaaggtcttcacggtaaacaaaataaaaactcctaaacaaatagatgagctgattgaaattgagagtgacacaggaacatggtataggaggtgttttgttcggatccgcaccgagctgtacggaatttggttgacttttatgagatgtttcaactacccagtcagggataatacaataaagcttacaattgtttggttcaccctgtcctttgggtactatggattatccgtttggttccctgatgtcattaaacctctgcagtccgatgaatatgcattgctaaccagaaatgtggagagagataaatatgcaaatttcactattaactttacaatggaaaatcagattcatactggaatggaatacgacaatggcagattcataggggtcaagttcaaatctgtaactttcaaagactctgtttttaagtcctgcacctttgaggatgtaacttcagtgaacacctacttcaagaactgcacatttattgacactgtttttgacaacacagattttgagccatataaattcattgacagtgaatttaaaaactgctcgttttttcacaacaagacgggatgtcagattacctttgatgatgactatagtgcctactggatttattttgtcaactttctggggacattggcagtattgccagggaacattgtgtctgctctgctgatggacagaattgggcgcttaacaatgctaggtggctctatggtgctttcggggatcagctgtttcttcctttggttcggcaccagtgaatccatgatgataggcatgctgtgtctgtacaatggattgaccatctcagcctggaactctcttgacgtggtcactgtggaactgtaccccacagaccggagggcaacaggctttggcttcttaaatgcgctatgcaaggcagcagccgtcctgggaaacttaatatttggctctctggtcagcatcaccaaatcaatccccatcctgctggcttctactgtgctcgtgtgtggaggactcgttgggctgtgcctgcctgacacacgaacccaggttctgatgtaatgggaaaaaaagccatccttcctgcgtttcttcctcctgccctgggtcaattctccttcctgactcaaggcttcagagttttcctatatagaaaggtgatcaagtatcagaacataaacacgtgctgtgacttaaaatttagaagcatatcatcttgcccctttgtgattttgcacaggttgtttgtttgttttgttttgtttgaatgcattgttatctttccaaactgtgatgctactgcctcccgcaaatcagtggaagcatttctaaaatgccctaggcagccaggcttccctggggttctgctcattgaaagtttagaagctaagaagactgggctggtgtaagaaatagatcctgctcctaatttaacattaacaggaaatataagtcggcacattattgcatttgtgctgagaagagggattctttttttttttttttctaacagagtgatatttcctgtttacttagaaaaggacacccagtaattctcactgttatagcagagcctttcaaagaaaaccatgtggcaccaaacagggctgggtggggctctttggggcaagacaattaaggtgaccgctgacaagaaaaataaaagctctgcaattagcagcaaaaatctgagtgtgctgcataagcaagatttctgtcagaaagcccaattaaacctctgaaaagtgtgaggaaaaagaactgtaacagtatctgtgactgtggcatgtggttcagaatgtttgaaaatcagagatccgagagagagcttctgcctccatttaccactcccactccttcagctgcccttggtcttgccagacagcagattcagggaaagaaagctgcttcttaaaaactgtctgcctacctgattctgccacttacccacactgtctctagtctagagattgccagtggatagctaaattgtaaattgcaaattaggaagaaattcacacccagagccatttggaaatacaaaatggtacctctttccagtacctctttgctgtgggactggcccgccaggacccccaccccacctggcccgcagttgacattcagcttcccagctggcatcagcaaagagggtttgtccctctagcttccccagggctggcccactgctcaatgcgctcctggctccctgtaaaatcacagcccgcctgcactcctgagggcccctctcacagacagaccatctccctgtggttgtttgactgctcattttacctctggaatctgcctgggcttggaagaaagaggtcagccaggacattcccacgggcccgctgtcagctacatgaccttctcgcctctcaggctccccttcccccaggctcgtcctttttacacctcttctttgaaatctgaaccttccttgtagacttgcagccaatgaccagaagccaggaataaatcccatatttaaacaatattccttttttaactgcctcgatagaggtttattcttgttacttattataggcattttcaggcaagccatagcttggggcctccaggaagggaaagcttttgtttccactgatcattattttcagagatgtcctaactcccctgaggcccccctgcctccccctccccttcctaatgatccctcgcagagctcagactaagtgaaaagcttctttcattaacataagccattaatcgacttccccttgaagtaattcaggtctgcagaggggggaagactggtgttgggggcagtgggaagagggtggttccctgggggtctgtgatcagggctagaacatcaggaaaacccgaaccaaaaactgcaaaggtggcaggaagaagaaaaatcactgaaggctagacaagatgcatttgaaagataccaaccgcacagggaaagaaacaactttctctcacttctgcctcctatcattttattggagaacaaagacagcagtcaaacaacccaagaaagtaccctgtatgtttttcttcttccacatgtacccattttcccacctatctctccctgatttgtcttctttaaaaagacatttggggacctgagcaggtcttttagttgaatgcagcatgtgcagaaataactgcaaaagccaggagtgcatctccatcaacccatcaaaagaaaaatagaaatgtacatgggcatcgctgtctctagtcctctgtgatagttcactttgctaactagactacctttacttttcaaaatatctctaatgtctgctctggggtctaaatgcataaaacatctcccaagctgcagagcacagttattcagaattttatttgaacactgggttgggtcagcataggataaaccagcaaaaccttacttcatgagacctgccatccgtgtcccctgcagaaggaccgttcttggcctacttgttacctaatccaagcatccttggtggcctaagagggatcttttctcatctcctggacagtctgtggtcacaaaccttcttggtcaccacctctcccaccttttgtgcactcttccctgcctccttgagactgttcatcaccttgattttctaagagagctcaaatcatttccaaagcatgtggtgtggcctgtatagcttgctccagatttagctggagattaagaaacagccaggatattaaacagaaactctcagttgtatcagtgtagcaggccactggcacctaaacacgcaactggcatctcatttcgcctacagtagaaggaaaatgaaaatttgtacaaaaatgaaaacctaggaaatagtccacttgctcctatatttttaccaccttttctaactaaaatttccctgttgctctttggaatcaatccagaatgctcccaagtcccattattatcacagaatcttctcagtagggaaaaacaaacaactgcttcaaactgtgaattctgtatgtaccacattctatcccaggtattgggttttaaggcacccaactcacattcagtcctgctgcctgaatcatctcacaccagagtacagaccttggagacgcgatagatgggtcctagcctgaccttcaccactaagcggtacagggacccagatcttgctgtggagactgtaagtcgttgaacatctctagttctcactttccccgtgcacaaaataaaggattgggactagtctgctctccactctccagcattgtagaagacagtaatgaaaatagcttcatcttatctgccttcttatgctaaactcattttttttttttttaggtggagtttcactctgttgcccaggctggagtgcagtggtgggaactctgctcactgcaacctccgcctcccaggttcaagtgattctcccacctcagcctcccaagtagctgggaccacacgcatgcgccaccacgcccagctaatttttgtatcttttagtagaggtggggtttcaccgtgttggtcaggctggtctcgaactcctgacctcaagtgatcggcccacctcagcctcccaaaatgctgggattacaggcgtgagccactggcggcctcaactcatttttacaagcactaaataggtttagtttataaactgaaaaattaggaaataggcacgcataaaaagagtgtaggaagttgtttgggaagcccgcatggaataggccagaaagcacagtccccatgctgtctgccctgccagcatctcagcatcctgactagtatctctgttcactgcaggtttgacagttaccatcacccagccagaaaagggccccgccttgccagataaacgcgcttaggttagaagactataattgcaatattaccctacagctctcctgactgtttattccattattttcttgaaacatggccttaagtattatacataggcttcagaaacagtttttcagtgattttacctatattggcaaatagacaaatctcaccaaatcagagttcaggttttcaccaaaaactgcttagttgtctttcaagataccttaagagatcaaaggggaggtgggaaaagaaatgtagtgacagaagggagagtccaagataccactgataaggttccagcaaagagattaggacacagcagagactttctaaatgctggggtcatttccaaagcagtccaggggaatactttctgattccctctgccaatcaaaatagatagaatatgatattctccaattttttttctgtttgatgtcaaaatggcctttacctatttcttcagtaatatacctgatctgttcatgcactaaaggctctggagccaggaatgtctgaatttggccttcacctggtatcacagaaagacaactgggatattggtgttaaggggcatatcggctgtatgttaggttttctttaatcctcacatcgtgccaaacttagtctggttactaagcctaaaaacaccagtattgcaacaacttctgaaactctgaagtggactatatgtttctcacagtttttgtttatgctcagcaaagtatgtattttaagtaaagcttctcttgttatctgtaatgtagacaaaaaaaaaaaaaaacctgttagtatattctggatgtattgtgtgtcccttcattgtttcaggtatggcgtaacagttctccgtgtgatgttcttttgctctaaatgttgaccattcctcttgtcgcccgtctctcaccaaccagtcacagagccattgccagggctcccttcagtctttcttaaacaatatctaaatgcagtttagtaatcccaggattttgagttacaagaatacagtttatgggtctgtttcagctcttacttaaggctagcatggttgggcaggggaagagctgagccgagccttcactgatctcttgtcatttcatatgattatccagtaaatacttattgagcacctcccatgtgatacgtattgagacactgctgtgtgcaataattaagcctatggaggacttaaatgagggcaaggaaaacagaatgagagaagacactctcacactgacccccattacatgtgaaccctccgcgcccccccccataaatacaaagtgttatttttccacatttaaaacaaataatagccttcagcaggcagtgcaggaactattcagtcattgagataacctttgatgagaggagaaagctccttgattacctggtttttgttggagagactattaactagtacttggaaaatgagaaaaatgaaaccacacataagttgttcccttaaataatctcagcaggatattgcactaagatattattcaaggaaaagaatcaggagcagagatagccccatctctctagagcattttttttttttttttgggcgggggggcgggggacggagtctcgctctattacttaggccggagtgcagtggtgcaatctcggctcaatgcaacttccgcctcccaggttcaagcaattctcctgcctcagcctcccaggtagctgggattacaggtgcatgccactatgtccggctaattttttgtatttttagtagagacgaggtttcaccattttggccaggctggtctccaactcctaacttcaagtgatctacccaccttggcctcccaaagtgctgggattacaggcatgagccactacacctggcctaaagtcccgctttcttctgaggtgttcttttcatggtgtgaaaccagagacaggagctagggggtctgttccccagcgaatagtgttggggttttctcttcagagctaagtcagcaaagcctgcagctgctgccactcccctggtctgtgcctcccagggtgtttcctttctgattttgaagatttgtgggtgagtcaattatctttgcagacatcctaaagcagcttccctcctcgctaccctcagcagataagccatccagaaaacaggttctgacagccagtagcaggggtattttgggtttcagtttaaaactggtgcgtgttgttgcaagtgtcttgaagttgcaaaggatgtttggggttctagggcctgcaggggggcagagcagaaagagggtagttgtcagtgaccctctaccctcctctgagagccccattgccatttttgcccaccagttctcttcttacctcctcagggcagtgcccactcatttcctttatttcccttttgttttttttcttttcctcctctggtcgacaacctcttaattctagcagtgtacaaaagcaaggccaagctttcctggggcacttgggatgaaaggcccatccatgcctgttgtggaggcacagaggaggagaaggtgaagaacaggaatgggtgcagggggagtgtgaacgcaaggctgctggctttggcacagctccctgtgcagggctggatttccaattgcttttcagtgcctgtgccctgataggatgggcacagctggtatggaatcagagcagcccatctccagagcagaagtctgagagctcagcgtttgactcctgaaagaccaggatgttcctacctgggttcttgagattcattggctagtggaggtagatggtactctccatgtctgcagaagattccccacttggtgctgaaggctaggtgccttccagtcaggtctgaatgctgaaattgctgagattgtccactctctgcctactttattgcattcatgctccccttagatccaagagtgcccaggactaggagcagaaagcagttttcaaccctttgttcagactcagacgggtttcaactcaagcgggtaatctaccccagcagcaggggtgcaaagtccaaaacagctttgtggtgcctggggagtgactaggcagcctgctcacaggggctggagtcatctaaagctagtgatgagctggaatagctttgaaccggttcatccgaactgattgttaaactttcagaacttttgagagtcagttgagaaacatagctattactaaaaaattaaataagattagataaattatagctaaaagcaaaggcaacatatagtcaaagctcatcactttctacttattttactacattttaccattatctgtgcccatgaggtaatgtatgcctattatgtctgtatggtagaaatactgtatacaggtatactactacacacaccttcccaagtgacagtatttttgtagtttgagatcagctatagtggtggtatttataccatggaaagcaacaaagccatggaaagcaacaaagccatgcaaatcagactcctcctaacccctaagacagttgttaaacatttgccagcataccaccatctaaagccctaaagaatgcttggcctcccactgcatagacacaggccacatcacattgagtatcatggatttatgggtcagcattgcccctaagtccaaggaaggggaaagacttagcaagctcaacctcatgtgattcacaaagggtttctttctgcatttgtattgactcagaataggacccagtacagagaatccactgttatctatgggtgtcattccttcagaaagaatgtacagtaaaattggctatttcatgctatgcaaacaaaatgaaactagtttgaagttgcaaagtgtctcccctcttgcgcccacgtagtcatccaagaaggaaactcctttcttgccttgatattcaccaggcctacctagatagaacttgacaaattggcctaacttcatctccgctgctattgttatatatttgctttactgaatctatgtcctatgtcagtcagaagaaaaaagaaatgtcttttttaatatacactttcttagcatccatgcagttatgtatcctcatcctgatccaggaacatattgaacagatcatatgtcttttgttactatctagatacactaaataacatgatagaagagttttctctttcaggtgaacttccattttgaacatatgctaaacgtactatccactgtctattttaatgagatcttggcaatggtcctgtcggttttggtgtttggattgtttggctttgttttccttttttattcttcctgtttttaatgctgtgtaagatctcctgctatgaatgttccagttacccctattgtactgtatatacgtgtgctgcatgtgtaaattctgtttcaggttttggagttttcatcttaagtacagctggtcctgttgtgaactcatctttcctgtatgctcctctgtgtctgatttccaattgccaaaatgtttgaccaaatgtgttttgacaaatatcccgagacagccatgcgtatccttgtgaaagggcatgctccatgtgggatggctcgtgtacagcataaatctatcaaacttggaattgtgtatacatttatatgccagataactaacattcatgtaacagctgcaaagatatttagtgtatatcagattaataaaagagcattttttttttgctccattatattcaaataca

SEQ ID NO: 21010 - DNA, 3010 bp, Homo sapiens
  misc_feature 1..3010: note = ENST00000322285
  source 1..3010: mol_type = unassigned DNA
gacggaggcagcccggggaagcgagccggagcggcgcccgcactgaggcggctgcagtgctgacaccactcagggcaagggtgtccgacggctggagcgttctgttttgaacccaaagtggatgatgctgtcagagctgaaccactgaaaggaggctgtgaaaatttcccatcttctcattggccatcagttgagataagatggaagactcttacaaggataggacttcactgatgaagggtgccaaggacattgccagagaggtgaagaaacaaacagtaaagaaggtgaatcaagctgtggaccgagcccaggatgaatacacccagaggtcctacagtcggttccaagatgaagaagatgatgatgactactacccggctggagaaacctataatggtgaggccaacgatgacgaaggctcaagtgaagccactgaggggcatgatgaagatgatgagatctatgagggggagtatcagggcatccccagtatgaaccaagcgaaggacagcatcgtgtcagtggggcagcccaagggcgatgagtacaaggaccggcgggagctggaatcagaaaggagagctgacgaggaagagttagcccagcagtatgagctgataatccaagaatgcggtcatggtcgttttcagtgggcccttttcttcgtcctgggcatggctcttatggcagacggtgtagaggtgtttgtcgttggcttcgtgttacccagtgctgagacagacctctgcatcccaaattcaggatctggatggctaggcagcatagtgtacctcgggatgatggtgggggcgttcttctggggaggactggcagacaaagtgggaaggaaacagtctcttctgatttgcatgtctgtcaacggattctttgccttcctttcttcatttgtccaaggttatggcttctttctcttctgtcgcttactttctggattcgggattggaggagccatacccactgtgttctcgtactttgctgaagtcctggcccgggaaaagcggggcgaacacttgagctggctctgcatgttctggatgatcggtggcatctacgcctctgccatggcctgggccatcatcccgcactacgggtggagcttcagcatgggatcggcctaccagtttcacagttggcgtgtgtttgtcatcgtctgtgcactcccctgtgtctcctccgtggtggccctcacattcatgcctgaaagcccacgattcttgttggaggttggaaaacatgatgaagcttggatgattctgaagttaattcatgacaccaacatgagagcccggggtcagcctgagaaggtcttcacggtaaacaaaataaaaactcctaaacaaatagatgagctgattgaaattgagagtgacacaggaacatggtataggaggtgttttgttcggatccgcaccgagctgtacggaatttggttgacttttatgagatgtttcaactacccagtcagggataatacaataaagcttacaattgtttggttcaccctgtcctttgggtactatggattatccgtttggttccctgatgtcattaaacctctgcagtccgatgaatatgcattgctaaccagaaatgtggagagagataaatatgcaaatttcactattaactttacaatggaaaatcagattcatactggaatggaatacgacaatggcagattcataggggtcaagttcaaatctgtaactttcaaagactctgtttttaagtcctgcacctttgaggatgtaacttcagtgaacacctacttcaagaactgcacatttattgacactgtttttgacaacacagattttgagccatataaattcattgacagtgaatttaaaaactgctcgttttttcacaacaagacgggatgtcagattacctttgatgatgactatagtgcctactggatttattttgtcaactttctggggacattggcagtattgccagggaacattgtgtctgctctgctgatggacagaattgggcgcttaacaatgctaggtggctctatggtgctttcggggatcagctgtttcttcctttggttcggcaccagtgaatccatgatgataggcatgctgtgtctgtacaatggattgaccatctcagcctggaactctcttgacgtggtcactgtggaactgtaccccacagaccggagacgcagagtcttgccatgttgccccggctgatcttgaactcctggcctcaagcaatcctcctgcctcagcctcccaaagttctgggattacagtctcgagccactgcacctggctttctttccatttttgaggattaaaattacttgaaattttccaaatatattatacaaggtcttgctaagaacttagtagatttctttattgttgtcttttttctctctcttttgccttgtagaaatatcccacaaagtgaagtaaccaagtcaacaagtgtgaacaattttatagctctccttaaatttactatacagctctcagaaacaacggagccagtttatagcaggagccattagtgggtgtggacctcttttctaagatctgcttctaaacttggctttatcacataaagagagaaaagcattacaaacaatttgaaggaattctttgtcttataaaaaaaattctgaaaacctccttgtattcccactaggaggtatagttaaccttgcaactccacaaacagaccactttacacacttgcccaggggcctttgtttttgcttgcccctcctctgaaatgctctctacaggtgattaagtggcttttccctttacttaggtgtctactcaggtaaaatcttaaccaagacgcctttacttaaaatgtccctctgccccaccctgaggcttttaacttgcatagccctcatcatcacctgacataatatgtacttctttgcttttatagatattatctgtgtccctccactaggatgtccatttcatgggaataaagactttgtctcttt

SEQ ID NO: 21011 - DNA, 437 bp, Homo sapiens
  misc_feature 1..437: note = ENST00000506257
  source 1..437: mol_type = unassigned DNA
cagatttggttgacttttatgagatgtttcaactacccagtcagggataatacaataaagcttacaattgtttggttcaccctgtcctttgggtactatggattatccgtttggttccctgatgtcattaaacctctgcagtccgatgaatatgcattgctaaccagaaatgtggagagagataaatatgcaaatttcactattaactttacaatggaaaatcagattcatactggaatggaatacgacaatggcaggtctagaaacttgaaataatttaatttgctacctattcacaaaaacttatttcttcttagctttccctgcactgaaacaggcatagttttttgtttgtttgttttagtttgtacatttagtcattttcatgatgaatttcaatacttcttaataggctttaaataaaaggtacaaatgta

SEQ ID NO: 21012 - DNA, 12194 bp, Homo sapiens
  misc_feature 1..12194: note = ENST00000374469
  source 1..12194: mol_type = unassigned DNA
ccctccggagttcccgagctgctgaggagtctggattgtgtctgtccccagtgtcagatgaaagggcgctgaggctcttggccgctgccccgcgcccagctccgcgcacgcccctctgcgagtccggccgcccagcgcctcttcccgcccgagccgccgcctgcgctccggggcagccgctctgtctccagcgcgatgtggcctcgcctggccttttgttgctggggtctggcgctcgtttcgggctgggcgacctttcagcagatgtccccgtcgcgcaatttcagcttccgcctcttccccgagaccgcgcccggggcccccgggagtatccccgcgccgcccgctcctggcgacgaagcggcggggagcagagtggagcggctgggccaggcgttccggcgacgcgtgcggctgctgcgggagctcagcgagcgcctggagcttgtcttcctggtggatgattcgtccagcgtgggcgaagtcaacttccgcagcgagctcatgttcgtccgcaagctgctgtccgacttccccgtggtgcccacggccacgcgcgtggccatcgtgaccttctcgtccaagaactacgtggtgccgcgcgtcgattacatctccacccgccgcgcgcgccagcacaagtgcgcgctgctcctccaagagatccctgccatctcctaccgaggtggcggcacctacaccaagggcgccttccagcaagccgcgcaaattcttcttcatgctagagaaaactcaacaaaagttgtatttctcatcactgatggatattccaatgggggagaccctagaccaattgcagcgtcactgcgagattcaggagtggagatcttcacttttggcatatggcaagggaacattcgagagctgaatgacatggcttccaccccaaaggaggagcactgttacctgctacacagttttgaagaatttgaggctttagctcgccgggcattgcatgaagatctaccttctgggagttttattcaagatgatatggtccactgctcatatctttgtgatgaaggcaaggactgctgtgaccgaatgggaagctgcaaatgtgggacacacacaggccattttgagtgcatctgtgaaaaggggtattacgggaaaggtctgcagtatgaatgcacagcttgcccatcggggacatacaaacctgaaggctcaccaggaggaatcagcagttgcattccatgtcctgatgaaaatcacacctctccacctggaagcacatcccctgaagactgtgtctgcagagagggatacagggcatctggccagacctgtgaacttgtccactgccctgccctgaagcctcccgaaaatggttactttatccaaaacacttgcaacaaccacttcaatgcagcctgtggggtccgatgtcaccctggatttgatcttgtgggaagcagcatcatcttatgtctacccaatggtttgtggtccggttcagagagctactgcagagtaagaacatgtcctcatctccgccagccgaaacatggccacatcagctgttctacaagggaaatgttatataagacaacatgtttggttgcctgtgatgaagggtacagactagaaggcagtgataagcttacttgtcaaggaaacagccagtgggatgggccagaaccccggtgtgtggagcgccactgttccacctttcagatgcccaaagatgtcatcatatccccccacaactgtggcaagcagccagccaaatttgggacgatctgctatgtaagttgccgccaagggttcattttatctggagtcaaagaaatgctgagatgtaccacttctggaaaatggaatgtcggagttcaggcagctgtgtgtaaagacgtggaggctcctcaaatcaactgtcctaaggacatagaggctaagactctggaacagcaagattctgccaatgttacctggcagattccaacagctaaagacaactctggtgaaaaggtgtcagtccacgttcatccagctttcaccccaccttaccttttcccaattggagatgttgctatcgtatacacggcaactgacctatccggcaaccaggccagctgcattttccatatcaaggttattgatgcagaaccacctgtcatagactggtgcagatctccacctcccgtccaggtctcggagaaggtacatgccgcaagctgggatgagcctcagttctcagacaactcaggggctgaattggtcattaccagaagtcatacacaaggagaccttttccctcaaggggagactatagtacagtatacagccactgacccctcaggcaataacaggacatgtgatatccatattgtcataaaaggttctccctgtgaaattccattcacacctgtaaatggggattttatatgcactccagataatactggagtcaactgtacattaacttgcttggagggctatgatttcacagaagggtctactgacaagtattattgtgcttatgaagatggcgtctggaaaccaacatataccactgaatggccagactgtgccaaaaaacgttttgcaaaccacgggttcaagtcctttgagatgttctacaaagcagctcgttgtgatgacacagatctgatgaagaagttttctgaagcatttgagacgaccctgggaaaaatggtcccatcattttgtagtgatgcagaggacattgactgcagactggaggagaacctgaccaaaaaatattgcctagaatataattatgactatgaaaatggctttgcaattggaccaggtggctggggtgcagctaataggctggattactcttacgatgacttcctggacactgtgcaagaaacagccacaagcatcggcaatgccaagtcctcacggattaaaagaagtgccccattatctgactataaaattaagttaatttttaacatcacagctagtgtgccattacccgatgaaagaaatgatacccttgaatgggaaaatcagcaacgactccttcagacattggaaactatcacaaataaactgaaaaggactctcaacaaagaccccatgtattcctttcagcttgcatcagaaatacttatagccgacagcaattcattagaaacaaaaaaggcttcccccttctgcagaccaggctcagtgctgagagggcgtatgtgtgtcaattgccctttgggaacctattataatctggaacatttcacctgtgaaagctgccggatcggatcctatcaagatgaagaagggcaacttgagtgcaagctttgcccctctgggatgtacacggaatatatccattcaagaaacatctctgattgtaaagctcagtgtaaacaaggcacctactcatacagtggacttgagacttgtgaatcgtgtccactgggcacttatcagccaaaatttggttcccggagctgcctctcgtgtccagaaaacacctcaactgtgaaaagaggagccgtgaacatttctgcatgtggagttccttgtccagaaggaaaattctcgcgttctgggttaatgccctgtcacccatgtcctcgtgactattaccaacctaatgcagggaaggccttctgcctggcctgtcccttttatggaactaccccattcgctggttccagatccatcacagaatgttcaagttttagttcaactttctcagcggcagaggaaagtgtggtgccccctgcctctcttggacatattaaaaagaggcatgaaatcagcagtcaggttttccatgaatgcttctttaacccttgccacaatagtggaacctgccagcaacttgggcgtggttatgtttgtctctgtccacttggatatacaggcttaaagtgtgaaacagacatcgatgagtgcagcccactgccttgcctcaacaatggagtttgtaaagacctagttggggaattcatttgtgagtgcccatcaggttacacaggtcagcggtgtgaagaaaatataaatgagtgtagctccagtccttgtttaaataaaggaatctgtgttgatggtgtggctggctatcgttgcacatgtgtgaaaggatttgtaggcctgcattgtgaaacagaagtcaatgaatgccagtcaaacccatgcttaaataatgcagtctgtgaagaccaggttgggggattcttgtgcaaatgcccacctggatttttgggtacccgatgtggaaagaacgtcgatgagtgtctcagtcagccatgcaaaaatggagctacctgtaaagacggtgccaatagcttcagatgcctgtgtgcagctggcttcacaggatcacactgtgaattgaacatcaatgaatgtcagtctaatccatgtagaaatcaggccacctgtgtggatgaattaaattcatacagttgtaaatgtcagccaggattttcaggcaaaaggtgtgaaacagaacagtctacaggctttaacctggattttgaagtttctggcatctatggatatgtcatgctagatggcatgctcccatctctccatgctctaacctgtaccttctggatgaaatcctctgacgacatgaactatggaacaccaatctcctatgcagttgataacggcagcgacaataccttgctcctgactgattataacggctgggttctttatgtgaatggcagggaaaagataacaaactgtccctcggtgaatgatggcagatggcatcatattgcaatcacttggacaagtgccaatggcatctggaaagtctatatcgatgggaaattatctgacggtggtgctggcctctctgttggtttgcccatacctggtggtggtgcgttagttctggggcaagagcaagacaaaaaaggagagggattcagcccagctgagtcttttgtgggctccataagccagctcaacctctgggactatgtcctgtctccacagcaggtgaagtcactggctacctcctgcccagaggaactcagtaaaggaaacgtgttagcatggcctgatttcttgtcaggaattgtggggaaagtgaagatcgattctaagagcatattttgttctgattgcccacgcttaggagggtcagtgcctcatctgagaactgcatctgaagatttaaagccaggttccaaagtcaatctgttctgtgatccaggcttccagctggtcgggaaccctgtgcagtactgtctgaatcaaggacagtggacacaaccacttcctcactgtgaacgcattagctgtggggtgccacctcctttggagaatggcttccattcagccgatgacttctatgctggcagcacagtaacctaccagtgcaacaatggctactatctattgggtgactcaaggatgttctgtacagataatgggagctggaacggcgtttcaccatcctgccttgatgtcgatgagtgtgcagttggatcagattgtagtgagcatgcttcttgcctgaacgtagatggatcctacatatgttcatgtgtcccaccgtacacaggagatgggaaaaactgtgcagaacctataaaatgtaaggctccaggaaatccggaaaatggccactcctcaggtgagatttatacagtaggtgccgaagtcacattttcgtgtcaggaaggataccagttgatgggagtaaccaaaatcacatgtttggagtctggagaatggaatcatctaataccatattgtaaagctgtttcatgtggtaaaccggctattccagaaaatggttgcattgaggagttagcatttacttttggcagcaaagtgacatataggtgtaataaaggatatactctggccggtgataaagaatcatcctgtcttgctaacagttcttggagtcattcccctcctgtgtgtgaaccagtgaagtgttctagtccggaaaatataaataatggaaaatatattttgagtgggcttacctacctttctactgcatcatattcatgcgatacaggatacagcttacagggcccttccattattgaatgcacggcttctggcatctgggacagagcgccacctgcctgtcacctcgtcttctgtggagaaccacctgccatcaaagatgctgtcattacggggaataacttcactttcaggaacaccgtcacttacacttgcaaagaaggctatactcttgctggtcttgacaccattgaatgcctggccgacggcaagtggagtagaagtgaccagcagtgcctggctgtctcctgtgatgagccacccattgtggaccacgcctctccagagactgcccatcggctctttggagacattgcattctactactgctctgatggttacagcctagcagacaattcccagcttctctgcaatgcccagggcaagtgggtacccccagaaggtcaagacatgccccgttgtatagctcatttctgtgaaaaacctccatcggtttcctatagcatcttggaatctgtgagcaaagcaaaatttgcagctggctcagttgtgagctttaaatgcatggaaggctttgtactgaacacctcagcaaagattgaatgtatgagaggtgggcagtggaacccttcccccatgtccatccagtgcatccctgtgcggtgtggagagccaccaagcatcatgaatggctatgcaagtggatcaaactacagttttggagccatggtggcttacagctgcaacaaggggttctacatcaaaggggaaaagaagagcacctgcgaagccacagggcagtggagtagtcctataccgacgtgccacccggtatcttgtggtgaaccacctaaggttgagaatggctttctggagcatacaactggcaggatctttgagagtgaagtgaggtatcagtgtaacccgggctataagtcagtcggaagtcctgtatttgtctgccaagccaatcgccactggcacagtgaatcccctctgatgtgtgttcctctcgactgtggaaaacctcccccgatccagaatggcttcatgaaaggagaaaactttgaagtagggtccaaggttcagtttttctgtaatgagggttatgagcttgttggtgacagttcttggacatgtcagaaatctggcaaatggaataagaagtcaaatccaaagtgcatgcctgccaagtgcccagagccgcccctcttggaaaaccagctagtattaaaggagttgaccaccgaggtaggagttgtgacattttcctgtaaagaagggcatgtcctgcaaggcccctctgtcctgaaatgcttgccatcccagcaatggaatgactctttccctgtttgtaagattgttctttgtaccccacctcccctaatttcctttggtgtccccattccttcttctgctcttcattttggaagtactgtcaagtattcttgtgtaggtgggtttttcctaagaggaaattctaccaccctctgccaacctgatggcacctggagctctccactgccagaatgtgttccagtagaatgtccccaacctgaggaaatccccaatggaatcattgatgtgcaaggccttgcctatctcagcacagctctctatacctgcaagccaggctttgaattggtgggaaatactaccaccctttgtggagaaaatggtcactggcttggaggaaaaccaacatgtaaagccattgagtgcctgaaacccaaggagattttgaatggcaaattctcttacacggacctacactatggacagaccgttacctactcttgcaaccgaggctttcggctcgaaggtcccagtgccttgacctgtttagagacaggtgattgggatgtagatgccccatcttgcaatgccatccactgtgattccccacaacccattgaaaatggttttgtagaaggtgcagattacagctatggtgccataatcatctacagttgcttccctgggtttcaggtggctggtcatgccatgcagacctgtgaagagtcaggatggtcaagttccatcccaacatgtatgccaatagactgtggcctccctcctcatatagattttggagactgtactaaactcaaagatgaccagggatattttgagcaagaagacgacatgatggaagttccatatgtgactcctcaccctccttatcatttgggagcagtggctaaaacctgggaaaatacaaaggagtctcctgctacacattcatcaaactttctgtatggtaccatggtttcatacacctgtaatccaggatatgaacttctggggaaccctgtgctgatctgccaggaagatggaacttggaatggcagtgcaccatcctgcatttcaattgaatgtgacttgcctactgctcctgaaaatggctttttgcgttttacagagactagcatgggaagtgctgtgcagtatagctgtaaacctggacacattctagcaggctctgacttaaggctttgtctagagaatagaaagtggagtggtgcctccccacgctgtgaagccatttcatgcaaaaagccaaatccagtcatgaatggatccatcaaaggaagcaactacacatacctgagcacgttgtactatgagtgtgaccccggatatgtgctgaatggcactgagaggagaacatgccaggatgacaaaaactgggatgaggatgagcccatttgcattcctgtggactgcagttcacccccagtctcagccaatggccaggtgagaggagacgagtacacattccaaaaagagattgaatacacttgcaatgaagggttcttgcttgagggagccaggagtcgggtttgtcttgccaatggaagttggagtggagccactcccgactgtgtgcctgtcagatgtgccaccccgccacaactggccaatggggtgacggaaggcctggactatggcttcatgaaggaagtaacattccactgtcacgagggctacatcttgcacggtgctccaaaactcacctgtcagtcagatggcaactgggatgcagagattcctctctgtaaaccagtcaactgtggacctcctgaagatcttgcccatggtttccctaatggtttttcctttattcatgggggccatatacagtatcagtgctttcctggttataagctccatggaaattcatcaagaaggtgcctctccaatggctcctggagtggcagctcaccttcctgcctgccttgcagatgttccacaccagtaattgaatatggaactgtcaatgggacagattttgactgtggaaaggcagcccggattcagtgcttcaaaggcttcaagctcctaggactttctgaaatcacctgtgaagccgatggccagtggagctctgggttcccccactgtgaacacacttcttgtggttctcttccaatgataccaaatgcgttcatcagtgagaccagctcttggaaggaaaatgtgataacttacagctgcaggtctggatatgtcatacaaggcagttcagatctgatttgtacagagaaaggggtatggagccagccttatccagtctgtgagcccttgtcctgtgggtccccaccgtctgtcgccaatgcagtggcaactggagaggcacacacctatgaaagtgaagtgaaactcagatgtctggaaggttatacgatggatacagatacagatacattcacctgtcagaaagatggtcgctggttccctgagagaatctcctgcagtcctaaaaaatgtcctctcccggaaaacataacacatatacttgtacatggggacgatttcagtgtgaataggcaagtttctgtgtcatgtgcagaagggtatacctttgagggagttaacatatcagtatgtcagcttgatggaacctgggagccaccattctccgatgaatcttgcagtccagtttcttgtgggaaacctgaaagtccagaacatggatttgtggttggcagtaaatacacctttgaaagcacaattatttatcagtgtgagcctggctatgaactagaggggaacagggaacgtgtctgccaggagaacagacagtggagtggaggggtggcaatatgcaaagagaccaggtgtgaaactccacttgaatttctcaatgggaaagctgacattgaaaacaggacgactggacccaacgtggtatattcctgcaacagaggctacagtcttgaagggccatctgaggcacactgcacagaaaatggaacctggagccacccagtccctctctgcaaaccaaatccatgccctgttccttttgtgattcccgagaatgctctgctgtctgaaaaggagttttatgttgatcagaatgtgtccatcaaatgtagggaaggttttctgctgcagggccacggcatcattacctgcaaccccgacgagacgtggacacagacaagcgccaaatgtgaaaaaatctcatgtggtccaccagctcacgtagaaaatgcaattgctcgaggcgtacattatcaatatggagacatgatcacctactcatgttacagtggatacatgttggagggtttcctgaggagtgtttgtttagaaaatggaacatggacatcacctcctatttgcagagctgtctgtcgatttccatgtcagaatgggggcatctgccaacgcccaaatgcttgttcctgtccagagggctggatggggcgcctctgtgaagaaccaatctgcattcttccctgtctgaacggaggtcgctgtgtggccccttaccagtgtgactgcccgcctggctggacggggtctcgctgtcatacagctgtttgccagtctccctgcttaaatggtggaaaatgtgtaagaccaaaccgatgtcactgtctttcttcttggacgggacataactgttccaggaaaaggaggactgggttttaaccactgcacgaccatctggctctcccaaaagcaggatcatctctcctcggtagtgcctgggcatcctggaacttatgcaaagaaagtccaacatggtgctgggtcttgtttagtaaacttgttacttggggttactttttttattttgtgatatattttgttattccttgtgacatactttcttacatgtttccatttttaaatatgcctgtattttctatataaaaattatattaaatagatgctgctctaccctcacaaaatgtacatattctgctgtctattgggaaagttcctggtacacatttttattcagttacttaaaatgatttttccattaaagtatattttgctactaaataatattttgctggatagtaccattttatgaggtggccaagggattcatagagaggactcatgatctttcatctgtgccactggcaccacataggagaccccttacaataaaggagacccctttgttctggttccatcttctatacaatatgtgtaataataaaagctttttctttcatttaatcaatcagagagtaactgttggacctggtactctccaccacataattatgtcctggtacttagggtagcctggctaattcttttcacaacatttgaaaagccgtaggcattaacttcatggatgtggagaaacagcataatgaccttggttcacaatgaaagtgctagccttctttctcgtggctggaataagaaatgcaagaactggaagattaacaaagagctgatacccggactggtaatcccacaactcactattttgggaggaaggggaagacagggaaagagaaggaaaaaggcaaatgggaaacattccccagagctgtgctcctggtctcacctgcaaaaaagaattgcagccacctaagagaaagctgagctgcccctcagtcctcactgtcacctacctctatcacaacaattgtaccaagatgaagccttccccagacttcagaaaataaagtcaaaccctagattttgttttaaaataggaaactcagaatcaacttgcctccatcctctgggaaaactgctcccacacaggccttggagtgtgttgtagcactgtggaggaatgcagaaaggatgaaagagatcttgattctcctagtggttctcttcactaccgtaggcatccctcagccattgactcctccttctttctcttgacattcactttcttggccagtcttacatgcttatgagtctactttccaataaatttactcatagtccattaa

SEQ ID NO: 21013 - DNA, 588 bp, Homo sapiens
  misc_feature 1..588: note = ENST00000476205
  source 1..588: mol_type = unassigned DNA
tggaacatggacatcacctcctatttgcagagctgtctgtcgatttccatgtcagaatgggggcatctgccaacgcccaaatgcttgttcctgtccagagggctggatggggcgcctctgtgaagaacgtgagttgctcttcagatcttactttgagtcctgacaaattgcctggatgctcccacctgaggggagttaccaggaaatggttgtactgttgggaagaattcatttgctgtaagtccttgtccacaccaaacagagcacatatgtgtcaacaggttgcagaagatctagaatattaatgactttgaaaatactgttattaagatccatctaaagtcattttcacatgttccctggcacaaatttgcaaaagtcttcttgagaaggagcttgttgtaaagtctccaagctatcctcttcccttaactcaaggtctactatgtgctatgtcagtcattgctgcagttggtataaacgtgcaccactgcaaaacatgtactttgcaggtaatatttgcagctcaccatttcctctttgttgttaagaatagtttctactcattaagaaaataagaaaagctgg

SEQ ID NO: 21014 - DNA, 5124 bp, Homo sapiens
  misc_feature 1..5124: note = ENST00000467821
  source 1..5124: mol_type = unassigned DNA
cactgatggatattccaatgggggagaccctagaccaattgcagcgtcactgcgagattcaggagtggagatcttcacttttggcatatggcaagggaacattcgagagctgaatgacatggcttccaccccaaaggaggagcactgttacctgctacacagttttgaagaatttgaggctttagctcgccgggcattgcatgaagatctaccttctgggagttttattcaagatgatatggtccactgctcatatctttgtgatgaaggcaaggactgctgtgaccgaatgggaagctgcaaatgtgggacacacacaggccattttgagtgcatctgtgaaaaggggtattacgggaaaggtctgcagtatgaatgcacagcttgcccatcggggacatacaaacctgaaggctcaccaggaggaatcagcagttgcattccatgtcctgatgaaaatcacacctctccacctggaagcacatcccctgaagactgtgtctgcagagagggatacagggcatctggccagacctgtgaacttgtccactgccctgccctgaagcctcccgaaaatggttactttatccaaaacacttgcaacaaccacttcaatgcagcctgtggggtccgatgtcaccctggatttgatcttgtgggaagcagcatcatcttatgtctacccaatggtttgtggtccggttcagagagctactgcagagtaagaacatgtcctcatctccgccagccgaaacatggccacatcagctgttctacaagggaaatgttatataagacaacatgtttggttgcctgtgatgaagggtacagactagaaggcagtgataagcttacttgtcaaggaaacagccagtgggatgggccagaaccccggtgtgtggagcgccactgttccacctttcagatgcccaaagatgtcatcatatccccccacaactgtggcaagcagccagccaaatttgggacgatctgctatgtaagttgccgccaagggttcattttatctggagtcaaagaaatgctgagatgtaccacttctggaaaatggaatgtcggagttcaggcagctgtgtgtaaagacgtggaggctcctcaaatcaactgtcctaaggacatagaggctaagactctggaacagcaagattctgccaatgttacctggcagattccaacagctaaagacaactctggtgaaaaggtgtcagtccacgttcatccagctttcaccccaccttaccttttcccaattggagatgttgctatcgtatacacggcaactgacctatccggcaaccaggccagctgcattttccatatcaaggttattgatgcagaaccacctgtcatagactggtgcagatctccacctcccgtccaggtctcggagaaggtacatgccgcaagctgggatgagcctcagttctcagacaactcaggggctgaattggtcattaccagaagtcatacacaaggagaccttttccctcaaggggagactatagtacagtatacagccactgacccctcaggcaataacaggacatgtgatatccatattgtcataaaaggttctccctgtgaaattccattcacacctgtaaatggggattttatatgcactccagataatactggagtcaactgtacattaacttgcttggagggctatgatttcacagaagggtctactgacaagtattattgtgcttatgaagatggcgtctggaaaccaacatataccactgaatggccagactgtgccaaaaaacgttttgcaaaccacgggttcaagtcctttgagatgttctacaaagcagctcgttgtgatgacacagatctgatgaagaagttttctgaagcatttgagacgaccctgggaaaaatggtcccatcattttgtagtgatgcagaggacattgactgcagactggaggagaacctgaccaaaaaatattgcctagaatataattatgactatgaaaatggctttgcaattggaccaggtggctggggtgcagctaataggctggattactcttacgatgacttcctggacactgtgcaagaaacagccacaagcatcggcaatgccaagtcctcacggattaaaagaagtgccccattatctgactataaaattaagttaatttttaacatcacagctagtgtgccattacccgatgaaagaaatgatacccttgaatgggaaaatcagcaacgactccttcagacattggaaactatcacaaataaactgaaaaggactctcaacaaagaccccatgtattcctttcagcttgcatcagaaatacttatagccgacagcaattcattagaaacaaaaaaggcttcccccttctgcagaccaggctcagtgctgagagggcgtatgtgtgtcaattgccctttgggaacctattataatctggaacatttcacctgtgaaagctgccggatcggatcctatcaagatgaagaagggcaacttgagtgcaagctttgcccctctgggatgtacacggaatatatccattcaagaaacatctctgattgtaaagctcagtgtaaacaaggcacctactcatacagtggacttgagacttgtgaatcgtgtccactgggcacttatcagccaaaatttggttcccggagctgcctctcgtgtccagaaaacacctcaactgtgaaaagaggagccgtgaacatttctgcatgtggagttccttgtccagaaggaaaattctcgcgttctgggttaatgccctgtcacccatgtcctcgtgactattaccaacctaatgcagggaaggccttctgcctggcctgtcccttttatggaactaccccattcgctggttccagatccatcacagaatgttcaagttttagttcaactttctcagcggcagaggaaagtgtggtgccccctgcctctcttggacatattaaaaagaggcatgaaatcagcagtcaggttttccatgaatgcttctttaacccttgccacaatagtggaacctgccagcaacttgggcgtggttatgtttgtctctgtccacttggatatacaggcttaaagtgtgaaacagacatcgatgagtgcagcccactgccttgcctcaacaatggagtttgtaaagacctagttggggaattcatttgtgagtgcccatcaggttacacaggtcagcggtgtgaagaaaatataaatgagtgtagctccagtccttgtttaaataaaggaatctgtgttgatggtgtggctggctatcgttgcacatgtgtgaaaggatttgtaggcctgcattgtgaaacagaagtcaatgaatgccagtcaaacccatgcttaaataatgcagtctgtgaagaccaggttgggggattcttgtgcaaatgcccacctggatttttgggtacccgatgtggaaagaacgtcgatgagtgtctcagtcagccatgcaaaaatggagctacctgtaaagacggtgccaatagcttcagatgcctgtgtgcagctggcttcacaggatcacactgtgaattgaacatcaatgaatgtcagtctaatccatgtagaaatcaggccacctgtgtggatgaattaaattcatacagttgtaaatgtcagccaggattttcaggcaaaaggtgtgaaacagaacagtctacaggctttaacctggattttgaagtttctggcatctatggatatgtcatgctagatggcatgctcccatctctccatgctctaacctgtaccttctggatgaaatcctctgacgacatgaactatggaacaccaatctcctatgcagttgataacggcagcgacaataccttgctcctgactgattataacggctgggttctttatgtgaatggcagggaaaagataacaaactgtccctcggtgaatgatggcagatggcatcatattgcaatcacttggacaagtgccaatggcatctggaaagtctatatcgatgggaaattatctgacggtggtgctggcctctctgttggtttgcccatacctggtatgttttaacaaaatgagtataattctgttggactctagaggtgatgctgcttaaatggacatcaggtttgctagcattgttgttcttggtttcaaacaaagattaacagctatctctcttatttcctactccctgattatcctaactgtgggttattagaagcttttttcctaagtaagctgtttgcctctctgtgtgagaaatgcctttgaagatctacattaagactaccaagaagcatgctgaattagcagctggttgctaaactgtcttctaaggagattaattactggtattttttgtttattttaaggattgttttgttttgtaatcagtatataagcaggaccactgctatccatcttttatggcccttttcaaatagatcttggcttgtcttctaaaaaatactttttaataaatatcccaggagttttagtttgaagaattgcaaactaaatttcattaggtgacccaggttctcagcattgtacatggcaataagcttgttctatctggatacatctatagaagtatatgcatatgacattattttttactttgctcatttgtttcaggtatactaaaagaaaattaaatagacaaaaatgaattaaagtattagaaactgactaatacattctagaagtaagttgtatgaaactaggatacgtatactaataaatatagcacaaaaatactaaacttcataaaaatgcggtgagatgacccttgcgaagcctcaaatacaatacttattttatttattagaaattattggccaggtacggtggctcacgcctgtaatcccagcactttggaaggctgaggagggtggatcacgaggtcaggagttggagaccgccctggacaatatggtgaagccctatctctactaaaaacgcacagaaaaattagccaggcatggtggtagatgcctgtaattccagctactcaggaggctgaggcaggagaatcgcttgaacccaggaggcgaagattgccgtgagccgagatcatgccactgcactccagcctgggcaatggagagaggctctgtctc

SEQ ID NO: 21015 - DNA, 3257 bp, Homo sapiens
  misc_feature 1..3257: note = ENST00000374461
  source 1..3257: mol_type = unassigned DNA
agggagagaaggagggaagcgggagatttttcttgactgccccctttccttcaaacattttataggcttcagggagagagaggaggaggagagagggaagaaaaaaagaggagagcgagaggggtagagagcgcgcgccgttccctccggagttcccgagctgctgaggagtctggattgtgtctgtccccagtgtcagatgaaagggcgctgaggctcttggccgctgccccgcgcccagctccgcgcacgcccctctgcgagtccggccgcccagcgcctcttcccgcccgagccgccgcctgcgctccggggcagccgctctgtctccagcgcgatgtggcctcgcctggccttttgttgctggggtctggcgctcgtttcgggctgggcgacctttcagcagatgtccccgtcgcgcaatttcagcttccgcctcttccccgagaccgcgcccggggcccccgggagtatccccgcgccgcccgctcctggcgacgaagcggcggggagcagagtggagcggctgggccaggcgttccggcgacgcgtgcggctgctgcgggagctcagcgagcgcctggagcttgtcttcctggtggatgattcgtccagcgtgggcgaagtcaacttccgcagcgagctcatgttcgtccgcaagctgctgtccgacttccccgtggtgcccacggccacgcgcgtggccatcgtgaccttctcgtccaagaactacgtggtgccgcgcgtcgattacatctccacccgccgcgcgcgccagcacaagtgcgcgctgctcctccaagagatccctgccatctcctaccgaggtggcggcacctacaccaagggcgccttccagcaagccgcgcaaattcttcttcatgctagagaaaactcaacaaaagttgtatttctcatcactgatggatattccaatgggggagaccctagaccaattgcagcgtcactgcgagattcaggagtggagatcttcacttttggcatatggcaagggaacattcgagagctgaatgacatggcttccaccccaaaggaggagcactgttacctgctacacagttttgaagaatttgaggctttagctcgccgggcattgcatgaagatctaccttctgggagttttattcaagatgatatggtccactgctcatatctttgtgatgaaggcaaggactgctgtgaccgaatgggaagctgcaaatgtgggacacacacaggccattttgagtgcatctgtgaaaaggggtattacgggaaaggtctgcagtatgaatgcacagcttgcccatcggggacatacaaacctgaaggctcaccaggaggaatcagcagttgcattccatgtcctgatgaaaatcacacctctccacctggaagcacatcccctgaagactgtgtctgcagagagggatacagggcatctggccagacctgtgaacttgtccactgccctgccctgaagcctcccgaaaatggttactttatccaaaacacttgcaacaaccacttcaatgcagcctgtggggtccgatgtcaccctggatttgatcttgtgggaagcagcatcatcttatgtctacccaatggtttgtggtccggttcagagagctactgcagagtaagaacatgtcctcatctccgccagccgaaacatggccacatcagctgttctacaagggaaatgttatataagacaacatgtttggttgcctgtgatgaagggtacagactagaaggcagtgataagcttacttgtcaaggaaacagccagtgggatgggccagaaccccggtgtgtggagcgccactgttccacctttcagatgcccaaagatgtcatcatatccccccacaactgtggcaagcagccagccaaatttgggacgatctgctatgtaagttgccgccaagggttcattttatctggagtcaaagaaatgctgagatgtaccacttctggaaaatggaatgtcggagttcaggcagctgtgtgtaaagacgtggaggctcctcaaatcaactgtcctaaggacatagaggctaagactctggaacagcaagattctgccaatgttacctggcagattccaacagctaaagacaactctggtgaaaaggtgtcagtccacgttcatccagctttcaccccaccttaccttttcccaattggagatgttgctatcgtatacacggcaactgacctatccggcaaccaggccagctgcattttccatatcaaggttattgatgcagaaccacctgtcatagactggtgcagatctccacctcccgtccaggtctcggagaaggtacatgccgcaagctgggatgagcctcagttctcagacaactcaggggctgaattggtcattaccagaagtcatacacaaggagaccttttccctcaaggggagactatagtacagtatacagccactgacccctcaggcaataacaggacatgtgatatccatattgtcataaaaggttctccctgtgaaattccattcacacctgtaaatggggattttatatgcactccagataatactggagtcaactgtacattaacttgcttggagggctatgatttcacagaagggtctactgacaagtattattgtgcttatgaagatggcgtctggaaaccaacatataccactgaatggccagactgtgccaaaaaacgttttgcaaaccacgggttcaagtcctttgagatgttctacaaagcagctcgttgtgatgacacagatctgatgaagaagttttctgaagcatttgagacgaccctgggaaaaatggtcccatcattttgtagtgatgcagaggacattgactgcagactggaggagaacctgaccaaaaaatattgcctagaatataattatgactatgaaaatggctttgcaattggtaattaaattctgtggcatcggtagttggcaagactaatctgcaaaataagaataattccagaaaagtgaggcaaactagaaacattaacttctattaatttattcatcaagtattttaggatggctaaataatttgataatgtgctgaaagatcattaaggttatatcaaattttagtaacaaataaattatttaaaattatttgccaggattcttaaaaatgacaaaaactaagaaaactaagtcacatatgctggtaaaattcaaatgttgatgtatcctaaaagagaatagtaataaagtcctaacagcaactttt

SEQ ID NO: 21016 - DNA, 12350 bp, Homo sapiens
  misc_feature 1..12350: note = ENST00000401783
  source 1..12350: mol_type = unassigned DNA
agggagagaaggagggaagcgggagatttttcttgactgccccctttccttcaaacattttataggcttcagggagagagaggaggaggagagagggaagaaaaaaagaggagagcgagaggggtagagagcgcgcgccgttccctccggagttcccgagctgctgaggagtctggattgtgtctgtccccagtgtcagatgaaagggcgctgaggctcttggccgctgccccgcgcccagctccgcgcacgcccctctgcgagtccggccgcccagcgcctcttcccgcccgagccgccgcctgcgctccggggcagccgctctgtctccagcgcgatgtggcctcgcctggccttttgttgctggggtctggcgctcgtttcgggctgggcgacctttcagcagatgtccccgtcgcgcaatttcagcttccgcctcttccccgagaccgcgcccggggcccccgggagtatccccgcgccgcccgctcctggcgacgaagcggcggggagcagagtggagcggctgggccaggcgttccggcgacgcgtgcggctgctgcgggagctcagcgagcgcctggagcttgtcttcctggtggatgattcgtccagcgtgggcgaagtcaacttccgcagcgagctcatgttcgtccgcaagctgctgtccgacttccccgtggtgcccacggccacgcgcgtggccatcgtgaccttctcgtccaagaactacgtggtgccgcgcgtcgattacatctccacccgccgcgcgcgccagcacaagtgcgcgctgctcctccaagagatccctgccatctcctaccgaggtggcggcacctacaccaagggcgccttccagcaagccgcgcaaattcttcttcatgctagagaaaactcaacaaaagttgtatttctcatcactgatggatattccaatgggggagaccctagaccaattgcagcgtcactgcgagattcaggagtggagatcttcacttttggcatatggcaagggaacattcgagagctgaatgacatggcttccaccccaaaggaggagcactgttacctgctacacagttttgaagaatttgaggctttagctcgccgggcattgcatgaagatctaccttctgggagttttattcaagatgatatggtccactgctcatatctttgtgatgaaggcaaggactgctgtgaccgaatgggaagctgcaaatgtgggacacacacaggccattttgagtgcatctgtgaaaaggggtattacgggaaaggtctgcagtatgaatgcacagcttgcccatcggggacatacaaacctgaaggctcaccaggaggaatcagcagttgcattccatgtcctgatgaaaatcacacctctccacctggaagcacatcccctgaagactgtgtctgcagagagggatacagggcatctggccagacctgtgaacttgtccactgccctgccctgaagcctcccgaaaatggttactttatccaaaacacttgcaacaaccacttcaatgcagcctgtggggtccgatgtcaccctggatttgatcttgtgggaagcagcatcatcttatgtctacccaatggtttgtggtccggttcagagagctactgcagagtaagaacatgtcctcatctccgccagccgaaacatggccacatcagctgttctacaagggaaatgttatataagacaacatgtttggttgcctgtgatgaagggtacagactagaaggcagtgataagcttacttgtcaaggaaacagccagtgggatgggccagaaccccggtgtgtggagcgccactgttccacctttcagatgcccaaagatgtcatcatatccccccacaactgtggcaagcagccagccaaatttgggacgatctgctatgtaagttgccgccaagggttcattttatctggagtcaaagaaatgctgagatgtaccacttctggaaaatggaatgtcggagttcaggcagctgtgtgtaaagacgtggaggctcctcaaatcaactgtcctaaggacatagaggctaagactctggaacagcaagattctgccaatgttacctggcagattccaacagctaaagacaactctggtgaaaaggtgtcagtccacgttcatccagctttcaccccaccttaccttttcccaattggagatgttgctatcgtatacacggcaactgacctatccggcaaccaggccagctgcattttccatatcaaggttattgatgcagaaccacctgtcatagactggtgcagatctccacctcccgtccaggtctcggagaaggtacatgccgcaagctgggatgagcctcagttctcagacaactcaggggctgaattggtcattaccagaagtcatacacaaggagaccttttccctcaaggggagactatagtacagtatacagccactgacccctcaggcaataacaggacatgtgatatccatattgtcataaaaggttctccctgtgaaattccattcacacctgtaaatggggattttatatgcactccagataatactggagtcaactgtacattaacttgcttggagggctatgatttcacagaagggtctactgacaagtattattgtgcttatgaagatggcgtctggaaaccaacatataccactgaatggccagactgtgccaaaaaacgttttgcaaaccacgggttcaagtcctttgagatgttctacaaagcagctcgttgtgatgacacagatctgatgaagaagttttctgaagcatttgagacgaccctgggaaaaatggtcccatcattttgtagtgatgcagaggacattgactgcagactggaggagaacctgaccaaaaaatattgcctagaatataattatgactatgaaaatggctttgcaattggaccaggtggctggggtgcagctaataggctggattactcttacgatgacttcctggacactgtgcaagaaacagccacaagcatcggcaatgccaagtcctcacggattaaaagaagtgccccattatctgactataaaattaagttaatttttaacatcacagctagtgtgccattacccgatgaaagaaatgatacccttgaatgggaaaatcagcaacgactccttcagacattggaaactatcacaaataaactgaaaaggactctcaacaaagaccccatgtattcctttcagcttgcatcagaaatacttatagccgacagcaattcattagaaacaaaaaaggcttcccccttctgcagaccaggctcagtgctgagagggcgtatgtgtgtcaattgccctttgggaacctattataatctggaacatttcacctgtgaaagctgccggatcggatcctatcaagatgaagaagggcaacttgagtgcaagctttgcccctctgggatgtacacggaatatatccattcaagaaacatctctgattgtaaagctcagtgtaaacaaggcacctactcatacagtggacttgagacttgtgaatcgtgtccactgggcacttatcagccaaaatttggttcccggagctgcctctcgtgtccagaaaacacctcaactgtgaaaagaggagccgtgaacatttctgcatgtggagttccttgtccagaaggaaaattctcgcgttctgggttaatgccctgtcacccatgtcctcgtgactattaccaacctaatgcagggaaggccttctgcctggcctgtcccttttatggaactaccccattcgctggttccagatccatcacagaatgttcaagttttagttcaactttctcagcggcagaggaaagtgtggtgccccctgcctctcttggacatattaaaaagaggcatgaaatcagcagtcaggttttccatgaatgcttctttaacccttgccacaatagtggaacctgccagcaacttgggcgtggttatgtttgtctctgtccacttggatatacaggcttaaagtgtgaaacagacatcgatgagtgcagcccactgccttgcctcaacaatggagtttgtaaagacctagttggggaattcatttgtgagtgcccatcaggttacacaggtcagcggtgtgaagaaaatataaatgagtgtagctccagtccttgtttaaataaaggaatctgtgttgatggtgtggctggctatcgttgcacatgtgtgaaaggatttgtaggcctgcattgtgaaacagaagtcaatgaatgccagtcaaacccatgcttaaataatgcagtctgtgaagaccaggttgggggattcttgtgcaaatgcccacctggatttttgggtacccgatgtggaaagaacgtcgatgagtgtctcagtcagccatgcaaaaatggagctacctgtaaagacggtgccaatagcttcagatgcctgtgtgcagctggcttcacaggatcacactgtgaattgaacatcaatgaatgtcagtctaatccatgtagaaatcaggccacctgtgtggatgaattaaattcatacagttgtaaatgtcagccaggattttcaggcaaaaggtgtgaaacagaacagtctacaggctttaacctggattttgaagtttctggcatctatggatatgtcatgctagatggcatgctcccatctctccatgctctaacctgtaccttctggatgaaatcctctgacgacatgaactatggaacaccaatctcctatgcagttgataacggcagcgacaataccttgctcctgactgattataacggctgggttctttatgtgaatggcagggaaaagataacaaactgtccctcggtgaatgatggcagatggcatcatattgcaatcacttggacaagtgccaatggcatctggaaagtctatatcgatgggaaattatctgacggtggtgctggcctctctgttggtttgcccatacctggtatgttaggtggtggtgcgttagttctggggcaagagcaagacaaaaaaggagagggattcagcccagctgagtcttttgtgggctccataagccagctcaacctctgggactatgtcctgtctccacagcaggtgaagtcactggctacctcctgcccagaggaactcagtaaaggaaacgtgttagcatggcctgatttcttgtcaggaattgtggggaaagtgaagatcgattctaagagcatattttgttctgattgcccacgcttaggagggtcagtgcctcatctgagaactgcatctgaagatttaaagccaggttccaaagtcaatctgttctgtgatccaggcttccagctggtcgggaaccctgtgcagtactgtctgaatcaaggacagtggacacaaccacttcctcactgtgaacgcattagctgtggggtgccacctcctttggagaatggcttccattcagccgatgacttctatgctggcagcacagtaacctaccagtgcaacaatggctactatctattgggtgactcaaggatgttctgtacagataatgggagctggaacggcgtttcaccatcctgccttgatgtcgatgagtgtgcagttggatcagattgtagtgagcatgcttcttgcctgaacgtagatggatcctacatatgttcatgtgtcccaccgtacacaggagatgggaaaaactgtgcagaacctataaaatgtaaggctccaggaaatccggaaaatggccactcctcaggtgagatttatacagtaggtgccgaagtcacattttcgtgtcaggaaggataccagttgatgggagtaaccaaaatcacatgtttggagtctggagaatggaatcatctaataccatattgtaaagctgtttcatgtggtaaaccggctattccagaaaatggttgcattgaggagttagcatttacttttggcagcaaagtgacatataggtgtaataaaggatatactctggccggtgataaagaatcatcctgtcttgctaacagttcttggagtcattcccctcctgtgtgtgaaccagtgaagtgttctagtccggaaaatataaataatggaaaatatattttgagtgggcttacctacctttctactgcatcatattcatgcgatacaggatacagcttacagggcccttccattattgaatgcacggcttctggcatctgggacagagcgccacctgcctgtcacctcgtcttctgtggagaaccacctgccatcaaagatgctgtcattacggggaataacttcactttcaggaacaccgtcacttacacttgcaaagaaggctatactcttgctggtcttgacaccattgaatgcctggccgacggcaagtggagtagaagtgaccagcagtgcctggctgtctcctgtgatgagccacccattgtggaccacgcctctccagagactgcccatcggctctttggagacattgcattctactactgctctgatggttacagcctagcagacaattcccagcttctctgcaatgcccagggcaagtgggtacccccagaaggtcaagacatgccccgttgtatagctcatttctgtgaaaaacctccatcggtttcctatagcatcttggaatctgtgagcaaagcaaaatttgcagctggctcagttgtgagctttaaatgcatggaaggctttgtactgaacacctcagcaaagattgaatgtatgagaggtgggcagtggaacccttcccccatgtccatccagtgcatccctgtgcggtgtggagagccaccaagcatcatgaatggctatgcaagtggatcaaactacagttttggagccatggtggcttacagctgcaacaaggggttctacatcaaaggggaaaagaagagcacctgcgaagccacagggcagtggagtagtcctataccgacgtgccacccggtatcttgtggtgaaccacctaaggttgagaatggctttctggagcatacaactggcaggatctttgagagtgaagtgaggtatcagtgtaacccgggctataagtcagtcggaagtcctgtatttgtctgccaagccaatcgccactggcacagtgaatcccctctgatgtgtgttcctctcgactgtggaaaacctcccccgatccagaatggcttcatgaaaggagaaaactttgaagtagggtccaaggttcagtttttctgtaatgagggttatgagcttgttggtgacagttcttggacatgtcagaaatctggcaaatggaataagaagtcaaatccaaagtgcatgcctgccaagtgcccagagccgcccctcttggaaaaccagctagtattaaaggagttgaccaccgaggtaggagttgtgacattttcctgtaaagaagggcatgtcctgcaaggcccctctgtcctgaaatgcttgccatcccagcaatggaatgactctttccctgtttgtaagattgttctttgtaccccacctcccctaatttcctttggtgtccccattccttcttctgctcttcattttggaagtactgtcaagtattcttgtgtaggtgggtttttcctaagaggaaattctaccaccctctgccaacctgatggcacctggagctctccactgccagaatgtgttccagtagaatgtccccaacctgaggaaatccccaatggaatcattgatgtgcaaggccttgcctatctcagcacagctctctatacctgcaagccaggctttgaattggtgggaaatactaccaccctttgtggagaaaatggtcactggcttggaggaaaaccaacatgtaaagccattgagtgcctgaaacccaaggagattttgaatggcaaattctcttacacggacctacactatggacagaccgttacctactcttgcaaccgaggctttcggctcgaaggtcccagtgccttgacctgtttagagacaggtgattgggatgtagatgccccatcttgcaatgccatccactgtgattccccacaacccattgaaaatggttttgtagaaggtgcagattacagctatggtgccataatcatctacagttgcttccctgggtttcaggtggctggtcatgccatgcagacctgtgaagagtcaggatggtcaagttccatcccaacatgtatgccaatagactgtggcctccctcctcatatagattttggagactgtactaaactcaaagatgaccagggatattttgagcaagaagacgacatgatggaagttccatatgtgactcctcaccctccttatcatttgggagcagtggctaaaacctgggaaaatacaaaggagtctcctgctacacattcatcaaactttctgtatggtaccatggtttcatacacctgtaatccaggatatgaacttctggggaaccctgtgctgatctgccaggaagatggaacttggaatggcagtgcaccatcctgcatttcaattgaatgtgacttgcctactgctcctgaaaatggctttttgcgttttacagagactagcatgggaagtgctgtgcagtatagctgtaaacctggacacattctagcaggctctgacttaaggctttgtctagagaatagaaagtggagtggtgcctccccacgctgtgaagccatttcatgcaaaaagccaaatccagtcatgaatggatccatcaaaggaagcaactacacatacctgagcacgttgtactatgagtgtgaccccggatatgtgctgaatggcactgagaggagaacatgccaggatgacaaaaactgggatgaggatgagcccatttgcattcctgtggactgcagttcacccccagtctcagccaatggccaggtgagaggagacgagtacacattccaaaaagagattgaatacacttgcaatgaagggttcttgcttgagggagccaggagtcgggtttgtcttgccaatggaagttggagtggagccactcccgactgtgtgcctgtcagatgtgccaccccgccacaactggccaatggggtgacggaaggcctggactatggcttcatgaaggaagtaacattccactgtcacgagggctacatcttgcacggtgctccaaaactcacctgtcagtcagatggcaactgggatgcagagattcctctctgtaaaccagtcaactgtggacctcctgaagatcttgcccatggtttccctaatggtttttcctttattcatgggggccatatacagtatcagtgctttcctggttataagctccatggaaattcatcaagaaggtgcctctccaatggctcctggagtggcagctcaccttcctgcctgccttgcagatgttccacaccagtaattgaatatggaactgtcaatgggacagattttgactgtggaaaggcagcccggattcagtgcttcaaaggcttcaagctcctaggactttctgaaatcacctgtgaagccgatggccagtggagctctgggttcccccactgtgaacacacttcttgtggttctcttccaatgataccaaatgcgttcatcagtgagaccagctcttggaaggaaaatgtgataacttacagctgcaggtctggatatgtcatacaaggcagttcagatctgatttgtacagagaaaggggtatggagccagccttatccagtctgtgagcccttgtcctgtgggtccccaccgtctgtcgccaatgcagtggcaactggagaggcacacacctatgaaagtgaagtgaaactcagatgtctggaaggttatacgatggatacagatacagatacattcacctgtcagaaagatggtcgctggttccctgagagaatctcctgcagtcctaaaaaatgtcctctcccggaaaacataacacatatacttgtacatggggacgatttcagtgtgaataggcaagtttctgtgtcatgtgcagaagggtatacctttgagggagttaacatatcagtatgtcagcttgatggaacctgggagccaccattctccgatgaatcttgcagtccagtttcttgtgggaaacctgaaagtccagaacatggatttgtggttggcagtaaatacacctttgaaagcacaattatttatcagtgtgagcctggctatgaactagaggggaacagggaacgtgtctgccaggagaacagacagtggagtggaggggtggcaatatgcaaagagaccaggtgtgaaactccacttgaatttctcaatgggaaagctgacattgaaaacaggacgactggacccaacgtggtatattcctgcaacagaggctacagtcttgaagggccatctgaggcacactgcacagaaaatggaacctggagccacccagtccctctctgcaaaccaaatccatgccctgttccttttgtgattcccgagaatgctctgctgtctgaaaaggagttttatgttgatcagaatgtgtccatcaaatgtagggaaggttttctgctgcagggccacggcatcattacctgcaaccccgacgagacgtggacacagacaagcgccaaatgtgaaaaaatctcatgtggtccaccagctcacgtagaaaatgcaattgctcgaggcgtacattatcaatatggagacatgatcacctactcatgttacagtggatacatgttggagggtttcctgaggagtgtttgtttagaaaatggaacatggacatcacctcctatttgcagagctgtctgtcgatttccatgtcagaatgggggcatctgccaacgcccaaatgcttgttcctgtccagagggctggatggggcgcctctgtgaagaaccaatctgcattcttccctgtctgaacggaggtcgctgtgtggccccttaccagtgtgactgcccgcctggctggacggggtctcgctgtcatacagctgtttgccagtctccctgcttaaatggtggaaaatgtgtaagaccaaaccgatgtcactgtctttcttcttggacgggacataactgttccaggaaaaggaggactgggttttaaccactgcacgaccatctggctctcccaaaagcaggatcatctctcctcggtagtgcctgggcatcctggaacttatgcaaagaaagtccaacatggtgctgggtcttgtttagtaaacttgttacttggggttactttttttattttgtgatatattttgttattccttgtgacatactttcttacatgtttccatttttaaatatgcctgtattttctatataaaaattatattaaatagatgctgctctaccctcacaaaatgtacatattctgctgtctattgggaaagttcctggtacacatttttattcagttacttaaaatgatttttccattaaagtatattttgctactaaataatattttgctggatagtaccattttatgaggtggccaagggattcatagagaggactcatgatctttcatctgtgccactggcaccacataggagaccccttacaataaaggagacccctttgttctggttccatcttctatacaatatgtgtaataataaaagctttttctttcatttaatcaatcagagagtaactgttggacctggtactctccaccacataattatgtcctggtacttagggtagcctggctaattcttttcacaacatttgaaaagccgtaggcattaacttcatggatgtggagaaacagcataatgaccttggttcacaatgaaagtgctagccttctttctcgtggctggaataagaaatgcaagaactggaagattaacaaagagctgatacccggactggtaatcccacaactcactattttgggaggaaggggaagacagggaaagagaaggaaaaaggcaaatgggaaacattccccagagctgtgctcctggtctcacctgcaaaaaagaattgcagccacctaagagaaagctgagctgcccctcagtcctcactgtcacctacctctatcacaacaattgtaccaagatgaagccttccccagacttcagaaaataaagtcaaaccctagattttgttttaaaataggaaactcagaatcaacttgcctccatcctctgggaaaactgctcccacacaggccttggagtgtgttgtagcactgtggaggaatgcagaaaggatgaaagagatcttgattctcctagtggttctcttcactaccgtaggcatccctcagccattgactcctccttctttctcttgacattcactttcttggccagtcttacatgcttatgagtctactttccaataaatttactcatagtccattaacttcc

SEQ ID NO: 21017 - DNA, 6729 bp, Homo sapiens
  misc_feature 1..6729: note = ENST00000375400
  source 1..6729: mol_type = unassigned DNA
ctgtcggcgggaagcggcgatcctgccaccgggaggtgtggaagagccgggtagattctggctacattggagattggttgctttctaaaactgaaggagaagcccatgaagagatggtggattctcactgagttttgactagcggaagaaaagagagagttcaagtggatggccttgaggacttgaaaagctgagatatgatgattttgaagtcatttcacatcgaagccatgatttaaatatcggcgttaagatttcaacaagaaaaacttaagcttccttggattcccacgtcaaaggaaagtttcaagctttcagaaggagttctcactcgaagataaagaacagctcgctaaccacgaaagaggaatcgatgctcagcttttagttgcacttcctaaagttgcagaattaagacaaatctttgaaccaaagaagaaagaattcttagaaatgaaaagaaaagaaagaattgccaggcgcctggaagggattgaaaatgacactcagcccatcctcttgcagagctgcacaggattggtgactcaccgcctgctggaggaagacacccctcgatacatgagagccagcgaccctgccagcccccacatcggccgatcaaatgaagaggaggaaacttctgattcttctctagaaaagcaaactcgatccaaatactgcacagaaacctccggtgtccacggtgactcaccctatggttcgggtaccatggacacccacagtctggagtccaaagccgaaagaattgcaaggtacaaagcagaaagaaggcgacagctggcagagaagtatgggctgactctggatcccgaggccgactccgagtatttatcccgctataccaagtccaggaaggagcctgatgctgtcgagaagcggggaggaaaaagtgacaaacaggaagagtcaagcagagatgctagttctctgtaccccgggaccgagacgatggggctcaggacctgtgccggtgaatccaaggactatgccctccatgtgggtgacggctcttccgacccggaggtgctgctgaacatagaaaaccaaagacgaggtcaagagctgagtgccacccggcaggcccatgacctgtccccagcagccgagagttcctcgaccttctctttctctgggcgagactcctccttcactgaagtgccacggtcccccaagcacgcccacagctcctccctgcagcaggcagcctcccggagcccctcctttggtgacccacagctatcccctgaggcccgacccaggtgcacttcacattcagaaacgccaactgtcgatgatgaagaaaaggtggatgaacgagccaagctgagcgtcgccgccaagaggttgcttttcagggagatggaaaaatcttttgatgaacaaaatgttccaaagcgacgctcaagaaacacagctgtggagcagaggctacgccgtctgcaggacaggtccctcacccagcccatcaccactgaagaggtggtcatcgcagccacattgcaggcctctgctcaccaaaaggccttagccaaggaccagacaaatgagggcaaagagcttgctgagcaaggagaacctgattcctccactctaagcttggccgaaaagttggccttgtttaacaaattgtcccagccagtctcaaaagcgatttctacccggaacagaatagacacgagacagaggagaatgaacgctcgctatcaaactcagccagtcacactgggagaggtggagcaggtgcagagtggaaagctcattcctttctcacctgccgtgaacacatcagtgtctaccgtagcatccacggttgctccaatgtatgccggagatcttcgcacaaagccacctcttgaccacaatgcaagtgccactgactataagttttcttcttcaatagaaaattcggactctccagttagaagcattctgaaatcgcaagcttggcagcctttggtagagggtagcgagaacaagggaatgttgagagaatatggagagacagaaagcaagagagctttgacaggtcgagacagtgggatggagaagtatgggtcctttgaggaagcagaagcatcctaccccatcctgaaccgagccagggaaggagacagccataaggaatctaaatatgctgttcccagaagaggaagcctggaacgggcgaaccctcccatcacccacctcggggatgaaccgaaggaattttccatggctaaaatgaatgcacaaggaaacttggacttgagggacaggctgccctttgaagagaaggtggaggtggagaatgttatgaaaaggaagttttcactaagagcggcagagttcggggagcccacttccgagcagacggggacagctgctgggaaaactattgctcaaaccacagcccccgtgtcctggaagccccaggattcttcggaacagccacaggagaagctctgcaagaatccatgtgcgatgtttgctgctggagagatcaaaacgccgacaggggagggccttcttgactcacccagcaaaaccatgtctattaaagaaagattggcactgttgaagaaaagcggggaggaagattggagaaacagactcagcaggaggcaggagggcggcaaggcgccggccagcagcctgcacacccaggaagcagggcggtccctcatcaagaagcgggtcacagaaagtcgagagagccaaatgacgattgaggagaggaagcagctcatcactgtgagagaggaggcctggaagacgagaggcagaggagcggccaacgactcgacccagttcactgtggctggcaggatggtgaagaaaggtttggcgtcacctactgccataaccccagtagcctcacccatttgcggtaaaacaagaggcaccacacccgtttccaaacccctggaagatatcgaagccagaccagatatgcagttagaatcggacctgaagttggacaggctggaaacctttctaagaaggctgaataacaaagttggcgggatgcacgaaacggtgctcactgtcaccggcaaatctgtgaaggaggtgatgaagccagatgatgatgaaacctttgccaaattttaccgcagcgtggattataatatgccaagaagtcctgtggagatggatgaggacttcgatgtcattttcgatccttatgcacccaaattgacgtcttccgtggccgagcacaagcgggcagttaggcccaagcgccgggttcaggcctccaaaaaccccctgaaaatgctggcggcaagagaagatctccttcaggaatacactgagcagagattaaacgttgccttcatggagtcaaagcggatgaaagtagaaaagatgtcttccaactccaacttctcagaagtcaccctggcgggtttagccagtaaagaaaacttcagcaacgtcagcctgcggagcgtcaacctgacggaacagaactctaacaacagcgccgtgccctacaagaggctgatgctgttgcagattaaaggaagaagacatgtgcagaccaggctggtggaacctcgagcttcggcgctcaacagtggggactgcttcctcctgctctctccccactgctgcttcctgtgggtaggagagtttgcaaacgtcatagaaaaggcgaaggcctcagaacttgcaactttaattcagacaaagagggaacttggttgtagagctacttatatccaaaccattgaagaaggaattaatacacacactcatgcagccaaagacttctggaagcttctgggtggccaaaccagttaccaatctgctggagacccaaaagaagatgaactctatgaagcagccataatagaaactaactgcatttaccgtctcatggatgacaaacttgttcctgatgacgactactgggggaaaattccgaagtgctcccttctgcaacccaaagaggtactggtgtttgattttggtagtgaagtttacgtatggcatgggaaagaagtcacattagcacaacgaaaaatagcatttcagctggcaaagcacttatggaatggaacctttgactatgagaactgtgacatcaatcccctggatcctggagaatgcaatccgcttatccccagaaaaggacaggggcggcccgactgggcgatatttgggagacttactgaacacaatgagacgattttgttcaaagagaagtttctggattggacggaactgaagagatcgaatgagaagaaccccggggaacttgcccagcacaaggaagaccccaggactgatgtcaaggcatacgatgtgacacggatggtgtccatgccccagacgacagcaggcaccatcctggacggagtgaacgtcggccgtggctatggcctggtggaaggacacgacaggaggcagtttgagatcaccagcgtttccgtggatgtctggcacatcctggaattcgactatagcaggctccccaaacaaagcatcgggcagttccatgagggggatgcctatgtggtcaagtggaagttcatggtgagcacggcagtgggaagtcgccagaagggagagcactcggtgagggcagccggcaaagagaagtgcgtctacttcttctggcaaggccggcactccaccgtgagtgagaagggcacgtcggcgctgatgacggtggagctggacgaggaaaggggggcccaggtccaggttctccagggaaaggagcccccctgtttcctgcagtgtttccagggggggatggtggtgcactcggggaggcgggaagaggaagaagaaaatgtgcaaagtgagtggcggctgtactgcgtgcgtggagaggtgcccgtggaagggaatttgctggaagtggcctgtcactgtagcagcctgaggtccagaacttccatggtggtgcttaacgtcaacaaggccctcatctacctgtggcacggatgcaaagcccaggcccacacgaaggaggtcggaaggaccgctgcgaacaagatcaaggaacaatgtcccctggaagcaggactgcatagtagcagcaaagtcacaatacacgagtgtgatgaaggctccgagccactcggattctgggatgccttaggaaggagagacaggaaagcctacgattgcatgcttcaagatcctggaagttttaacttcgcgccccgcctgttcatcctcagcagctcctctggggattttgcagccacagagtttgtgtaccctgcccgagccccctctgtggtcagttccatgcccttcctgcaggaagatctgtacagcgcgccccagccagcacttttccttgttgacaatcaccacgaggtgtacctctggcaaggctggtggcccatcgagaacaagatcactggttccgcccgcatccgctgggcctccgaccggaagagtgcgatggagactgtgctccagtactgcaaaggaaaaaatctcaagaaaccagcccccaagtcttaccttatccacgctggtctggagcccctgacattcaccaatatgtttcccagctgggagcacagagaggacatcgctgagatcacagagatggacacggaagtttccaatcagatcaccctcgtggaagacgtcttagccaagctctgtaaaaccatttacccgctggccgacctcctggccaggccactcccggagggggtcgatcctctgaagcttgagatctatctcaccgacgaagacttcgagtttgcactagacatgacgagggatgaatacaacgccctgcccgcctggaagcaggtgaacctgaagaaagcaaaaggcctgttctgagtggggagacgccagaggagcctcacggtcacgtccaacaacaccactgcaccagggaaatggatatatatttttggactggtgtttttcacaaagtatttttcaatcagagttttcagaacctgacattgttaaagatactgcttgtcccggagttgtgtattttgtaaatgttcaagggaactgtttggaaacttctttccaccattcaggaggttatcagaattaataaaagtatctgttatgtgcacttaagccgcagctgctatagatagcactgccttcttgttccagctaggcaatgccttttttttttttttttgaagcagttctctttataaagtgttattttgatagtttgtggattctaaaatatatatatatttatataaacaccatataagtcaaatatgtatttaacaaagcaatatgtattcattcactttcaagatttgttttggtgtcaaaataacatgaaaaggtagatggagttgcttctgttgaattagctctgccaccaatatgtatcttcatacacgtttggaaatgtttcctgcagcattaggtatgacttgttctgagtactgcttccggtgctaaaatgaacaaagaatttgtacttaatggcatggactctggagaatctatgcgaatcaacctttctaccttaatatctccccaaaaatgtatagtgccttgtttttatgtacagtttatatacagaaaagtttgctctgcatttttgatgatggtttggaacattatctacaattttactctcaaatagtcaaaataaaaacatctcaatttctaataccggttgtaaacagtacacatgtcattttgtgatataggactcccaaataaaagtatcagaataaacacaacaattaactggttcacattgaa

SEQ ID NO: 21018 - DNA, 7586 bp, Homo sapiens
  misc_feature 1..7586: note = ENST00000355867
  source 1..7586: mol_type = unassigned DNA
cactgctctgactgcgtcctccccaggctgaagtgtcctcaggtttcatgtggatttgcccagtaatggatggctccaccgaggccaggttggggaagttcagcctcgaggacactaggggacgaaaaacttcaaaaagaagactctttttattaatattttggcgttctttttggagaggaacttttgggatgtagcctttacctgtttcctgaatttgacatccaaaaagccttttggaaaacaccattctaaatttatcctgttctgaatcatcatcgcttctgatagatgcagttgcttgctgacatcgtgatctttgattttgtacaacgctatttgggctaacttttgggattttactttgtgcttagaatttgaaagtagtattcattggaaagagactccaagaaaatactcgaagacatcaaaagctggattcgagggtataacgtgttttgttttgttttttaaattagaaaaataaggaattgcagtgtgattttctttccccctttaacttagaggaacgaggattatacagaaatttgaaatttcaacaagaaaaacttaagcttccttggattcccacgtcaaaggaaagtttcaagctttcagaaggagttctcactcgaagataaagaacagctcgctaaccacgaaagaggaatcgatgctcagcttttagttgcacttcctaaagttgcagaattaagacaaatctttgaaccaaagaagaaagaattcttagaaatgaaaagaaaagaaagaattgccaggcgcctggaagggattgaaaatgacactcagcccatcctcttgcagagctgcacaggattggtgactcaccgcctgctggaggaagacacccctcgatacatgagagccagcgaccctgccagcccccacatcggccgatcaaatgaagaggaggaaacttctgattcttctctagaaaagcaaactcgatccaaatactgcacagaaacctccggtgtccacggtgactcaccctatggttcgggtaccatggacacccacagtctggagtccaaagccgaaagaattgcaaggtacaaagcagaaagaaggcgacagctggcagagaagtatgggctgactctggatcccgaggccgactccgagtatttatcccgctataccaagtccaggaaggagcctgatgctgtcgagaagcggggaggaaaaagtgacaaacaggaagagtcaagcagagatgctagttctctgtaccccgggaccgagacgatggggctcaggacctgtgccggtgaatccaaggactatgccctccatgtgggtgacggctcttccgacccggaggtgctgctgaacatagaaaaccaaagacgaggtcaagagctgagtgccacccggcaggcccatgacctgtccccagcagccgagagttcctcgaccttctctttctctgggcgagactcctccttcactgaagtgccacggtcccccaagcacgcccacagctcctccctgcagcaggcagcctcccggagcccctcctttggtgacccacagctatcccctgaggcccgacccagtacagggaaacccaaacatgagtggtttctccagaaagattccgaaggggacacaccttcacttatcaactggccttccagagttaaagttagagaaaaattggtgaaagaggaaagtgctcgaaacagccctgaactcgcctcagagtccgtaactcagaggagacaccagccagcgccagtccattacgtgtcatttcagtctgagcactcagcctttgatagggtccccagcaaggcagcaggctctacacgacagccaatccgtggctatgtccaacccgcagataccggtcacaccgccaagctagtgacgccagaaaccccagaaaatgcatctgagtgtagctgggtagcatcagccacccagaatgtccccaaacctcccagcttgacggttctagaaggtgacggaagggatagcccagttctccatgtctgcgagtcaaaagcagaagaagaagaaggggaaggagaaggagaagaaaaagaagaagatgtgtgcttcactgaagctctcgagcaaagcaagaaaaccctactggctttggagggtgatgggctagtgagaagcccagaagatccctctagaaatgaggactttggtaagcctgctgtgagcacagtcaccttagagcatcagaaggaactggaaaacgtggcacaaccccctcaagctccgcaccagcccactgagaggacaggcaggagcgagatggttctctacattcaaagtgagcctgtgtcccaagacgccaaaccaactggtcacaacagggaagcctcgaaaaagcgcaaggtccgtacccgctctctgtcagatttcacaggcccccctcagctccaggccttgaagtataaggacccagcttccaggagagagctggagctgcccagctccaagaccgaagggccttatggggagatcagcatgctggacacaaaagtctctgtcgcccagctccgaagtgcgttcctggcatctgccaacgcctgcaggagacctgaactcaaatcacgggtggagaggtcggctgaaggacctggcttgcccaccggtgtggaacgggagagagggtcccggaaaccaagacgctatttttctcctggtgaaagtagaaaaacttccgagagatttagaacccaacctataacttcagcagaacgaaaggaatcggataggtgcacttcacattcagaaacgccaactgtcgatgatgaagaaaaggtggatgaacgagccaagctgagcgtcgccgccaagaggttgcttttcagggagatggaaaaatcttttgatgaacaaaatgttccaaagcgacgctcaagaaacacagctgtggagcagaggctacgccgtctgcaggacaggtccctcacccagcccatcaccactgaagaggtggtcatcgcagccactgaacctatccccgcttcgtgttctgggggcacccaccctgtaatggcgagacttcctagccccactgtagctaggagcgctgtgcagcctgccagattgcaggcctctgctcaccaaaaggccttagccaaggaccagacaaatgagggcaaagagcttgctgagcaaggagaacctgattcctccactctaagcttggccgaaaagttggccttgtttaacaaattgtcccagccagtctcaaaagcgatttctacccggaacagaatagacacgagacagaggagaatgaacgctcgctatcaaactcagccagtcacactgggagaggtggagcaggtgcagagtggaaagctcattcctttctcacctgccgtgaacacatcagtgtctaccgtagcatccacggttgctccaatgtatgccggagatcttcgcacaaagccacctcttgaccacaatgcaagtgccactgactataagttttcttcttcaatagaaaattcggactctccagttagaagcattctgaaatcgcaagcttggcagcctttggtagagggtagcgagaacaagggaatgttgagagaatatggagagacagaaagcaagagagctttgacaggtcgagacagtgggatggagaagtatgggtcctttgaggaagcagaagcatcctaccccatcctgaaccgagccagggaaggagacagccataaggaatctaaatatgctgttcccagaagaggaagcctggaacgggcgaaccctcccatcacccacctcggggatgaaccgaaggaattttccatggctaaaatgaatgcacaaggaaacttggacttgagggacaggctgccctttgaagagaaggtggaggtggagaatgttatgaaaaggaagttttcactaagagcggcagagttcggggagcccacttccgagcagacggggacagctgctgggaaaactattgctcaaaccacagcccccgtgtcctggaagccccaggattcttcggaacagccacaggagaagctctgcaagaatccatgtgcgatgtttgctgctggagagatcaaaacgccgacaggggagggccttcttgactcacccagcaaaaccatgtctattaaagaaagattggcactgttgaagaaaagcggggaggaagattggagaaacagactcagcaggaggcaggagggcggcaaggcgccggccagcagcctgcacacccaggaagcagggcggtccctcatcaagaagcgggtcacagaaagtcgagagagccaaatgacgattgaggagaggaagcagctcatcactgtgagagaggaggcctggaagacgagaggcagaggagcggccaacgactcgacccagttcactgtggctggcaggatggtgaagaaaggtttggcgtcacctactgccataaccccagtagcctcacccatttgcggtaaaacaagaggcaccacacccgtttccaaacccctggaagatatcgaagccagaccagatatgcagttagaatcggacctgaagttggacaggctggaaacctttctaagaaggctgaataacaaagttggcgggatgcacgaaacggtgctcactgtcaccggcaaatctgtgaaggaggtgatgaagccagatgatgatgaaacctttgccaaattttaccgcagcgtggattataatatgccaagaagtcctgtggagatggatgaggacttcgatgtcattttcgatccttatgcacccaaattgacgtcttccgtggccgagcacaagcgggcagttaggcccaagcgccgggttcaggcctccaaaaaccccctgaaaatgctggcggcaagagaagatctccttcaggaatacactgagcagagattaaacgttgccttcatggagtcaaagcggatgaaagtagaaaagatgtcttccaactccaacttctcagaagtcaccctggcgggtttagccagtaaagaaaacttcagcaacgtcagcctgcggagcgtcaacctgacggaacagaactctaacaacagcgccgtgccctacaagaggctgatgctgttgcagattaaaggaagaagacatgtgcagaccaggctggtggaacctcgagcttcggcgctcaacagtggggactgcttcctcctgctctctccccactgctgcttcctgtgggtaggagagtttgcaaacgtcatagaaaaggcgaaggcctcagaacttgcaactttaattcagacaaagagggaacttggttgtagagctacttatatccaaaccattgaagaaggaattaatacacacactcatgcagccaaagacttctggaagcttctgggtggccaaaccagttaccaatctgctggagacccaaaagaagatgaactctatgaagcagccataatagaaactaactgcatttaccgtctcatggatgacaaacttgttcctgatgacgactactgggggaaaattccgaagtgctcccttctgcaacccaaagaggtactggtgtttgattttggtagtgaagtttacgtatggcatgggaaagaagtcacattagcacaacgaaaaatagcatttcagctggcaaagcacttatggaatggaacctttgactatgagaactgtgacatcaatcccctggatcctggagaatgcaatccgcttatccccagaaaaggacaggggcggcccgactgggcgatatttgggagacttactgaacacaatgagacgattttgttcaaagagaagtttctggattggacggaactgaagagatcgaatgagaagaaccccggggaacttgcccagcacaaggaagaccccaggactgatgtcaaggcatacgatgtgacacggatggtgtccatgccccagacgacagcaggcaccatcctggacggagtgaacgtcggccgtggctatggcctggtggaaggacacgacaggaggcagtttgagatcaccagcgtttccgtggatgtctggcacatcctggaattcgactatagcaggctccccaaacaaagcatcgggcagttccatgagggggatgcctatgtggtcaagtggaagttcatggtgagcacggcagtgggaagtcgccagaagggagagcactcggtgagggcagccggcaaagagaagtgcgtctacttcttctggcaaggccggcactccaccgtgagtgagaagggcacgtcggcgctgatgacggtggagctggacgaggaaaggggggcccaggtccaggttctccagggaaaggagcccccctgtttcctgcagtgtttccagggggggatggtggtgcactcggggaggcgggaagaggaagaagaaaatgtgcaaagtgagtggcggctgtactgcgtgcgtggagaggtgcccgtggaagggaatttgctggaagtggcctgtcactgtagcagcctgaggtccagaacttccatggtggtgcttaacgtcaacaaggccctcatctacctgtggcacggatgcaaagcccaggcccacacgaaggaggtcggaaggaccgctgcgaacaagatcaaggaacaatgtcccctggaagcaggactgcatagtagcagcaaagtcacaatacacgagtgtgatgaaggctccgagccactcggattctgggatgccttaggaaggagagacaggaaagcctacgattgcatgcttcaagatcctggaagttttaacttcgcgccccgcctgttcatcctcagcagctcctctggggattttgcagccacagagtttgtgtaccctgcccgagccccctctgtggtcagttccatgcccttcctgcaggaagatctgtacagcgcgccccagccagcacttttccttgttgacaatcaccacgaggtgtacctctggcaaggctggtggcccatcgagaacaagatcactggttccgcccgcatccgctgggcctccgaccggaagagtgcgatggagactgtgctccagtactgcaaaggaaaaaatctcaagaaaccagcccccaagtcttaccttatccacgctggtctggagcccctgacattcaccaatatgtttcccagctgggagcacagagaggacatcgctgagatcacagagatggacacggaagtttccaatcagatcaccctcgtggaagacgtcttagccaagctctgtaaaaccatttacccgctggccgacctcctggccaggccactcccggagggggtcgatcctctgaagcttgagatctatctcaccgacgaagacttcgagtttgcactagacatgacgagggatgaatacaacgccctgcccgcctggaagcaggtgaacctgaagaaagcaaaaggcctgttctgagtggggagacgccagaggagcctcacggtcacgtccaacaacaccactgcaccagggaaatggatatatatttttggactggtgtttttcacaaagtatttttcaatcagagttttcagaacctgacattgttaaagatactgcttgtcccggagttgtgtattttgtaaatgttcaagggaactgtt

SEQ ID NO: 21019 - DNA, 2889 bp, Homo sapiens
  misc_feature 1..2889: note = ENST00000632315
  source 1..2889: mol_type = unassigned DNA
agccacaggagaagctctgcaagaatccatgtgcgatgtttgctgctggagagatcaaaacgccgacaggggagggccttcttgactcacccagcaaaaccatgtctattaaagaaagattggcactgttgaagaaaagcggggaggaagattggagaaacagactcagcaggaggcaggagggcggcaaggcgccggccagcagcctgcacacccaggaagcagggcggtccctcatcaagaaggaagaaggaggagttgcggatgatagtgccatttctaatctgctttggcgggtcacagaaagtcgagagagccaaatgacgattgaggagaggaagcagctcatcactgtgagagaggaggcctggaagacgagaggcagaggagcggccaacgactcgacccagttcactgtggctggcaggatggtgaagaaaggtttggcgtcacctactgccataaccccagtagcctcacccatttgcggtaaaacaagaggcaccacacccgtttccaaacccctggaagatatcgaagccagaccagatatgcagttagaatcggacctgaagttggacaggctggaaacctttctaagaaggctgaataacaaagttggcgggatgcacgaaacggtgctcactgtcaccggcaaatctgtgaaggaggtgatgaagccagatgatgatgaaacctttgccaaattttaccgcagcgtggattataatatgccaagaagtcctgtggagatggatgaggacttcgatgtcattttcgatccttatgcacccaaattgacgtcttccgtggccgagcacaagcgggcagttaggcccaagcgccgggttcaggcctccaaaaaccccctgaaaatgctggcggcaagagaagatctccttcaggaatacactgagcagagattaaacgttgccttcatggagtcaaagcggatgaaagtagaaaagatgtcttccaactccaacttctcagaagtcaccctggcgggtttagccagtaaagaaaacttcagcaacgtcagcctgcggagcgtcaacctgacggaacagaactctaacaacagcgccgtgccctacaagaggctgatgctgttgcagattaaaggaagaagacatgtgcagaccaggctggtggaacctcgagcttcggcgctcaacagtggggactgcttcctcctgctctctccccactgctgcttcctgtgggtaggagagtttgcaaacgtcatagaaaaggcgaaggcctcagaacttgcaactttaattcagacaaagagggaacttggttgtagagctacttatatccaaaccattgaagaaggaattaatacacacactcatgcagccaaagacttctggaagcttctgggtggccaaaccagttaccaatctgctggagacccaaaagaagatgaactctatgaagcagccataatagaaactaactgcatttaccgtctcatggatgacaaacttgttcctgatgacgactactgggggaaaattccgaagtgctcccttctgcaacccaaagaggtactggtgtttgattttggtagtgaagtttacgtatggcatgggaaagaagtcacattagcacaacgaaaaatagcatttcagctggcaaagcacttatggaatggaacctttgactatgagaactgtgacatcaatcccctggatcctggagaatgcaatccgcttatccccagaaaaggacaggggcggcccgactgggcgatatttgggagacttactgaacacaatgagacgattttgttcaaagagaagtttctggattggacggaactgaagagatcgaatgagaagaaccccggggaacttgcccagcacaaggaagaccccaggactgatgtcaaggcatacgatgtgacacggatggtgtccatgccccagacgacagcaggcaccatcctggacggagtgaacgtcggccgtggctatggcctggtggaaggacacgacaggaggcagtttgagatcaccagcgtttccgtggatgtctggcacatcctggaattcgactatagcaggctccccaaacaaagcatcgggcagttccatgagggggatgcctatgtggtcaagtggaagttcatggtgagcacggcagtgggaagtcgccagaagggagagcactcggtgagggcagccggcaaagagaagtgcgtctacttcttctggcaaggccggcactccaccgtgagtgagaagggcacgtcggcgctgatgacggtggagctggacgaggaaaggggggcccaggtccaggttctccagggaaaggagcccccctgtttcctgcagtgtttccagggggggatggtggtgcactcggggaggcgggaagaggaagaagaaaatgtgcaaagtgagtggcggctgtactgcgtgcgtggagaggtgcccgtggaagggaatttgctggaagtggcctgtcactgtagcagcctgaggtccagaacttccatggtggtgcttaacgtcaacaaggccctcatctacctgtggcacggatgcaaagcccaggcccacacgaaggaggtcggaaggaccgctgcgaacaagatcaaggaacaatgtcccctggaagcaggactgcatagtagcagcaaagtcacaatacacgagtgtgatgaaggctccgagccactcggattctgggatgccttaggaaggagagacaggaaagcctacgattgcatgcttcaagatcctggaagttttaacttcgcgccccgcctgttcatcctcagcagctcctctggggattttgcagccacagagtttgtgtaccctgcccgagccccctctgtggtcagttccatgcccttcctgcaggaagatc

SEQ ID NO: 21020 - DNA, 779 bp, Homo sapiens
  misc_feature 1..779: note = ENST00000460007
  source 1..779: mol_type = unassigned DNA
gagaagtttctggattggacggaactgaagagatcgaatgagaagaaccccggggaacttgcccagcacaaggaagaccccaggactgatgtcaaggcatacgatgtgacacggatggtgtccatgccccagacgacagcaggcaccatcctggacggagtgaacgtcggccgtggctatggcctggtggaaggacacgacaggaggcagtttgagatcaccagcgtttccgtggatgtctggcacatcctggaattcgactatagcaggctccccaaacaaagcatcgggcagttccatgagggggatgcctatgtggtcaagtggaagttcatgaacaaaagcacccagcatcgagttcatcattgtcttgttcaccattgtagcccagaatcctgaagtccccgctcattgaatatttgttgaatgcatgaacgaatgaagggaatctagagtgagacatattcttacagtgggaagtcgccagaagggagagcactcggtgagggcagccggcaaagagaagtgcgtctacttcttctggcaaggccggcactccaccgtgagtgagaagggcacgtcggcgctgatgacggtggagctggacgaggaaaggggggcccaggtctcaggctgtgcctcccatttctttcctcctcccactttttgtaagatgatcctggagaaaatgttgtatctgcaaataggaaatccacatgacaagtgcagatggccaatgggtggctttgaaaggtttccacctaaccaatcaaggcact

SEQ ID NO: 21021 - DNA, 368 bp, Homo sapiens
  misc_feature 1..368: note = ENST00000482607
  source 1..368: mol_type = unassigned DNA
gaaattcattcacattttacattgcagctactttgcaatgtaaaatgtgatgctctcctgttcttcttatccccaagctgctggagacccaaaagaagatgaactctatgaagcagccataatagaaactaactgcatttaccgtctcatggatgacaaacttgttcctgatgacgactactgggggaaaattccgaagtgctcccttctgcaacccaaagaggtactggtgtttgattttggtagtgaagtttacgtatggcatgggaaagaagtcacattagcacaacgaaaaatagcatttcagctggcaaagcacttatggaatggaacctttgactatgagaactgtgacatcaatcccctgg

SEQ ID NO: 21022 - DNA, 622 bp, Homo sapiens
  misc_feature 1..622: note = ENST00000474106
  source 1..622: mol_type = unassigned DNA
agccttcagagtcagtcctgttcattagctgcggagttaacggcctctgtgctaatgaactcctctgatgtctcttctcttaagcatccttctagtttggcgtcacctactgccataaccccagtagcctcacccatttgcggtaaaacaagaggcaccacacccgtttccaaacccctggaagatatcgaagccagaccagatatgcagttagaatcggacctgaagttggacaggctggaaacctttctaagaaggctgaataacaaagttggcgggatgcacgaaacggtgctcactgtcaccggcaaatctgtgaaggaggtgatgaagccagatgatgatgaaacctttgccaaattttaccgcagcgtggattataatatgccaagaagtcctgtggagatggatgaggacttcgatgtcattttcgatccttatgcacccaaattgacgtcttccgtggccgagcacaagcgggcagttaggcccaagcgccgggttcaggcctccaaaaaccccctgaaaatgctggcggcaagagaagatctccttcaggaatacactgagcagagattaaacgttgccttcatggagtcaaagcggatgaaagtagaaaaga

SEQ ID NO: 21023 - DNA, 454 bp, Homo sapiens
  misc_feature 1..454: note = ENST00000491872
  source 1..454: mol_type = unassigned DNA
cctgaggttcacatcaccctattgtgtgagcacgtgcatgctgctgtttgaacccaggcatgaaatacttgaaggtgattgcgatgccctgaccaggctcttctcttccaatactctgccatgttccctgtttgttttaacctgtaggaagaaggaggagttgcggatgatagtgccatttctaatctgctttggcgggtcacagaaagtcgagagagccaaatgacgattgaggagaggaagcagctcatcactgtgagagaggaggcctggaagacgagaggcagaggagcggccaacgactcgacccagttcactgtggctggcaggatggtgaagaaaggtttggcgtcacctactgccataaccccagtagcctcacccatttgcggtaaaacaagaggcaccacacccgtttccaaacccctggaagatatcgaagccagaccagata

SEQ ID NO: 21024 - DNA, 645 bp, Homo sapiens
  misc_feature 1..645: note = ENST00000464984
  source 1..645: mol_type = unassigned DNA
cacagcccccgtgtcctggaagccccaggattcttcggaacagccacaggagaagctctgcaagaatccatgtgcgatgtttgctgctggagagatcaaaacgccgacaggggagggccttcttgactcacccagcaaaaccatgtctattaaagaaagattggcactgttgaagaaaagcggggaggaagattggagaaacagactcagcaggaggcaggagggcggcaaggcgccggccagcagcctgcacacccaggaagcagggcggtccctcatcaagaaggaagaaggaggagttgcggatgatagtgccatttctaatctgctttgggtaagcctgactctaacacaggtgtcctctcgatggtggccagaattacacttcgcgtgggtaatcctgatcctgggtggttccttcgtgcaccctccctggtgcttttcttatctccagaccagacacagcctttgtccggagtggagagctgagcccgtgcccttaaactattttttaatcatgtaatgaagatactttaaagaagatgatattttctgttaaatgttaaaactgtcaatgaaagtcatggttcctctctctgtaactgacaatcttctataaattaactcatttaattactgcacaaa

SEQ ID NO: 21025 - DNA, 262 bp, Homo sapiens
  misc_feature 1..262: note = ENST00000483758
  source 1..262: mol_type = unassigned DNA
gcacttgggctgtggtttcctggagatgggagatcgggagctttggtgtacttcttgaaggtttcagaaaaaggccaagacttcttcagaactatttcaacaagaaaaacttaagcttccttggattcccacgtcaaaggaaagtttcaagctttcagaaggagttctcactcgaagataaagaacagctcgctaaccacgaaagaggaatcgatgctcagcttttagttgcacttcctaaagttgcagaattaagacaaat

SEQ ID NO: 21026 - DNA, 287 bp, Homo sapiens
  misc_feature 1..287: note = ENST00000464726
  source 1..287: mol_type = unassigned DNA
attggagattggttgctttctaaaactgaaggagaagcccatgaagagatggtggattctcactgagttttgactagcggaagaaaagagagagttcaagtggatggccttgaggacttgaaaagctgagatatgatgattttgaagtcatttcacatcgaagccatgatttaaatatcggcgttaaggtaagtattgaggaaagaaatatgacacttttgtggttaacacattattggctttgcttgcactgttagaagagattaaagcacattgtgaagggtgat

SEQ ID NO: 21027 - DNA, 190 bp, Homo sapiens
  misc_feature 1..190: note = ENST00000490031
  source 1..190: mol_type = unassigned DNA
tctaaaactgaaggagaagcccatgaagagatggtggattctcactgagttttgactagcggaagaaaagaggaaatagatgaaaagtgaagtcggtgcctgcagtctctggggtctctgcgcctggtgttccaaggaggattttgatctggtccctcatcagactctgttgttgctcttagggttggat

SEQ ID NO: 21028 - DNA, 196 bp, Homo sapiens
  misc_feature 1..196: note = ENST00000465422
  source 1..196: mol_type = unassigned DNA
caccaccaaggccccgcgctagtgtgcacccccggcccgggcccggcaggtgggcgaggagggcgggcgcagtcgggctctgcaggagcgcgcggagattctggctacattggagattggttgctttctaaaactgaaggagaagcccatgaagagatggtggattctcactgagttttgactagcggaagaaaag

SEQ ID NO: 21029 - DNA, 8201 bp, Homo sapiens
  misc_feature 1..8201: note = ENST00000375398
  source 1..8201: mol_type = unassigned DNA
cactgctctgactgcgtcctccccaggctgaagtgtcctcaggtttcatgtggatttgcccagtaatggatggctccaccgaggccaggttggggaagttcagcctcgaggacactaggggacgaaaaacttcaaaaagaagactctttttattaatattttggcgttctttttggagaggaacttttgggatgtagcctttacctgtttcctgaatttgacatccaaaaagccttttggaaaacaccattctaaatttatcctgttctgaatcatcatcgcttctgatagatgcagttgcttgctgacatcgtgatctttgattttgtacaacgctatttgggctaacttttgggattttactttgtgcttagaatttgaaagtagtattcattggaaagagactccaagaaaatactcgaagacatcaaaagctggattcgagggtataacgtgttttgttttgttttttaaattagaaaaataaggaattgcagtgtgattttctttccccctttaacttagaggaacgaggattatacagaaatttgaaatttcaacaagaaaaacttaagcttccttggattcccacgtcaaaggaaagtttcaagctttcagaaggagttctcactcgaagataaagaacagctcgctaaccacgaaagaggaatcgatgctcagcttttagttgcacttcctaaagttgcagaattaagacaaatctttgaaccaaagaagaaagaattcttagaaatgaaaagaaaagaaagaattgccaggcgcctggaagggattgaaaatgacactcagcccatcctcttgcagagctgcacaggattggtgactcaccgcctgctggaggaagacacccctcgatacatgagagccagcgaccctgccagcccccacatcggccgatcaaatgaagaggaggaaacttctgattcttctctagaaaagcaaactcgatccaaatactgcacagaaacctccggtgtccacggtgactcaccctatggttcgggtaccatggacacccacagtctggagtccaaagccgaaagaattgcaaggtacaaagcagaaagaaggcgacagctggcagagaagtatgggctgactctggatcccgaggccgactccgagtatttatcccgctataccaagtccaggaaggagcctgatgctgtcgagaagcggggaggaaaaagtgacaaacaggaagagtcaagcagagatgctagttctctgtaccccgggaccgagacgatggggctcaggacctgtgccggtgaatccaaggactatgccctccatgtgggtgacggctcttccgacccggaggtgctgctgaacatagaaaaccaaagacgaggtcaagagctgagtgccacccggcaggcccatgacctgtccccagcagccgagagttcctcgaccttctctttctctgggcgagactcctccttcactgaagtgccacggtcccccaagcacgcccacagctcctccctgcagcaggcagcctcccggagcccctcctttggtgacccacagctatcccctgaggcccgacccagtacagggaaacccaaacatgagtggtttctccagaaagattccgaaggggacacaccttcacttatcaactggccttccagagttaaagttagagaaaaattggtgaaagaggaaagtgctcgaaacagccctgaactcgcctcagagtccgtaactcagaggagacaccagccagcgccagtccattacgtgtcatttcagtctgagcactcagcctttgatagggtccccagcaaggcagcaggctctacacgacagccaatccgtggctatgtccaacccgcagataccggtcacaccgccaagctagtgacgccagaaaccccagaaaatgcatctgagtgtagctgggtagcatcagccacccagaatgtccccaaacctcccagcttgacggttctagaaggtgacggaagggatagcccagttctccatgtctgcgagtcaaaagcagaagaagaagaaggggaaggagaaggagaagaaaaagaagaagatgtgtgcttcactgaagctctcgagcaaagcaagaaaaccctactggctttggagggtgatgggctagtgagaagcccagaagatccctctagaaatgaggactttggtaagcctgctgtgagcacagtcaccttagagcatcagaaggaactggaaaacgtggcacaaccccctcaagctccgcaccagcccactgagaggacaggcaggagcgagatggttctctacattcaaagtgagcctgtgtcccaagacgccaaaccaactggtcacaacagggaagcctcgaaaaagcgcaaggtccgtacccgctctctgtcagatttcacaggcccccctcagctccaggccttgaagtataaggacccagcttccaggagagagctggagctgcccagctccaagaccgaagggccttatggggagatcagcatgctggacacaaaagtctctgtcgcccagctccgaagtgcgttcctggcatctgccaacgcctgcaggagacctgaactcaaatcacgggtggagaggtcggctgaaggacctggcttgcccaccggtgtggaacgggagagagggtcccggaaaccaagacgctatttttctcctggtgaaagtagaaaaacttccgagagatttagaacccaacctataacttcagcagaacgaaaggaatcggataggtgcacttcacattcagaaacgccaactgtcgatgatgaagaaaaggtggatgaacgagccaagctgagcgtcgccgccaagaggttgcttttcagggagatggaaaaatcttttgatgaacaaaatgttccaaagcgacgctcaagaaacacagctgtggagcagaggctacgccgtctgcaggacaggtccctcacccagcccatcaccactgaagaggtggtcatcgcagccacattgcaggcctctgctcaccaaaaggccttagccaaggaccagacaaatgagggcaaagagcttgctgagcaaggagaacctgattcctccactctaagcttggccgaaaagttggccttgtttaacaaattgtcccagccagtctcaaaagcgatttctacccggaacagaatagacacgagacagaggagaatgaacgctcgctatcaaactcagccagtcacactgggagaggtggagcaggtgcagagtggaaagctcattcctttctcacctgccgtgaacacatcagtgtctaccgtagcatccacggttgctccaatgtatgccggagatcttcgcacaaagccacctcttgaccacaatgcaagtgccactgactataagttttcttcttcaatagaaaattcggactctccagttagaagcattctgaaatcgcaagcttggcagcctttggtagagggtagcgagaacaagggaatgttgagagaatatggagagacagaaagcaagagagctttgacaggtcgagacagtgggatggagaagtatgggtcctttgaggaagcagaagcatcctaccccatcctgaaccgagccagggaaggagacagccataaggaatctaaatatgctgttcccagaagaggaagcctggaacgggcgaaccctcccatcacccacctcggggatgaaccgaaggaattttccatggctaaaatgaatgcacaaggaaacttggacttgagggacaggctgccctttgaagagaaggtggaggtggagaatgttatgaaaaggaagttttcactaagagcggcagagttcggggagcccacttccgagcagacggggacagctgctgggaaaactattgctcaaaccacagcccccgtgtcctggaagccccaggattcttcggaacagccacaggagaagctctgcaagaatccatgtgcgatgtttgctgctggagagatcaaaacgccgacaggggagggccttcttgactcacccagcaaaaccatgtctattaaagaaagattggcactgttgaagaaaagcggggaggaagattggagaaacagactcagcaggaggcaggagggcggcaaggcgccggccagcagcctgcacacccaggaagcagggcggtccctcatcaagaagcgggtcacagaaagtcgagagagccaaatgacgattgaggagaggaagcagctcatcactgtgagagaggaggcctggaagacgagaggcagaggagcggccaacgactcgacccagttcactgtggctggcaggatggtgaagaaaggtttggcgtcacctactgccataaccccagtagcctcacccatttgcggtaaaacaagaggcaccacacccgtttccaaacccctggaagatatcgaagccagaccagatatgcagttagaatcggacctgaagttggacaggctggaaacctttctaagaaggctgaataacaaagttggcgggatgcacgaaacggtgctcactgtcaccggcaaatctgtgaaggaggtgatgaagccagatgatgatgaaacctttgccaaattttaccgcagcgtggattataatatgccaagaagtcctgtggagatggatgaggacttcgatgtcattttcgatccttatgcacccaaattgacgtcttccgtggccgagcacaagcgggcagttaggcccaagcgccgggttcaggcctccaaaaaccccctgaaaatgctggcggcaagagaagatctccttcaggaatacactgagcagagattaaacgttgccttcatggagtcaaagcggatgaaagtagaaaagatgtcttccaactccaacttctcagaagtcaccctggcgggtttagccagtaaagaaaacttcagcaacgtcagcctgcggagcgtcaacctgacggaacagaactctaacaacagcgccgtgccctacaagaggctgatgctgttgcagattaaaggaagaagacatgtgcagaccaggctggtggaacctcgagcttcggcgctcaacagtggggactgcttcctcctgctctctccccactgctgcttcctgtgggtaggagagtttgcaaacgtcatagaaaaggcgaaggcctcagaacttgcaactttaattcagacaaagagggaacttggttgtagagctacttatatccaaaccattgaagaaggaattaatacacacactcatgcagccaaagacttctggaagcttctgggtggccaaaccagttaccaatctgctggagacccaaaagaagatgaactctatgaagcagccataatagaaactaactgcatttaccgtctcatggatgacaaacttgttcctgatgacgactactgggggaaaattccgaagtgctcccttctgcaacccaaagaggtactggtgtttgattttggtagtgaagtttacgtatggcatgggaaagaagtcacattagcacaacgaaaaatagcatttcagctggcaaagcacttatggaatggaacctttgactatgagaactgtgacatcaatcccctggatcctggagaatgcaatccgcttatccccagaaaaggacaggggcggcccgactgggcgatatttgggagacttactgaacacaatgagacgattttgttcaaagagaagtttctggattggacggaactgaagagatcgaatgagaagaaccccggggaacttgcccagcacaaggaagaccccaggactgatgtcaaggcatacgatgtgacacggatggtgtccatgccccagacgacagcaggcaccatcctggacggagtgaacgtcggccgtggctatggcctggtggaaggacacgacaggaggcagtttgagatcaccagcgtttccgtggatgtctggcacatcctggaattcgactatagcaggctccccaaacaaagcatcgggcagttccatgagggggatgcctatgtggtcaagtggaagttcatggtgagcacggcagtgggaagtcgccagaagggagagcactcggtgagggcagccggcaaagagaagtgcgtctacttcttctggcaaggccggcactccaccgtgagtgagaagggcacgtcggcgctgatgacggtggagctggacgaggaaaggggggcccaggtccaggttctccagggaaaggagcccccctgtttcctgcagtgtttccagggggggatggtggtgcactcggggaggcgggaagaggaagaagaaaatgtgcaaagtgagtggcggctgtactgcgtgcgtggagaggtgcccgtggaagggaatttgctggaagtggcctgtcactgtagcagcctgaggtccagaacttccatggtggtgcttaacgtcaacaaggccctcatctacctgtggcacggatgcaaagcccaggcccacacgaaggaggtcggaaggaccgctgcgaacaagatcaaggaacaatgtcccctggaagcaggactgcatagtagcagcaaagtcacaatacacgagtgtgatgaaggctccgagccactcggattctgggatgccttaggaaggagagacaggaaagcctacgattgcatgcttcaagatcctggaagttttaacttcgcgccccgcctgttcatcctcagcagctcctctggggattttgcagccacagagtttgtgtaccctgcccgagccccctctgtggtcagttccatgcccttcctgcaggaagatctgtacagcgcgccccagccagcacttttccttgttgacaatcaccacgaggtgtacctctggcaaggctggtggcccatcgagaacaagatcactggttccgcccgcatccgctgggcctccgaccggaagagtgcgatggagactgtgctccagtactgcaaaggaaaaaatctcaagaaaccagcccccaagtcttaccttatccacgctggtctggagcccctgacattcaccaatatgtttcccagctgggagcacagagaggacatcgctgagatcacagagatggacacggaagtttccaatcagatcaccctcgtggaagacgtcttagccaagctctgtaaaaccatttacccgctggccgacctcctggccaggccactcccggagggggtcgatcctctgaagcttgagatctatctcaccgacgaagacttcgagtttgcactagacatgacgagggatgaatacaacgccctgcccgcctggaagcaggtgaacctgaagaaagcaaaaggcctgttctgagtggggagacgccagaggagcctcacggtcacgtccaacaacaccactgcaccagggaaatggatatatatttttggactggtgtttttcacaaagtatttttcaatcagagttttcagaacctgacattgttaaagatactgcttgtcccggagttgtgtattttgtaaatgttcaagggaactgtttggaaacttctttccaccattcaggaggttatcagaattaataaaagtatctgttatgtgcacttaagccgcagctgctatagatagcactgccttcttgttccagctaggcaatgccttttttttttttttttgaagcagttctctttataaagtgttattttgatagtttgtggattctaaaatatatatatatttatataaacaccatataagtcaaatatgtatttaacaaagcaatatgtattcattcactttcaagatttgttttggtgtcaaaataacatgaaaaggtagatggagttgcttctgttgaattagctctgccaccaatatgtatcttcatacacgtttggaaatgtttcctgcagcattaggtatgacttgttctgagtactgcttccggtgctaaaatgaacaaagaatttgtacttaatggcatggactctggagaatctatgcgaatcaacctttctaccttaatatctccccaaaaatgtatagtgccttgtttttatgtacagtttatatacagaaaagtttgctctgcatttttgatgatggtttggaacattatctacaattttactctcaaatagtcaaaataaaaacatctcaatttctaataccggttgtaaacagtacacatgtcattttgtgatataggactcccaaataaaagtatcagaataaacacaacaattaactggt

SEQ ID NO: 21030 - DNA, 6813 bp, Homo sapiens
  misc_feature 1..6813: note = ENST00000610966
  source 1..6813: mol_type = unassigned DNA
aaagggtgctcactggtacccggacaaccatttcacagactggtgtgccctataggcatcccagtgatacaccatcagccagagagcctgtgaactcttccaagcagaagggctctccctgccccctctccccgcgcagctcgctctgccctccgcctcctcttctccgcccactctcgccgcggtctcctggcggcggaggctttgtctcgtgggctggtccccagcggctccctccccgaacagctgctgctccagggaggaagcggcgcgggtgctgtccagcttcccggtgctgaaaaccggagggctcgtcatccaccactaccatgtaagggccatgagaagggctcatcctggcgcagcgcggacatggaggaggacttattccagctaaggcagctgccggttgtgaaattccgtcgcacaggcgagagtgcaaggtcagaggacgacacggcttcaggagagcatgaagtccagattgaaggggtccacgtgggcctagaggctgtggagctggatgatggggcagctgtgcccaaggagtttgccaatcccactgatgatactttcatggtggaagatgcagtggaagccattggctttggaaaatttcagtggaagctgtctgttctcactggcttggcttggatggctgatgccatggagatgatgatcctcagcatcctggcaccacagctgcattgcgagtggaggctcccaagctggcaggtggcattgctgacctcggtggtctttgtaggcatgatgtccagctccacgctctggggaaatatctcagaccagtacggcaggaaaacagggctgaagatcagcgtgctgtggactctgtactatggcatccttagtgcatttgcgcccgtgtatagctggatcctggtgctccggggcctggtgggcttcgggatcggaggagttccccagtcggtgacgctgtatgccgagttccttcccatgaaagccagagctaaatgtattttgctgattgaggtattctgggccatcgggacagtgttcgaggtcgtcctggctgtgttcgtgatgcccagcctgggctggcgttggctgctcatcctctcagctgtcccgctcctcctctttgccgtgctgtgtttctggctgcctgaaagtgcaaggtatgatgtgctgtcagggaaccaggaaaaggcaatcgccaccttaaagaggatagcaactgaaaacggagctcccatgccgctggggaaactcatcatctccagacaggaagaccgaggcaaaatgagggaccttttcacaccccattttagatggacaactttgctgctgtggtttatatggttttccaatgcattctcttactacgggttagttctactcaccacagaactcttccaggcaggagatgtctgcggcatctccagtcggaagaaggctgtagaggcaaaatgcagcctggcctgcgagtacctgagtgaggaggattacatggacttgctgtggaccaccctctctgagtttccaggtgtccttgtgactctgtggattattgaccgcctggggcgcaagaagaccatggccctgtgctttgtcatcttctccttctgcagcctcctgctgtttatctgtgttggaagaaatgtgctcactctgttactcttcattgcaagagcgtttatttctggaggctttcaagcggcatatgtttacacacctgaggtctaccccacggcaacgcgggccctcggcctgggcacctgcagcggcatggcaagagtgggtgctctcatcactccgttcatcgcccaggtgatgctggaatcctctgtgtacctgactctggcagtttacagtggctgctgcctcctggctgccctggcctcctgctttttgcccattgagaccaaaggccgaggactgcaggagtccagccaccgggagtggggccaggagatggtcggccgaggaatgcacggtgcaggtgttaccaggtcgaactctggctctcaggaatagtgaccgatgggggactgagctggtctttgaggctgcagagcttggggggctggcaggccccaactggggcactgattgtcactgccgacatcaagaactcacccaagagtatgacctggaccaacagggttttgtgtcttgactcagtttgctcatcttcattgaggtccacccagggatggggagatgtttgctctagggggttctctgtatatgtggtgaaagctttgttcataacctgtggatctacatgggaagactacccatattaggagggtctggtaatgccagcaaccaatcagacaccacccagagtcacccggccaaaccctcagtgaacaaccaaaatatctctctgtagataccgtccaggctcaggcccatgtgacacctgctgtccacccaccggacctgttcagtaggtttctcccacactcacagccccaggctttcttctttgaaattgcaggcgatctaggtgtggtctgagcagctatttcctggcaggggccccccggtttgcctccctagagcctgaccagtggattctctggcagatggacatggtgcattcaaactggagccacatgcccccacccagccccctctggagttgccgttgttggcaccaagagatccagatgtgtccctggggacagctggtcttgcaccaggtgacaacctcagaacgccgttaccccctgggaactgaggactgaggccaaagtgaatcaagctgaagtcagagcacgggcctccccttctgaagcagcgaaggccacggttccgacttctttcctggccccctccttggtcaggctgaatggtgacttttattgttttttgagacggagtcttgatctgtcgcccaggctggagtgcagtagcgtgatctcggctcactgcaactctgcctcccgggttcaagcaattctcctgtctcagcctcccgagtagctgggattacaggtgcccacctgtactttttagtagagacagggtttcaccatgttggccaggctggtctcgaactcctgacctcaagtgatccacccgcctcggcctcccacagtgctgagattacaggtgggagccactgcacccggcctgaatgatgactcttgaggggaaaaagtttactcaggtttgcaggtacaaaatccaaaatccagggctttgggttttgtgcatgggtagacagctgaatgggcagagaaaccagaaggatgctacacccaccatctcatcccatggggatcaggggaccaggattccctgatgcgaagctgctcctctgtccagggacgtcttgatcattacacaaaggcagcccctggagttccattcatggagcctgccgtggagtggagaggggtgggaggactcaggtgtgtgaaatgtatatgttttcaaaggaagcagtgggaggccagttggttttgagttggtctccgcaggcaacatcacttctgggatttggtttactggagccttttttcccatggtgaaggcaggggacatagacaaggagggaggaagctggcagatcccatcaaaggccagagcagacagacctactgcttgaagtaaacattgcaaggaagccaatttgtgcgttcaactcttattaaaacatgtcagtgatggacattgcaagagcctaagtttattcattgtcatcatgtcctagtgacagtccagcctaacggtctgactacctttgttcatcggaattcatctcaatgctttagtgtgataatctcctttccaatgagtggggaaagacataccgttggcagccaacattgtggctgagcttgttggagacaacactttcttctaatggtgtgcaggtcatgatgggggacttcttccagctcaagttctaaatcaactgcaaacaatactgtgtctctaaaatgtgggctgcagccccctccgcccaggcagttgaagaggagatggcttggcagatctctgtctctctctgacaaccacatttccttgaaccacgtgtggctgtagctctaattatttctggacagctgagctctcctgggtaacacagaacttttgcttgtctcttttgccttccggctggtcagacgctactggatgatcatgtccgctccctcaccctagaataacccagtggagctgggggctgggggggatagagtgcttggtgggcaggaatatttcccagagactagggtaaaggggtttacagttgagggccttctctacttgagaaagtgaaagttaaaaactcctgctgggtatggtggctcatgcctataatcccagcacttttggaggccgaggcgggcggatcacaaggtcaggagatcgagaccatcctggctaacatggtgaaaccccgtctctactaaaaatacaaaaaaaaattagccaggtgtggtggcgggtgcctgtagtcccagctactcaggaggctgaggccggagaatggcgtgaacccaggaggcagagcttgcagtgagccgagatcgcgccactgcactccagcctgggcgacagagcaagactccatctcaaaaacaaaacaaaacaaaacaaaaactctttgccttgtaaatagcctgcctttttcaaaaaaatcaatattatcaaatgatacaagagctatcacaaaaggcacccaaacttctgaatatgtgagacctttagctgagaacatttgtatctaattttgaacaatcctattcaaaaagctcctattttcgttaatggaaatgccatgtttctcttagagttacgaaagatctcagaaagtggcaaaagatatttaatgtagccagagctatatatttctgtttttctcgtacttcaagtattctgaaaaacatataactgaccttggtggtgttcacaatgggatgaaacagtatcttaggaattgactttgaaattagtatggaaattcattgtttttaatataacattgagcaacagaaagccttgaatgataagatcaagagtctcccctgccattattttcaatggcaaaaactgcaattactttttttttttttttgagatgaagtctcagctcactgcaactctgtctcccaggttcaagcgattctccctcctcagcctcctgagtagctgggattacaggtgcccgccttgatgcttggctaatttttgtatttttagtatagacaaggtttcaccatgttggtcaggctggtctcaaactcctgacctcaagtgatccgcccaccttggcctcccaaatgcaattacttttgcaccaacctaagaacagtaatctcagtcaatagtggcttaaaccattagaaccaaaaccaggcagagatcagagaaggttcaacgctcaacaatgttatcaagaacccagcttctttttgccttttcttttcaccatcctctgcatgttggccatctgaccctgtgcttgaaacctcatggtcacaaaatggctgcccctgtgctggacatcatatttcttttcaaagaaggtagaatgggaaaggagcagtcataaaaggttttctttcagaagagtctgttggttttggttagaaaaggaagtcccctggcagatttaccattgcttctcattgatcagacctgggtgtcatgcccatcccagcatgagtcctgctgtagggctggaaggaagggcctacgagcaccaagggatacccacagcctcctgaacacaaaattgggattctgttagcacagaagaaggatagcaatggctgttggatgggcgatggttgcaaggagcctgccgtggatgtgtaggccacagagctctcatcagcactgttttcgtggccaggaacagaaattctactcaggataattaaaattaaggaacagagctttattataagactgggatcggtagttaatttcctacaggggaaattcagggcatgtaaatcagtgaaatggaaaaggtgtaaggacaagagaaacaccagccctgtctgcaggggggggctgcaactcccttccagctgatgttgttccaccatgggtccagtgtgaccagatcttacaatgttcaaaagaggagtctaggtttttctgtgaaatctccaaatattagtatattggatcaaaaatgttcaaatgatgtgtgagctcaataaaatgcatctgcagtgcagctttggttgatgggctgatggttcactctgacagtttagagagattgcataggaataaagtacagcctggtgtcattcagaggaacagggatctgggaaaccactggggcccaagacagctgcccctctgaatctgtggctcttgtttcttcccttttctggcagaaatgagtctagcttccatctgtttccttgtggctgctgtgtatgcataatcatgcacagagcttccatagcctcataacccagctctgcaaacatacctgactcagctgctcagtgccccactcccagatcttcaggaatgaagctgattggcccagtttagtgttggattgagtcttggtccaattcaattgggtcaggaagaagtggtggagaggtacagacacggtggcattggcctgccctttagcagggtggtgcagacaattgctggtatgcctggaatctgcagtgacatgtgcataaactctcaagtctattcatcagaactctcttacagatcataacgtggcaagtggtcagtatgcatggaatatccagcatgtcctggacatgttattcaacactgaggatgcaaaatatcataagacatggtcctggctgggtgcagtggctc

SEQ ID NO: 21031 - DNA, 439 bp, Homo sapiens
  misc_feature 1..439: note = ENST00000551211
  source 1..439: mol_type = unassigned DNA
agaggatagcaactgaaaacggagctcccatgccgctggggaaactcatcatctccagacaggaagaccgaggcaaaatgagggaccttttcacaccccattttagatggacaactttgctgctgtggtttatatggtaagagctgtttgttgaccactttgacccctttccactccctgtgccctgttttgggttttgttttaatgcaatggacagatagcactttgatttcaggcagcgtttgcaaatttcagtagttcgaacatcatcctcctgatttccgtcatatccaggttatcatctgtacgtactatcatttccttcatctttttctttaacttgactgcttttaatcaccgtgcaggctggagtgcagtggcgctctcctagcttactgcagccttgaactcctgaactcaagcaatcctccctcctcag

SEQ ID NO: 21032 - DNA, 695 bp, Homo sapiens
  misc_feature 1..695: note = ENST00000550436
  source 1..695: mol_type = unassigned DNA
tggtccccagcggctccctccccgaacagctgctgctccagggaggaagcggcgcgggtgctgtccagcttcccggtgctgaaaaccggagggctcgtcatccaccactaccatgtaagggccatgagaagggctcatcctggcgcagcgcggacatggaggaggacttattccagctaaggcagctgccggttgtgaaattccgtcgcacaggcgagagtgcaaggtcagaggacgacacggcttcaggagagcatgaagtccagattgaaggggtccacgtgggcctagaggctgtggagctggatgatggggcagctgtgcccaaggagtttgccaatcccactgatggtggtctttgtaggcatgatgtccagctccacgctctggggaaatatctcagaccagtacggcaggaaaacagggctgaagatcagcgtgctgtggactctgtactatggcatccttagtgcatttgcgcccgtgtatagctggatcctggtgctccggggcctggtgggcttcgggatcggaggagttccccagtcggtgacgctgtatgccgagttccttcccatgaaagccagagctaaatgtattttgctgattgaggtattctgggccatcgggacagtgttcgaggtcgtcctggctgtgttcgtgatgcccagcctgggctggcgttggctgctcat

SEQ ID NO: 21033 - DNA, 639 bp, Homo sapiens
  misc_feature 1..639: note = ENST00000546618
  source 1..639: mol_type = unassigned DNA
ggctttgtctcgtgggctggtccccagcggctccctccccgaacagctgctgctccagggaggaagcggcgcgggtgctgtccagcttcccggtgctgaaaaccggagggctcgtcatccaccactaccatgtaagggccatgagaagggctcatcctggcgcagcgcggacatggaggaggacttattccagctaaggcagctgccggttgtgaaattccgtcgcacaggcgagagtgcaaggtcagaggacgacacggcttcaggagagcatgaagtccagattgaaggggtccacgtgggcctagaggctgtggagctggatgatggggcagctgtgcccaaggagtttgccaatcccactgatgatactttcatggtggaagatgcagtggaagccattggctttggaaaatttcagtggaagctgtctgttctcactggcttggcttgggtggtctttgtaggcatgatgtccagctccacgctctggggaaatatctcagaccagtacggcaggaaaacagggctgaagatcagcgtgctgtggactctgtactatggcatccttagtgcatttgcgcccgtgtatagctggatcctggtgctccggggcctggtgggcttcgggatcggagg

SEQ ID NO: 21034 - DNA, 597 bp, Homo sapiens
  misc_feature 1..597: note = ENST00000548229
  source 1..597: mol_type = unassigned DNA
gtgggctggtccccagcggctccctccccgaacagctgctgctccagggaggaagcggcgcgggtgctgtccagcttcccggtgctgaaaaccggagggctcgtcatccaccactaccatgtaagggccatgagaagggctcatcctggcgcagcgcggacatggaggaggacttattccagctaaggcagctgccggttgtgaaattccgtcgcacaggcgagagtgcaaggtcagaggacgacacggcttcaggagagcatgaagtccagattgaaggggtccacgtgggcctagaggctgtggagctggatgatggggcagctgtgcccaaggagtttgccaatcccactgatgatactttcatggtggaagatgcagtggaagccattggctttggaaaatttcagtggaagctgtctgttctcactggcttggcttgggcaagtatttctggggggcagtggctcagcctccaagaaacccccatgctgctcaactgggtttccatggcctacaaggaaggacacagttctttgcacatggagcctttgcttgaatttcaatcaacaaaatttatgtggcgtaataagtggt

SEQ ID NO: 21035 - DNA, 3538 bp, Homo sapiens
  misc_feature 1..3538: note = ENST00000447399
  source 1..3538: mol_type = unassigned DNA
aggtgactgcgcggcgggctgtggctgcggaggttgaggggcgtccgaggcgcggaggggctggctgggcaggaggggttggcggggcagcagggccgcggccatggggagcttgaaggaggagctgctcaaagccatctggcacgccttcaccgcactcgaccaggaccacagcggcaaggtctccaagtcccagctcaaggtcctttcccataacctgtgcacggtgctgaaggttcctcatgacccagttgcccttgaagagcacttcagggatgatgatgagggtccagtgtccaaccagggctacatgccttatttaaacaggttcattttggaaaagattgaatacctgcttaagaagcttacagaagctatgggaggaggttggcagcaagaacaatttgaacattataaaatcaactttgatgacagtaaaaatggcctttctgcatgggaacttattgagcttattggaaatggacagtttagcaaaggcatggaccggcagactgtgtctatggcaattaatgaagtctttaatgaacttatattagatgtgttaaagcagggttacatgatgaaaaagggccacagacggaaaaactggactgaaagatggtttgtactaaaacccaacataatttcttactatgtgagtgaggatctgaaggataagaaaggagacattctcttggatgaaaattgctgtgtagagtccttgcctgacaaagatggaaagaaatgcctttttctcgtaaaatgttttgataagacttttgaaatcagtgcttcagataagaagaagaaacaggagtggattcaagccattcattctactattcatctgttgaagctgggcagccctccaccacacaaagaagcccgccagcgtcggaaagaactccggaagaagcagctggctgaacaagaggaactggagcgacaaatgaaggaactccaggccgccaacgaaagcaagcagcaggagctggaggccgtgcggaagaaactggaggaagcagcatctcgtgcagcagaagaggaaaagaaacgccttcagactcaagtggaacttcaggccaggttcagcacagagctggaaagagagaagcttatcagacagcagatggaagaacaggttgctcaaaagtcctctgaactggaacagtatttacagcgagtacgggagctggaagacatgtacctaaagctgcaggaggctcttgaagatgagagacaggcccggcaagatgaagagacagtgcggaagcttcaggccaggttgttggaggaagagtcttccaagagggctgaactagaaaagtggcacttggagcagcagcaggccattcagacaaccgaggcggagaagcaggagttggagaatcagcgtgtcctgaaggaacaggccctgcaggaggccatggagcagctggagcagcttgagttagaacggaagcaagcacttgagcagtacgaggaagttaaaaagaagctggagatggcaactaataagaccaagagctggaaggacaaagtggcccatcatgaaggattaattcgactgatagaaccaggttcaaagaaccctcacctgatcactaactggggacctgcagctttcactgaggcagaacttgaagagagagagaagaactggaaagagaaaaagaccacggagtgactgagcttgctggcagtcacgtcagttatgtagatactgcatggcaggagagctttacgctaaagacaaaagaaacagctttgggggccgggcgtggtggctcacgcctgtaatcccagcactttgggaggccgaggcgggtggatcacctgaggtcaggagttcaagagcagcctggccaacctggtgaaaccctgtctctactaaaaatacaaaaaaaattagctgagcgtggtggcgggcgcctgtaatcccagctacttgggaggctgaggcaggagaatcacttgaacgtgggaggcggaggttgcagcgagctgagatcatgccgttgtactccagcttgggcaacagagtgagactccatctcaaaacaaaacaaaacaaaacaaaacaaaaaaacccggctttgctgcttttaactcttcttccttctgtgcctctctaagtgggtcagtatcctaaggaagccttcttatttatcttcctgcaaacaagggttacctgaaaagaaaaaaaaagtcaacattgtcaagctgtttgtttactctttctttgaaaacatcaccttctgaaatttgtcttttagctctctcagattcttccccaaatgaggcagggtgcagacagcacagtcagctctgcagagtttggaggggctcactgccactgggtactcagaacctctgtggactggatgtcagctctttcctttggcagcgtgtttccttttccgagtatgtgctgttaaactagattggccggttcgctttccatttcctgacacttgacatggaatgcctttgaccattggtgctctgacagagaagtcatggagtcattgccatttcctggttgcccttttggaatgtgatcctgttagtagaggttttctagcttctactaagatatttctttccctaaccatcatacacttggcatgtttcattcccatctcctttcccctcaccttaaaggagactacccctttgccccatattgtcaacctaattttctctcgtactctctctagtgaatgatgtgctaccaagtatatgccaggctgtgagaggattatactgagtagtagaaagaagctaatttgaaataaaaattatttgtataattaagaaagcagattagatgcacatggtcaacaggaagttgactgtatgtctgctagttagattcaaaacatcataaagatgatagcatgtcaatatattagcctagccattatgttagcctttgttaggtgggcagcttttctgctttttcccttcctctgtggtgacaacggaggaaatatccaacagaaatacgtctaacagggaaattgggatcatagtttatatgcatctgatttgaaaggagtattgaggaaggttttcatatatgatctatctttggattaaaaagaacatttatgaaatcaagccttctaacactagttataattgagaagcaacagtaactccgtggacagcaatcaagcttaaaattgtaaataaatatggggataattcagttgttgcaaaaaaagggcagaattcagtagaataaagtccttttctcttacaggtattaaatgaggacagagaacctcaggtgttcttatgctagtgcttgctgagtgcatactaagaaagcaattccaaatagatgtatacatctagagagagtggtattagagattcagtgtatgtatttatttacatgagaggaaactggaatataatcccataaattatcaccttttatgactggaaaatatttgccaatgaagaaatggtctgtaggtatttgtcttaagatttttggctgtttaataaaaatgtaactttaacggtt

SEQ ID NO: 21036 - DNA, 4882 bp, Homo sapiens
  misc_feature 1..4882: note = ENST00000318950
  source 1..4882: mol_type = unassigned DNA
aggtgactgcgcggcgggctgtggctgcggaggttgaggggcgtccgaggcgcggaggggctggctgggcaggaggggttggcggggcagcagggccgcggccatggggagcttgaaggaggagctgctcaaagccatctggcacgccttcaccgcactcgaccaggaccacagcggcaaggtctccaagtcccagctcaaggtcctttcccataacctgtgcacggtgctgaaggttcctcatgacccagttgcccttgaagagcacttcagggatgatgatgagggtccagtgtccaaccagggctacatgccttatttaaacaggttcattttggaaaaggtccaagacaactttgacaagattgaattcaataggatgtgttggaccctctgtgtcaaaaaaaacctcacaaagaatcccctgctcattacagaagaagatgcatttaaaatatgggttattttcaactttttatctgaggacaagtatccattaattattgtgtcagaagagattgaatacctgcttaagaagcttacagaagctatgggaggaggttggcagcaagaacaatttgaacattataaaatcaactttgatgacagtaaaaatggcctttctgcatgggaacttattgagcttattggaaatggacagtttagcaaaggcatggaccggcagactgtgtctatggcaattaatgaagtctttaatgaacttatattagatgtgttaaagcagggttacatgatgaaaaagggccacagacggaaaaactggactgaaagatggtttgtactaaaacccaacataatttcttactatgtgagtgaggatctgaaggataagaaaggagacattctcttggatgaaaattgctgtgtagagtccttgcctgacaaagatggaaagaaatgcctttttctcgtaaaatgttttgataagacttttgaaatcagtgcttcagataagaagaagaaacaggagtggattcaagccattcattctactattcatctgttgaagctgggcagccctccaccacacaaagaagcccgccagcgtcggaaagaactccggaagaagcagctggctgaacaagaggaactggagcgacaaatgaaggaactccaggccgccaacgaaagcaagcagcaggagctggaggccgtgcggaagaaactggaggaagcagcatctcgtgcagcagaagaggaaaagaaacgccttcagactcaagtggaacttcaggccaggttcagcacagagctggaaagagagaagcttatcagacagcagatggaagaacaggttgctcaaaagtcctctgaactggaacagtatttacagcgagtacgggagctggaagacatgtacctaaagctgcaggaggctcttgaagatgagagacaggcccggcaagatgaagagacagtgcggaagcttcaggccaggttgttggaggaagagtcttccaagagggctgaactagaaaagtggcacttggagcagcagcaggccattcagacaaccgaggcggagaagcaggagttggagaatcagcgtgtcctgaaggaacaggccctgcaggaggccatggagcagctggagcagcttgagttagaacggaagcaagcacttgagcagtacgaggaagttaaaaagaagctggagatggcaactaataagaccaagagctggaaggacaaagtggcccatcatgaaggattaattcgactgatagaaccaggttcaaagaaccctcacctgatcactaactggggacctgcagctttcactgaggcagaacttgaagagagagagaagaactggaaagagaaaaagaccacggagtgactgagcttgctggcagtcacgtcagttatgtagatactgcatggcaggagagctttacgctaaagacaaaagaaacagctttgggggccgggcgtggtggctcacgcctgtaatcccagcactttgggaggccgaggcgggtggatcacctgaggtcaggagttcaagagcagcctggccaacctggtgaaaccctgtctctactaaaaatacaaaaaaaattagctgagcgtggtggcgggcgcctgtaatcccagctacttgggaggctgaggcaggagaatcacttgaacgtgggaggcggaggttgcagcgagctgagatcatgccgttgtactccagcttgggcaacagagtgagactccatctcaaaacaaaacaaaacaaaacaaaacaaaaaaacccggctttgctgcttttaactcttcttccttctgtgcctctctaagtgggtcagtatcctaaggaagccttcttatttatcttcctgcaaacaagggttacctgaaaagaaaaaaaaagtcaacattgtcaagctgtttgtttactctttctttgaaaacatcaccttctgaaatttgtcttttagctctctcagattcttccccaaatgaggcagggtgcagacagcacagtcagctctgcagagtttggaggggctcactgccactgggtactcagaacctctgtggactggatgtcagctctttcctttggcagcgtgtttccttttccgagtatgtgctgttaaactagattggccggttcgctttccatttcctgacacttgacatggaatgcctttgaccattggtgctctgacagagaagtcatggagtcattgccatttcctggttgcccttttggaatgtgatcctgttagtagaggttttctagcttctactaagatatttctttccctaaccatcatacacttggcatgtttcattcccatctcctttcccctcaccttaaaggagactacccctttgccccatattgtcaacctaattttctctcgtactctctctagtgaatgatgtgctaccaagtatatgccaggctgtgagaggattatactgagtagtagaaagaagctaatttgaaataaaaattatttgtataattaagaaagcagattagatgcacatggtcaacaggaagttgactgtatgtctgctagttagattcaaaacatcataaagatgatagcatgtcaatatattagcctagccattatgttagcctttgttaggtgggcagcttttctgctttttcccttcctctgtggtgacaacggaggaaatatccaacagaaatacgtctaacagggaaattgggatcatagtttatatgcatctgatttgaaaggagtattgaggaaggttttcatatatgatctatctttggattaaaaagaacatttatgaaatcaagccttctaacactagttataattgagaagcaacagtaactccgtggacagcaatcaagcttaaaattgtaaataaatatggggataattcagttgttgcaaaaaaagggcagaattcagtagaataaagtccttttctcttacaggtattaaatgaggacagagaacctcaggtgttcttatgctagtgcttgctgagtgcatactaagaaagcaattccaaatagatgtatacatctagagagagtggtattagagattcagtgtatgtatttatttacatgagaggaaactggaatataatcccataaattatcaccttttatgactggaaaatatttgccaatgaagaaatggtctgtaggtatttgtcttaagatttttggctgtttaataaaaatgtaactttaacggtttcttatagttgcctttataaagtgtattgtctaaaatatttttgtatcatgtgcctttgaaatttgacagctgatttgggtgttggatttctgcccagccatttatcagtattatcattttattcagtagctggcaggtgtattagaccaacgagacttaggtaaggaatggaacctttcctgtggtttgactgcacattacaccagaagactccagtatccctcattccagaatgaggaaaaagtattctacaaagaacctaatcacctctgtgaaatctatgggatggaaacagtgtggccttaggagtcaaatagtctctgcatggtggggaggatcatgatggaatatgtgaatttctacttctagaagttgtgaaataggtcctgcacttttgcagaatgtccttctttaaacctggcttattccacagctgtagctgataacatgacctggggcttagctgctctagccctgggttcttggagacctcacactgcctggcccctggccatccacctaaggactgcctgctttctggtcacatgtggaccttgatacgactaagcggttacatatgtggttgtgcaaaagctttctgtttaatgcatagtgttaccgatttacatcttggttttcagtggcactatgtctaggaggcaatatccttttaaacagtgctttggctaagatagatacttgtgaatcaaagatagcacagaaatgaactaagtatatcccatttggaattatattttgatactatttaaaatggtttcacctgttaaagggccaacagaactcttggttttacttttgtaattactgtacagaaaatttcaagagtgtttgagtgcttgtcatcaggtgttttccttaataagtagggatatgatcatttacaggaattatatatgaaaaaagtttttgaaatgtatttttgtgatgtgctatgttgaggggaaaccaaatatttatgattttaaaacattcgtatgaaaacattgtacaatgtaatatgctcaactttctcaattttttgctaatttttctaagatacattaaaaatgttttatatttttttttaagtaaaatggacccagtaagaaaattaaaaataccagaacatacactttaaactgtctgatttaataaaacagtggggggta

SEQ ID NO: 21037 - DNA, 813 bp, Homo sapiens
  misc_feature 1..813: note = ENST00000526358
  source 1..813: mol_type = unassigned DNA
gactgcgcggcgggctgtggctgcggaggttgaggggcgtccgaggcgcggaggggctggctgggcaggaggggttggcggggcagcagggccgcggccatggggagcttgaaggaggagctgctcaaagccatctggcacgccttcaccgcactcgaccaggaccacagcggcaaggtctccaagtcccagctcaaggtcctttcccataacctgtgcacggtgctgaaggttcctcatgacccagttgcccttgaagagcacttcagggatgatgatgagggtccagtgtccaaccagggctacatgccttatttaaacaggttcattttggaaaagattaccaagacccttcctgcctcagagccttcagacatgctgcttcctgtgctgtccaagacaactttgacaagattgaattcaataggatgtgttggaccctctgtgtcaaaaaaaacctcacaaagaatcccctgctcattacagaagaagatgcatttaaaatatgggttattttcaactttttatctgaggacaagtatccattaattattgtgtcagaagagattgaatacctgcttaagaagcttacagaagctatgggaggaggttggcagcaagaacaatttgaacattataaaatcaactttgatgacagtaaaaatggcctttctgcatgggaacttattgagcttattggaaatggacagtttagcaaaggcatggaccggcagactgtgtctatggcaattaatgaagtctttaatgaacttatattagatgtgttaaagcagggttacatgatgaaaaagg

SEQ ID NO: 21038 - DNA, 716 bp, Homo sapiens
  misc_feature 1..716: note = ENST00000531814
  source 1..716: mol_type = unassigned DNA
tgcggaggttgaggggcgtccgaggcgcggaggggctggctgggcaggaggggttggcggggcagcagggccgcggccatggggagcttgaaggaggagctgctcaaagccatctggcacgccttcaccgcactcgaccaggaccacagcggcaaggtctccaagtcccagctcaaggtcctttcccataacctgtgcacggtgctgaaggttcctcatgacccagttgcccttgaagagcacttcagggatgatgatgagggtccagtgtccaaccagggctacatgccttatttaaacaggttcattttggaaaagattgaatacctgcttaagaagcttacagaagctatgggaggaggttggcagcaagaacaatttgaacattataaaatcaactttgatgacagtaaaaatggcctttctgcatgggaacttattgagcttattggaaatggacagtttagcaaaggcatggaccggcagactgtgtctatggcaattaatgaagtctttaatgaacttatattagatgtgttaaagcaggtaagaattctgttactgtttttttttctcatctttagaatttgacattttaaaattaatatttttgtcacaaagatgagtataagtcacttattttcttacactgatttcgtttttttattttttgtttttttgagacagtcttgctctgtcgcccagtctggagtgca

SEQ ID NO: 21039 - DNA, 3006 bp, Homo sapiens
  misc_feature 1..3006: note = ENST00000524817
  source 1..3006: mol_type = unassigned DNA
ggctggctgggcaggaggggttggcggggcagcagggccgcggccatggggagcttgaaggaggagctgctcaaagccatctggcacgccttcaccgcactcgaccaggaccacagcggcaaggtctccaagtcccagctcaaggtcctttcccataacctgtgcacggtgctgaaggttcctcatgacccagttgcccttgaagagcacttcagggatgatgatgagggtccagtgtccaaccagggctacatgccttatttaaacaggttcattttggaaaaggtccaagacaactttgacaagattgaattcaataggatgtgttggaccctctgtgtcaaaaaaaacctcacaaagaatcccctgctcattacagaagaagatgcatttaaaatatgggttattttcaactttttatctgaggacaagtatccattaattattgtgtcagaagagattgaatacctgcttaagaagcttacagaagctatgggaggaggttggcagcaagaacaatttgaacattataaaatcaactttgatgacagtaaaaatggcctttctgcatgggaacttattgagcttattggaaatggacagtttagcaaaggcatggaccggcagactgtgtctatggcaattaatgaagtctttaatgaacttatattagatgtgttaaagcagggttacatgatgaaaaagggccacagacggaaaaactggactgaaagatggtttgtactaaaacccaacataatttcttactatgtgagtgaggatctgaaggataagaaaggagacattctcttggatgaaaattgctgtgtagagtccttgcctgacaaagatggaaagaaatgcctttttctcgtaaaatgttttgataagacttttgaaatcagtgcttcagataagaagaagaaacaggagtggattcaagccattcattctactattcatctgttgaagctgggcagccctccaccacacaaagaagcccgccagcgtcggaaagaactccggaagaagcagctggctgaacaagaggaactggagcgacaaatgaaggaactccaggccgccaacgaaagcaagcagcaggagctggaggccgtgcggaagaaactggaggaagcagcatctcgtgcagcagaagaggaaaagaaacgccttcagactcaagtggaacttcaggccaggttcagcacagagctggaaagagagaagcttatcagacagcagatggaagaacaggttgctcaaaagtcctctgaactggaacagtatttacagcgagtacgggagctggaagacatgtacctaaagctgcaggaggctcttgaagatgagagacaggcccggcaagatgaagagacagtgcggaagcttcaggccaggtgccagatttgtttgcagactttgcctttatgtactttgcctgggctaatacagtttcttggaatgactaacactctggtggagagggagaagtgtctctgctctggctgtgactgagctcgaggtgctgtccagattagaaagactgtggagactcgaccggctggagtgtttcttttcattctgaggcgctgggaaacccttgcttctggggctaaataagggcctattttagagcagtctggtaggtatgtttgatgaggtacccttagtcttattcgagaaaatccacaaacccagaattacctctgataagagcttggcatcttcaacacgctccagaccagagagggccattggtatgcaggcagaggcctgttcaggccaacgttgccgtcaggttttgaggaataaggaagaaatatgcagtttctatttggtcattcaggattggtaacattccttcagtaattactacttgaaatcctaattttaaaagtatttgaaacctagattttttttccccttagaactttatgatagtcatgttcgcagatgaaaattctcaattttgggccttcatggcagcagggaggacaaaataaaatgaagactcccaaagggaaaaattgagcctatcctctgccagtttctactttgctgccccatttacattatttaaggtgtctgggatgggagacaacactaaaaagtattcactacagtagcagcacagggtccagtctttgatctctgaccccctgttttggggagcagttatgagatgagctagggtagattttccatggctgccattttacatgtggagcagcaaaagatgtttctttaatctttagataggaagagaaagaagaagccatctttagttgtatattttgccaaaagtgacttcaaaaataaataaattgttttggacatttagattttaaatttaaatttttttaaggaaaaattattttctaaatagaaaattaagcatgtagcatattgccaggcatatataggccccacaggtgcacattcactgcactgtgaggttaatcaggttcttggaactcccctccagtgccactcggcagtgattttagcagaagagtcactctacgggaatgtttgagtgccatgtgacgtccagagtgacgttctacatgacactcaacattttttgagccacctcataatttgagccgtgttgagagttaatagattgtttttgtgcaaagaattcgcaggtgaaatatgctatatgtattactgcagttttgtgggaagttgattatgacacagcagagactagatcacagagggaaccagataattctagaaatactagtcttagttatttagtgtttatagaatgagtgatattttgaataagggataattttggataattgaagccagtggttttttaaccaatgttatgtatcagaatcacctcacaaagcttctgaaaaatacaccacaaagtgtggctcacccaccacactttgggaggccgaggctggaggatcacttgaacccaggagtttatgaccagcctgagcaacatggtgaaacctcatctttaaaaaaaaaaaaaaa

SEQ ID NO: 21040 - DNA, 1131 bp, Homo sapiens
  misc_feature 1..1131: note = ENST00000534662
  source 1..1131: mol_type = unassigned DNA
agaattgatgcaggccactagagactaaaacggcaacacatgatttattatttagtataattgaatagtggagaatggtaatgtttgtctctccttggcccaatataatgaatcaaaaggcccttaagttatttggttatgatacgtatatgattgtgttgaaagtcagcaggaaatgaatctagattagttgtctggcacagtcactgggaatgctgagcagatcgaagctgggtgctaatgacaacttcataaggcttgggagggcaccttcagaaaggttcaggatgaacctggcaagctacttctagagctgagtttgctactaataggcgctttctgagttacaaacataacaagtcatctgattttgaagaaactgaagcttggagtgtgaatgacgtgggttcagtaagagattgaatacctgcttaagaagcttacagaagctatgggaggaggttggcagcaagaacaatttgaacattataaaatcaactttgatgacagtaaaaatggcctttctgcatgggaacttattgagcttattggaaatggacagtttagcaaaggcatggaccggcagactgtgtctatggcaattaatgaagtctttaatgaacttatattagatgtgttaaagcagggttacatgatgaaaaagggccacagacggaaaaactggactgaaagatggtttgtactaaaacccaacataatttcttactatgtgagtgaggatctgaaggataagaaaggagacattctcttggatgaaaattgctgtgtagagtccttgcctgacaaagatggaaagaaatgcctttttctcgtaaaatgttttgataagacttttgaaatcagtgcttcagataagaagaagaaacaggagtggattcaagccattcattctactattcatctgttgaagctgggcagccctccaccacacaaagaagcccgccagcgtcggaaagaactccggaagaagcagctggctgaacaagaggaactggagcgacaaatgaaggaactccaggccgccaacgaaagcaagcagcaggagctggaggccgtgcggaagaaactggaggaagcagcatctcgtgcagcagaagaggaaaagaaacg

SEQ ID NO: 21041 - DNA, 977 bp, Homo sapiens
  misc_feature 1..977: note = ENST00000534562
  source 1..977: mol_type = unassigned DNA
attttcctgttggtctggggcagagttcctccttcagaatattgagaggtcaggcagaaagggttacatgatgaaaaagggccacagacggaaaaactggactgaaagatggtttgtactaaaacccaacataatttcttactatgtgagtgaggatctgaaggataagaaaggagacattctcttggatgaaaattgctgtgtagagtccttgcctgacaaagatggaaagaaatgcctttttctcgtaaaatgttttgataagacttttgaaatcagtgcttcagataagaagaagaaacaggagtggattcaagccattcattctactattcatctgttgaagctgggcagccctccaccacacaaagaagcccgccagcgtcggaaagaactccggaagaagcagctggctgaacaagaggaactggagcgacaaatgaaggaactccaggccgccaacgaaagcaagcagcaggagctggaggccgtgcggaagaaactggaggaagcagcatctcgtgcagcagaagaggaaaagaaacgccttcagactcaagtggaacttcaggccaggttcagcacagagctggaaagagagaagcttatcagacagcagatggaagaacaggttgctcaaaagtcctctgaactggaacagtatttacagcgagtacgggagctggaagacatgtacctaaagctgcaggaggctcttgaagatgagagacaggcccggcaagatgaagagacagtgcggaagcttcagcgagctgagatcatgccgttgtactccagcttgggcaacagagtgagactccatctcaaaacaaaacaaaacaaaacaaaacaaaaaaacccggctttgctgcttttaactcttcttccttctgtgcctctctaagtgggtcagtatcctaaggaagccttcttatttatcttcctgcaaacaagggttacctgaaaagaaaaaaaaa

SEQ ID NO: 21042 - DNA, 6129 bp, Homo sapiens
  misc_feature 1..6129: note = ENST00000380155
  source 1..6129: mol_type = unassigned DNA
tctccctgggagtcgcgcagagtggagtcaaaggcaaccagtgctcgctgcggtctctggggatcgggaccgcggcggcggcccgcgagcgggatgttccggggcttgagcagttggttgggcttgcagcagccggtggcaggcggtgggcagcccaatggagatgctccacccgagcagccgtccgagacggtggctgagtctgcggaggaggagctgcagcaagcgggagaccaggagctcctccaccaggccaaagacttcggcaactatttatttaactttgcatctgctgccacaaaaaagataactgaatcagttgctgaaacagcacaaacaataaagaaatccgtagaagaaggaaaaatagatggcatcattgacaagacaattataggagattttcagaaggaacagaaaaaatttgttgaagagcaacatacaaagaagtcagaagcagctgtgcccccatgggttgacactaacgatgaagaaacaattcaacaacaaattttggccttatcagctgacaagaggaatttccttcgtgaccctccggctggcgtgcaatttaatttcgactttgatcagatgtaccccgtggccctggtcatgctccaggaggatgagctgctaagcaagatgagatttgccctcgttcctaaacttgtgaaggaagaagtgttctggaggaactacttttaccgcgtctccctgattaagcagtcagcccagctcacggccctggctgcccaacagcaggccgcagggaaggaggagaagagcaatggcagagagcaagatttgccgctggcagaggcagtacggcccaaaacgccacccgttgtaatcaaatctcagcttaaaactcaagaggatgaggaagaaatttctactagcccaggtgtttctgagtttgtcagtgatgccttcgatgcctgtaacctaaatcaggaagatctaaggaaagaaatggagcaactagtgcttgacaaaaagcaagaggagacagccgtactggaagaggattctgcagattgggaaaaagaactgcagcaggaacttcaagaatatgaagtggtgacagaatctgaaaaacgagatgaaaactgggataaggaaatagagaaaatgcttcaagaggaaaattagctgttcctgaaatagaagaataatccttaacagtctgcaaactgacattaaattctagatgttgacaattactgaatcagaaggcatgaaagagtataattttatgaaattcaaaattattcttttttcaagttgaaacttgcctcttctactttaaaaaagtatatagaacagttacttctaataatcagaaagagatgttttatagaacatttctttaatataaagttagagatgtcttcataggcagtatggctatctttgccacagaaacataagtaaaattttagagttctgttttccatgaggtcaaaaatataatttattcctcagtcatggttttctaaatatctgtactccacattccattttaattgatatgagggtgttaaagtacctacttaatgggttgattactatcaaaatgaccaaattataccaaagaacttaagaggaagcactttcagaactattcacttgccaggtattttctaaaattccacctgaaagccaaaagataaaataaataagttgattttaatgatataagcatcacacaattttacattaagaaatactgtgcaggccatgcgtggtggctcaggcctgtaatcccagcactttgggaggccgaggtgggcagatcaccggaggtcaggagttcgagaccagccttgccaacatagtgaaaccctgtctctactaaaaatacaaaaattagccgggcatggtggcaggcacctgtaatcccagctactagggaggcttttgaacccaggaggcagaggttgcagcgagctgagatcgcgccactgcactccagcctgggtgatagagtgagattcagtctcaaaaaaaaaaaaaaaaaaaagctgtgcgaaaatatttgtttttctctggggccttttctttcttttctttttaaactataccagaaattttacatcacagtttttatacaaagtgggaccttccatactttttgtattacaataaccttcagaagcccattccccttaaagtctgttgttcttgttttaatcatcaccacatataaatgttttagctttgtcttaaactgtgagtcttcataaaattgtgttcctccgagttcaccttctaggactttattgattaatccttctctttctgctataccagcagacacatattcatagaatatgattatttttaaagaacaaggtgaggaggctgaggcaggagaattgcttgaacctgggagatggaggttgcagtgagctgagatcacgccactgcactccagcctgggtgacagagtgagagactccgtctcaaaaatgaatgaatgaatgaatgaatgaatgaacgaacgaacaaggtggtttaatgtcagaaaacttcctaagcatttgctccccaaacctttcatgtttttcaagaagcctttattacataaaggggaatagaattaaaatgtttctttataagaaaaatatacatatttgtgttcttggccccattaaaactagtcagtagtcctttggcaaagatatagtcaacaagagaactgggtatgagtccaggcattactcctgttcatagttgtggatgcatgtgtctgagccagactgtctcaactggagtctcttgggttatagcagtaaacccgtgtattccatgaaaccactgggcccatcatcaaaaggtttccacttgtggtgccacagttgcttattactgagtttgggttccaagatgactggcaacttctgaaataatctcattgaaggaaagagtttcattttttttttaaaagagtttgctggaggaaaagaagcatgttaaatgtttttaagcagctaaaagtcctagatggaagcatatcaggatgtgtcggtgcttggctcttagtgaatgcactaaaattcttattgataaatgttgaataaacacacacaaaaaagtatcagagaaagagaaaaaccctacaatggcaatagaggtgtgtgacagttattgctatcaattttacataatatctcatttaaaaacaacctaattatgcattgcctgtgaaaataaaaggataaaataagattttgtacatactgtaagaatacagttgtgctgtatttttatggattcatcaaggagtaaaatgttctgctttagtaaattatataggtaactgaagtgttattcctttaaagagcaaaataatttatcaccatgtttggtggaaaatttctaagtatttattacatgcctaggggttagccaacaagatataccaagcatgaaaacctgtaaaacttaataaaatgctaaaatatgaacatcacactatggagattatgcctcactactcaaagagtgtggctcaggaaccagtgtagcttggccatgccctggcagtatgttggaaatgcctgccccagaccagttgatgttactaagaacgcccaggggatgagaatggactttatttacagtttgggaagcactggtctaatatgctctcagggaagctgaggtttctactgctttttactttttacccttccactagatgtcctttgcagcagtgtttttctagttggcattacaggtgtctcctctgaggttccagttatttctatactaccaaaattaaaaagacccaagggctgggcatggtggttcacacctgtaatcccagcactttgggaggctgaggcaggcagattgcttgagctcaggagttcaagaccagcctgggcaacatagggagacccctgcctctacaaaaatacaaatgagccaggtgtggtagcccacacctgtggtcctagctacttggaaggctgaggcaggaggatcgcttgagcccaggagatccaggctgcagtaagccatgatcatgccactgcacttcagcctgggtgacagagactctgtttcaaaaaagggagggggggcaagtttttagggggatgagaaatattcttggtaaatcgggcatttctttttttgtttgtttttttttcttggagacagaatcttgctctgtcacccaggctggagtgcagtggcttgatctcagctcacggcaacctccgcctcccaagttcaagcgattctcccacctcagcctccagagtagctgggattacaggcaaccgccaccatgcccagctaatttttttgtatttttagcagagatggggtttcaccgtgttggccaggctggtctcaagctcctgatctcaaatgatccgcacgccttgacctcccaaagtgttgggattacaggcatgagccacagccttaattggtaatttttgaaaaaaaaactagagaaacattgtttcagagataaagcagcaattacacttgtactcccagtgatttaagatgcactattgtaatcaagatgatttgctttaatcaaaatattgttaaaaataggatttcaggacatttaaaaggtttcagcagaaatcttatgattatgtctgacttgcagtattttatttgcctctttgacggctttttttttttttttttttttgagacagagtctcacactgttgcctgggctggaatgcaatggcgcagtctcagctcactgcaaacctccggctcccgggttcaggcagttctcctgcctcagcctccctagtagctgggattataggcatgtgccaccacacccggctaatttttgtatttttagtagagacagggtttcgccatgttggtcaggctggtcttgaactcccaacctcaggtgatccgcccgcctcggcctcccaaagtgctgggattacaggcgtgagccactgcgcccaaccttaatggctttttggtattaaaaaccaggactctgaatgtgcatcaataattcaaataattttatatagttactctttctagtaatagatacccccctccatttttaagtaaagataaacattttttaattaggaaaattaggcacatttaattttagcaaatttagtttttcaacttttttttttttctttttttttttttttgagatggaggctcactctgttgccctggctggagtgcagtggccgcaacctcggctcactgcaacctccgcctcctgggttcaagtgattctcctgcctcagcctcccgagtagctgggattacaggcgtgtgccaccacacctggctaatttttgtatttttagtagagacggggtttcaccatgttggccaggctggtcttgaacgactggcctcaggtgatccgcccacctcggcctctcaaagtgctgggattacaggcatgagccaccatgcccagccagtttttcaacttttaaaaataaaagtggtagaatttttttttttctttttgagacagggtcttgctctgtcactcaggctagagtgcagtggtgggatctcagctcactgcagcctccgcctcccaggcttaagggatcctccctcctcagcctcccgagtagctgggaccacaggcatgcaccaccacgcctggctaatttttgtattttttgtagagatgggtgtctccccatgttgctcaggctgttcttgaacttctgagctcaggtgatctatctgcctcggccttccaaagtgctgggattacaggcatgatgagccactgcacctggccaaaagtggcagaaattttgatatggtttataatcagttttattgtggggaagatgggccattttaatgaatgattatttctattggctaaactaccgagtcacgacatgacaaatacacatgaagctttaatcacatgcagttatatacttctcacaaatcatcaaattatttatctggtcttcacactaagggatttacttagataagccatcgatgatttcagttgttaaaagtgtggctttttaaacagcatttattcagtgcatcctgatttatttcaaaatgaaaaattgttacctttttttctgaataaataaagcttacttttagtggcaa

SEQ ID NO: 21043 - DNA, 604 bp, Homo sapiens
  misc_feature 1..604: note = ENST00000495743
  source 1..604: mol_type = unassigned DNA
caggcggtgggcagcccaatggagatgctccacccgagcagccgtccgagacggtggctgagtctgcggaggaggagctgcagcaagcgggagaccaggagctcctccaccaggccaaagacttcggcaactatttatttaactttgcatctgctgccacaaaaaagataactgaatcagttgctgaaacagcacaaacaataaagaaatccgtagaagaaggaaaaatagatggcatcattgacaagacaattataggagattttcagaaggaacagaaaaaatttgttgaagagcaacatacaaagaagtcaggtatggtataggtttgtcttaattaacctgccaggttttattgagcacctgttatgtgctagataccacactgagggtctgagaacacaaaaatgcatatgcaatggccccatcctttgggtagcacaaagactagtgagggagacaaacccataaacttccatgatttaaaggaagggactagattgtttctgggtgagggctgccagtgctggccccactggggagctggctgtgaaaggggcaagtaagctttcagttctgactttctcttttcttttcccccacc

SEQ ID NO: 21044 - DNA, 3522 bp, Homo sapiens
  misc_feature 1..3522: note = ENST00000369522
  source 1..3522: mol_type = unassigned DNA
ctgggagcctggcaagcccacacagcgacggttatttagccgttgaactgccagccgcccggggcccacgcgctccgggccgctcaggctgagcgatttcccgccttttctgaggttctgaggcgggagccattggttctttctgttgccctcatagaccgtatgtagcagttcgcgtgggcacagaacccacggtttcccgctagttcttcaaagatatttacaaccgtaacagagaaaatggaaaagcaaaagccctttgcattgttcgtaccaccgagatcaagcagcagtcaggtgtctgcggtgaaacctcagaccctgggaggcgattccactttcttcaagagtttcaacaaatgtactgaagatgattttgagtttccatttgcaaagactaatctctccaaaaatggggaaaacattgattcagatcctgctttacaaaaagttaatttcttgcccgtgcttgagcaggttggtaattctgactgtcactatcaggaaggactaaaagactctgatttggagaattcagagggattgagcagagtgtattcaaaactgtataaggaggctgaaaagataaaaaaatggaaagtaagtacagaagctgaactgagacagaaagaaagtaagttgcaagaaaacagaaagataattgaagcacagcgaaaagccattcaggaactgcaatttggaaatgaaaaagtaagtttgaaattagaagaaggaatacaagaaaataaagatttaataaaagagaataatgccacaaggcatttatgtaatctactcaaagaaacctgtgctagatctgcagaaaagacaaagaaatatgaatatgaacgggaagaaaccaggcaagtttatatggatctaaataataacattgagaaaatgataacagcttttgaggaacttcgtgtgcaagctgagaattccagactggaaatgcattttaagttaaaggaagattatgaaaaaatccaacaccttgaacaagaatacaagaaggaaataaatgacaaggaaaagcaggtatcactactattgatccaaatcactgagaaagaaaataaaatgaaagatttaacatttctgctagaggaatccagagataaagttaatcaattagaggaaaagacaaaattacagagtgaaaacttaaaacaatcaattgagaaacagcatcatttgactaaagaactagaagatattaaagtgtcattacaaagaagtgtgagtactcaaaaggctttagaggaagatttacagatagcaacaaaaacaatttgtcagctaactgaagaaaaagaaactcaaatggaagaatctaataaagctagagctgctcattcgtttgtggttactgaatttgaaactactgtctgcagcttggaagaattattgagaacagaacagcaaagattggaaaaaaatgaagatcaattgaaaatacttaccatggagcttcaaaagaaatcaagtgagctggaagagatgactaagcttacaaataacaaagaagtagaacttgaagaattgaaaaaagtcttgggagaaaaggaaacacttttatatgaaaataaacaatttgagaagattgctgaagaattaaaaggaacagaacaagaactaattggtcttctccaagccagagagaaagaagtacatgatttggaaatacagttaactgccattaccacaagtgaacagtattattcaaaagaggttaaagatctaaaaactgagcttgaaaacgagaagcttaagaatactgaattaacttcacactgcaacaagctttcactagaaaacaaagagctcacacaggaaacaagtgatatgaccctagaactcaagaatcagcaagaagatattaataataacaaaaagcaagaagaaaggatgttgaaacaaatagaaaatcttcaagaaacagaaacccaattaagaaatgaactagaatatgtgagagaagagctaaaacagaaaagagatgaagttaaatgtaaattggacaagagtgaagaaaattgtaacaatttaaggaaacaagttgaaaataaaaacaagtatattgaagaacttcagcaggagaataaggccttgaaaaaaaaaggtacagcagaaagcaagcaactgaatgtttatgagataaaggtcaataaattagagttagaactagaaagtgccaaacagaaatttggagaaatcacagacacctatcagaaagaaattgaggacaaaaagatatcagaagaaaatcttttggaagaggttgagaaagcaaaagtaatagctgatgaagcagtaaaattacagaaagaaattgataagcgatgtcaacataaaatagctgaaatggtagcacttatggaaaaacataagcaccaatatgataagatcattgaagaaagagactcagaattaggactttataagagcaaagaacaagaacagtcatcactgagagcatctttggagattgaactatccaatctcaaagctgaacttttgtctgttaagaagcaacttgaaatagaaagagaagagaaggaaaaactcaaaagagaggcaaaagaaaacacagctactcttaaagaaaaaaaagacaagaaaacacaaacatttttattggaaacacctgaaatttattggaaattggattctaaagcagttccttcacaaactgtatctcgaaatttcacatcagttgatcatggcatatccaaagataaaagagactatctgtggacatctgccaaaaatactttatctacaccattgccaaaggcatatacagtgaagacaccaacaaaaccaaaactacagcaaagagaaaacttgaatatacccattgaagaaagtaaaaaaaagagaaaaatggcctttgaatttgatattaattcagatagttcagaaactactgatcttttgagcatggtttcagaagaagagacattgaaaacactgtataggaacaataatccaccagcttctcatctttgtgtcaaaacaccaaaaaaggccccttcatctctaacaacccctggatctacactgaagtttggagctataagaaaaatgcgggaggaccgttgggctgtaattgctaaaatggatagaaaaaaaaaactaaaagaagctgaaaagttatttgtttaatttcagagaatcagtgtagttaaggagcctaataacgtgaaacttatagttaatattttgttcttatttgccagagccaaattttatctggaagttgagacttaaaaaatacttgcatgaatgatttgtgtttctttatatttttagcctaaatgttaactacatattgtctggaaacctgtcattgtattcagataattagatgattatatattgttgttactttttcttgtattcatgaaaactgtttttactaagttttcaaatttgtaaagttagcctttgaatgctaagaatgcattattgagggtcattctttattctttactattaaaatattttggatgcaaa

SEQ ID NO: 21045 - DNA, 2554 bp, Homo sapiens
  misc_feature 1..2554: note = ENST00000455987
  source 1..2554: mol_type = unassigned DNA
ccacgcgctccgggccgctcaggctgagcgatttcccgccttttctgaggttctgaggcgggagccattggttctttctgttgccctcatagaccgtatgtagcagttcgcgtgggcacagaacccacggtttcccgctagttcttcaaagtagatatttacaaccgtaacagagaaaatggaaaagcaaaagccctttgcattgttcgtaccaccgagatcaagcagcagtcaggtgtctgcggtgaaacctcagaccctgggaggcgattccactttcttcaagagtttcaacaaatgtactgaagatgattttgagtttccatttgcaaagactaatctctccaaaaatggggaaaacattgattcagatcctgctttacaaaaagttaatttcttgcccgtgcttgagcaggttggtaattctgactgtcactatcaggaaggactaaaagactctgatttggagaattcagagggattgagcagagtgtattcaaaactgtataaggaggctgaaaagataaaaaaatggaaagtaagtacagaagctgaactgagacagaaagaaagtaagttgcaagaaaacagaaagataattgaagcacagcgaaaagccattcaggaactgcaatttggaaatgaaaaagtaagtttgaaattagaagaaggaatacaagaaaataaagatttaataaaagagaataatgccacaaggcatttatgtaatctactcaaagaaacctgtgctagatctgcagaaaagacaaagaaatatgaatatgaacgggaagaaaccaggcaagtttatatggatctaaataataacattgagaaaatgataacagcttttgaggaacttcgtgtgcaagctgagaattccagactggaaatgcattttaagttaaaggaagattatgaaaaaatccaacaccttgaacaagaatacaagaaggaaataaatgacaaggaaaagcaggtatcactactattgatccaaatcactgagaaagaaaataaaatgaaagatttaacatttctgctagaggaatccagagataaagttaatcaattagaggaaaagacaaaattacagagtgaaaacttaaaacaatcaattgagaaacagcatcatttgactaaagaactagaagatattaaagtgtcattacaaagaagtgtgagtactcaaaaggctttagaggaagatttacagatagcaacaaaaacaatttgtcagctaactgaagaaaaagaaactcaaatggaagaatctaataaagctagagctgctcattcgtttgtggttactgaatttgaaactactgtctgcagcttggaagaattattgagaacagaacagcaaagattggaaaaaaatgaagatcaattgaaaatacttaccatggagcttcaaaagaaatcaagtgagctggaagagatgactaagcttacaaataacaaagaagtagaacttgaagaattgaaaaaagtcttgggagaaaaggaaacacttttatatgaaaataaacaatttgagaagattgctgaagaattaaaaggaacagaacaagaactaattggtcttctccaagccagagagaaagaagtacatgatttggaaatacagttaactgccattaccacaagtgaacagtattattcaaaagaggttaaagatctaaaaactgagcttgaaaacgagaagcttaagaatactgaattaacttcacactgcaacaagctttcactagaaaacaaagagctcacacaggaaacaagtgatatgaccctagaactcaagaatcagcaagaagatattaataataacaaaaagcaagaagaaaggatgttgaaacaaatagaaaatcttcaagaaacagaaacccaattaagaaatgaactagaatatgtgagagaagagctaaaacagaaaagagatgaagttaaatgtaaattggacaagagtgaagaaaattgtaacaatttaaggaaacaagttgaaaataaaaacaagtatattgaagaacttcagcaggagaataaggccttgaaaaaaaaaggtacagcagaaagcaagcaactgaatgtttatgagataaaggtcaataaattagagttagaactagaaagtgccaaacagaaatttggagaaatcacagacacctatcagaaagaaattgaggacaaaaagatatcagaagaaaatcttttggaagaggttgagaaagcaaaagtaatagctgatgaagcagtaaaattacagaaagaaattgataagcgatgtcaacataaaatagctgaaatggtagcacttatggaaaaacataagcaccaatatgataagatcattgaagaaagagactcagaattaggactttataagagcaaagaacaagaacagtcatcactgagagcatctttggagattgaactatccaatctcaaagctgaacttttgtctgttaagaagcaacttgaaatagaaagagaagagaaggaaaaactcaaaagagaggcaaaagaaaacacagctactcttaaagaaaaaaaa

SEQ ID NO: 21046 - DNA, 3452 bp, Homo sapiens
  misc_feature 1..3452: note = ENST00000369518
  source 1..3452: mol_type = unassigned DNA
caggaacttaagacagttcctcctggcgatgtgatggaatttaatgggacaggagaagggaacgggctttcttttcaggccagcgtggcagcgggcggtagggcgaaagggagaaggaaacgagggtttattccgttgcccactccgcgatatttacaaccgtaacagagaaaatggaaaagcaaaagccctttgcattgttcgtaccaccgagatcaagcagcagtcaggtgtctgcggtgaaacctcagaccctgggaggcgattccactttcttcaagagtttcaacaaatgtactgaagatgattttgagtttccatttgcaaagactaatctctccaaaaatggggaaaacattgattcagatcctgctttacaaaaagttaatttcttgcccgtgcttgagcaggttggtaattctgactgtcactatcaggaaggactaaaagactctgatttggagaattcagagggattgagcagagtgtattcaaaactgtataaggaggctgaaaagataaaaaaatggaaagtaagtacagaagctgaactgagacagaaagaaagtaagttgcaagaaaacagaaagataattgaagcacagcgaaaagccattcaggaactgcaatttggaaatgaaaaagtaagtttgaaattagaagaaggaatacaagaaaataaagatttaataaaagagaataatgccacaaggcatttatgtaatctactcaaagaaacctgtgctagatctgcagaaaagacaaagaaatatgaatatgaacgggaagaaaccaggcaagtttatatggatctaaataataacattgagaaaatgataacagcttttgaggaacttcgtgtgcaagctgagaattccagactggaaatgcattttaagttaaaggaagattatgaaaaaatccaacaccttgaacaagaatacaagaaggaaataaatgacaaggaaaagcaggtatcactactattgatccaaatcactgagaaagaaaataaaatgaaagatttaacatttctgctagaggaatccagagataaagttaatcaattagaggaaaagacaaaattacagagtgaaaacttaaaacaatcaattgagaaacagcatcatttgactaaagaactagaagatattaaagtgtcattacaaagaagtgtgagtactcaaaaggctttagaggaagatttacagatagcaacaaaaacaatttgtcagctaactgaagaaaaagaaactcaaatggaagaatctaataaagctagagctgctcattcgtttgtggttactgaatttgaaactactgtctgcagcttggaagaattattgagaacagaacagcaaagattggaaaaaaatgaagatcaattgaaaatacttaccatggagcttcaaaagaaatcaagtgagctggaagagatgactaagcttacaaataacaaagaagtagaacttgaagaattgaaaaaagtcttgggagaaaaggaaacacttttatatgaaaataaacaatttgagaagattgctgaagaattaaaaggaacagaacaagaactaattggtcttctccaagccagagagaaagaagtacatgatttggaaatacagttaactgccattaccacaagtgaacagtattattcaaaagaggttaaagatctaaaaactgagcttgaaaacgagaagcttaagaatactgaattaacttcacactgcaacaagctttcactagaaaacaaagagctcacacaggaaacaagtgatatgaccctagaactcaagaatcagcaagaagatattaataataacaaaaagcaagaagaaaggatgttgaaacaaatagaaaatcttcaagaaacagaaacccaattaagaaatgaactagaatatgtgagagaagagctaaaacagaaaagagatgaagttaaatgtaaattggacaagagtgaagaaaattgtaacaatttaaggaaacaagttgaaaataaaaacaagtatattgaagaacttcagcaggagaataaggccttgaaaaaaaaaggtacagcagaaagcaagcaactgaatgtttatgagataaaggtcaataaattagagttagaactagaaagtgccaaacagaaatttggagaaatcacagacacctatcagaaagaaattgaggacaaaaagatatcagaagaaaatcttttggaagaggttgagaaagcaaaagtaatagctgatgaagcagtaaaattacagaaagaaattgataagcgatgtcaacataaaatagctgaaatggtagcacttatggaaaaacataagcaccaatatgataagatcattgaagaaagagactcagaattaggactttataagagcaaagaacaagaacagtcatcactgagagcatctttggagattgaactatccaatctcaaagctgaacttttgtctgttaagaagcaacttgaaatagaaagagaagagaaggaaaaactcaaaagagaggcaaaagaaaacacagctactcttaaagaaaaaaaagacaagaaaacacaaacatttttattggaaacacctgaaatttattggaaattggattctaaagcagttccttcacaaactgtatctcgaaatttcacatcagttgatcatggcatatccaaagataaaagagactatctgtggacatctgccaaaaatactttatctacaccattgccaaaggcatatacagtgaagacaccaacaaaaccaaaactacagcaaagagaaaacttgaatatacccattgaagaaagtaaaaaaaagagaaaaatggcctttgaatttgatattaattcagatagttcagaaactactgatcttttgagcatggtttcagaagaagagacattgaaaacactgtataggaacaataatccaccagcttctcatctttgtgtcaaaacaccaaaaaaggccccttcatctctaacaacccctggatctacactgaagtttggagctataagaaaaatgcgggaggaccgttgggctgtaattgctaaaatggatagaaaaaaaaaactaaaagaagctgaaaagttatttgtttaatttcagagaatcagtgtagttaaggagcctaataacgtgaaacttatagttaatattttgttcttatttgccagagccaaattttatctggaagttgagacttaaaaaatacttgcatgaatgatttgtgtttctttatatttttagcctaaatgttaactacatattgtctggaaacctgtcattgtattcagataattagatgattatatattgttgttactttttcttgtattcatgaaaactgtttttactaagttttcaaatttgtaaagttagcctttgaatgctaagaatgcattattgagggtcattctttattctttactattaaaatattttggatgc

SEQ ID NO: 21047 - DNA, 579 bp, Homo sapiens
  misc_feature 1..579: note = ENST00000477215
  source 1..579: mol_type = unassigned DNA
tcagagggattgagcagagtgtattcaaaactgtataaggaggctgaaaagataaaaaaatggaaagtaagtacagaagctgaactgagacagaaagaaagtaagttgcaagaaaacagaaagataattgaagcacagcgaaaagccattcaggaactgcaatttggaaatgaaaaagtaagtttgaaattagaagaaggaatacaagaaaataaagatttaataaaagagaataatgccacaaggcatttatgtaatctactcaaagaaacctgtgctagatctgcagaaaagacaaagaaatatgaatatgaacgggaagaaaccaggcaagtttatatggatctaaataataacattgagaaaatgataacagcttttgaggaacttcgtgtgcaagctgagaattccagactggaaatgcattttaagttaaaggaagattatgaaaaaatccaacaccttgaacaagaatacaagaaggaaataaatgacaaggaaaagcaggttttttaaaaaaccaactctttgtattctttatatttgctaattcattaaaaacttaaaatttcaaaagaa

SEQ ID NO: 21048 - DNA, 396 bp, Homo sapiens
  misc_feature 1..396: note = ENST00000468191
  source 1..396: mol_type = unassigned DNA
tgtttatttttgctaataagcaaaatgggatgaacttttctgttttataaattagtttggaaatgaaaaagtaagtttgaaattagaagaaggaatacaagaaaataaagatttaataaaagagaataatgccacaaggcatttatgtaatctactcaaagaaacctgtgctagatctgcagaaaagacaaagaaattgcctgctatgtcatgaaatcttctagatgctgatgaaaaacagcagtgaacaaagtctctactcttacaagagtgtatattccatggtgtatatgtgccacattttctttatccagtctgtcattgatgggcatttgggttggttccaagtctttgctgttgtaaatagtgctgcaataaacatacgtgtgcatgtgt

SEQ ID NO: 21049 - DNA, 763 bp, Homo sapiens
  misc_feature 1..763: note = ENST00000482717
  source 1..763: mol_type = unassigned DNA
attgtgatgtcatgcttgggaagacaaagtaaaaaggagaaaaggaaacacttttatatgaaaataaacaatttgagaagattgctgaagaattaaaaggaacagaacaagaactaattggtcttctccaagccagagagaaagaagtacatgatttggaaatacagttaactgccattaccacaagtgaacagtattattcaaaagaggttaaagatctaaaaactgagcttgaaaacgagaagcttaagaatactgaattaacttcacactgcaacaagctttcactagaaaacaaagagctcacacaggaaacaagtgatatgaccctagaactcaagaatcagcaagaagatattaataaatgaactagaatatgtgagagaagagctaaaacagaaaagagatgaagttaaatgtaaattggacaagagtgaagaaaattgtaacaatttaaggaaacaagttgaaaataaaaacaagtatattgaagaacttcagcaggagaataaggccttgaaaaaaaaaggtacagcagaaagcaagcaactgaatgtttatgagataaaggtcaataaattagagttagaactagaaagtgccaaacagaaatttggagaaatcacagacacctatcagaaagaaattgaggacaaaaagatatcagaagaaaatcttttggaagaggttgagaaagcaaaagtaatagctgatgaagcagtaaaattacagaaagaaattgataagcgatgtcaacataaaa

SEQ ID NO: 21050 - DNA, 783 bp, Homo sapiens
  misc_feature 1..783: note = ENST00000493377
  source 1..783: mol_type = unassigned DNA
gttccagggctgtgtctactgaattgtctgtcatcatgtttagtctttgaatttacttaatattgactaattttctctttttaaagaattttagccagggggaagctcatagttctttccacagctccatttgggcagtttgattactttcactatgtgtatggtttggcattcctgatttgttaatgtttataaatagggagaaaaggaaacacttttatatgaaaataaacaatttgagaagattgctgaagaattaaaaggaacagaacaagaactaattggtcttctccaagccagagagaaagaagtacatgatttggaaatacagttaactgccattaccacaagtgaacagtattattcaaaagaggttaaagatctaaaaactgagcttgaaaacgagaagcttaagaatactgaattaacttcacactgcaacaagctttcactagaaaacaaagagctcacacaggaaacaagtgatatgaccctagaactcaagaatcagcaagaagatattaataataacaaaaagcaagaagaaaggatgttgaaacaaatagaaaatcttcaagaaacagaaacccaattaagaaatgaactagaatatgtgagagaagagctaaaacagaaaagagatgaagttaaatgtaaattggacaagagtgaagaaaatgtatgttatatttaataatggatcgtatcacaaaatttcaaattataaaagcaacaccatatgtctaaactaaaataaagggaagtatactgttgtataaataa

SEQ ID NO: 21051 - DNA, 800 bp, Homo sapiens
  misc_feature 1..800: note = ENST00000477590
  source 1..800: mol_type = unassigned DNA
gaaaaactcaaaagagaggcaaaagaaaacacagctactcttaaagaaaaaaaagacaagaaaacacaaacatttttattggaaacacctgaaatttattggaaattggattctaaagcagttccttcacaaactgtatctcgaaatttcacatcagttgatcatggcatatccaaagataaaagagactatctgtggacatctgccaaaaatactttatctacaccattgccaaagagcatggtttcagaagaagagacattgaaaacactgtataggaacaataatccaccagcttctcatctttgtgtcaaaacaccaaaaaaggccccttcatctctaacaacccctggatctacactgaagtttggagctataagaaaaatgcgggaggaccgttgggctgtaattgctaaaatggatagaaaaaaaaaactaaaagaagctgaaaagttatttgtttaatttcagagaatcagtgtagttaaggagcctaataacgtgaaacttatagttaatattttgttcttatttgccagagccaaattttatctggaagttgagacttaaaaaatacttgcatgaatgatttgtgtttctttatatttttagcctaaatgttaactacatattgtctggaaacctgtcattgtattcagataattagatgattatatattgttgttactttttcttgtattcatgaaaactgtttttactaagttttcaaatttgtaaagttagcctttgaatgctaagaatgcattattgagggtcattctttattctttactattaaa

SEQ ID NO: 21052 - DNA, 3109 bp, Homo sapiens
  misc_feature 1..3109: note = ENST00000618516
  source 1..3109: mol_type = unassigned DNA
ccacgcgctccgggccgctcaggctgagcgatttcccgccttttctgaggttctgaggcgggagccattggttctttctgttgccctcatagaccgtatgtagcagttcgcgtgggcacagaacccacggtttcccgctagttcttcaaagtagatatttacaaccgtaacagagaaaatggaaaagcaaaagccctttgcattgttcgtaccaccgagatcaagcagcagtcaggtgtctgcggtgaaacctcagaccctgggaggcgattccactttcttcaagagtttcaacaaatgtactgaagatgattttgagtttccatttgcaaagactaatctctccaaaaatggggaaaacattgattcagatcctgctttacaaaaagttaatttcttgcccgtgcttgagcaggttggtaattctgactgtcactatcaggaaggactaaaagactctgatttggagaattcagagggattgagcagagtgtattcaaaactgtataaggaggctgaaaagataaaaaaatggaaagtaagtacagaagctgaactgagacagaaagaaagtaagttgcaagaaaacagaaagataattgaagcacagcgaaaagccattcaggaactgcaatttggaaatgaaaaagtaagtttgaaattagaagaaggaatacaagaaaataaagatttaataaaagagaataatgccacaaggcatttatgtaatctactcaaagaaacctgtgctagatctgcagaaaagacaaagaaatatgaatatgaacgggaagaaaccaggcaagtttatatggatctaaataataacattgagaaaatgataacagcttttgaggaacttcgtgtgcaagctgagaattccagactggaaatgcattttaagttaaaggaagattatgaaaaaatccaacaccttgaacaagaatacaagaaggaaataaatgacaaggaaaagcaggtatcactactattgatccaaatcactgagaaagaaaataaaatgaaagatttaacatttctgctagaggaatccagagataaagttaatcaattagaggaaaagacaaaattacagagtgaaaacttaaaacaatcaattgagaaacagcatcatttgactaaagaactagaagatattaaagtgtcattacaaagaagtgtgagtactcaaaaggctttagaggaagatttacagatagcaacaaaaacaatttgtcagctaactgaagaaaaagaaactcaaatggaagaatctaataaagctagagctgctcattcgtttgtggttactgaatttgaaactactgtctgcagcttggaagaattattgagaacagaacagcaaagattggaaaaaaatgaagatcaattgaaaatacttaccatggagcttcaaaagaaatcaagtgagctggaagagatgactaagcttacaaataacaaagaagtagaacttgaagaattgaaaaaagtcttgggagaaaaggaaacacttttatatgaaaataaacaatttgagaagattgctgaagaattaaaaggaacagaacaagaactaattggtcttctccaagccagagagaaagaagtacatgatttggaaatacagttaactgccattaccacaagtgaacagtattattcaaaagaggttaaagatctaaaaactgagcttgaaaacgagaagcttaagaatactgaattaacttcacactgcaacaagctttcactagaaaacaaagagctcacacaggaaacaagtgatatgaccctagaactcaagaatcagcaagaagatattaataataacaaaaagcaagaagaaaggatgttgaaacaaatagaaaatcttcaagaaacagaaacccaattaagaaatgaactagaatatgtgagagaagagctaaaacagaaaagagatgaagttaaatgtaaattggacaagagtgaagaaaattgtaacaatttaaggaaacaagttgaaaataaaaacaagtatattgaagaacttcagcaggagaataaggccttgaaaaaaaaaggtacagcagaaagcaagcaactgaatgtttatgagataaaggtcaataaattagagttagaactagaaagtgccaaacagaaatttggagaaatcacagacacctatcagaaagaaattgaggacaaaaagatatcagaagaaaatcttttggaagaggttgagaaagcaaaagtaatagctgatgaagcagtaaaattacagaaagaaattgataagcgatgtcaacataaaatagctgaaatggtagcacttatggaaaaacataagcaccaatatgataagatcattgaagaaagagactcagaattaggactttataagagcaaagaacaagaacagtcatcactgagagcatctttggagattgaactatccaatctcaaagctgaacttttgtctgttaagaagcaacttgaaatagaaagagaagagaaggaaaaactcaaaagagaggcaaaagaaaacacagctactcttaaagaaaaaaaagacaagaaaacacaaacatttttattggaaacacctgaaatttattggaaattggattctaaagcagttccttcacaaactgtatctcgaaatttcacatcagttgatcatggcatatccaaagataaaagagactatctgtggacatctgccaaaaatactttatctacaccattgccaaaggcatatacagtgaagacaccaacaaaaccaaaactacagcaaagagaaaacttgaatatacccattgaagaaagtaaaaaaaagagaaaaatggcctttgaatttgatattaattcagatagttcagaaactactgatcttttgagcatggtttcagaagaagagacattgaaaacactgtataggaacaataatccaccagcttctcatctttgtgtcaaaacaccaaaaaaggccccttcatctctaacaacccctggatctacactgaagtttggagctataagaaaaatgcgggaggaccgttgggctgtaattgctaaaatggatagaaaaaaaaaactaaaagaagctgaaaagttatttgtttaa

SEQ ID NO: 21053 - DNA, 3034 bp, Homo sapiens
  misc_feature 1..3034: note = ENST00000613524
  source 1..3034: mol_type = unassigned DNA
ccacgcgctccgggccgctcaggctgagcgatttcccgccttttctgaggttctgaggcgggagccattggttctttctgttgccctcatagaccgtatgtagcagttcgcgtgggcacagaacccacggtttcccgctagttcttcaaagtagatatttacaaccgtaacagagaaaatggaaaagcaaaagccctttgcattgttcgtaccaccgagatcaagcagcagtcaggtgtctgcggtgaaacctcagaccctgggaggcgattccactttcttcaagagtttcaacaaatgtactgaagatgattttgagtttccatttgcaaagactaatctctccaaaaatggggaaaacattgattcagatcctgctttacaaaaagttaatttcttgcccgtgcttgagcaggttggtaattctgactgtcactatcaggaaggactaaaagactctgatttggagaattcagagggattgagcagagtgtattcaaaactgtataaggaggctgaaaagataaaaaaatggaaagtaagtacagaagctgaactgagacagaaagaaagtaagttgcaagaaaacagaaagataattgaagcacagcgaaaagccattcaggaactgcaatttggaaatgaaaaagtaagtttgaaattagaagaaggaatacaagaaaataaagatttaataaaagagaataatgccacaaggcatttatgtaatctactcaaagaaacctgtgctagatctgcagaaaagacaaagaaatatgaatatgaacgggaagaaaccaggcaagtttatatggatctaaataataacattgagaaaatgataacagcttttgaggaacttcgtgtgcaagctgagaattccagactggaaatgcattttaagttaaaggaagattatgaaaaaatccaacaccttgaacaagaatacaagaaggaaataaatgacaaggaaaagcaggtatcactactattgatccaaatcactgagaaagaaaataaaatgaaagatttaacatttctgctagaggaatccagagataaagttaatcaattagaggaaaagacaaaattacagagtgaaaacttaaaacaatcaattgagaaacagcatcatttgactaaagaactagaagatattaaagtgtcattacaaagaagtgtgagtactcaaaaggctttagaggaagatttacagatagcaacaaaaacaatttgtcagctaactgaagaaaaagaaactcaaatggaagaatctaataaagctagagctgctcattcgtttgtggttactgaatttgaaactactgtctgcagcttggaagaattattgagaacagaacagcaaagattggaaaaaaatgaagatcaattgaaaatacttaccatggagcttcaaaagaaatcaagtgagctggaagagatgactaagcttacaaataacaaagaagtagaacttgaagaattgaaaaaagtcttgggagaaaaggaaacacttttatatgaaaataaacaatttgagaagattgctgaagaattaaaaggaacagaacaagaactaattggtcttctccaagccagagagaaagaagtacatgatttggaaatacagttaactgccattaccacaagtgaacagtattattcaaaagaggttaaagatctaaaaactgagcttgaaaacgagaagcttaagaatactgaattaacttcacactgcaacaagctttcactagaaaacaaagagctcacacaggaaacaagtgatatgaccctagaactcaagaatcagcaagaagatattaataataacaaaaagcaagaagaaaggatgttgaaacaaatagaaaatcttcaagaaacagaaacccaattaagaaatgaactagaatatgtgagagaagagctaaaacagaaaagagatgaagttaaatgtaaattggacaagagtgaagaaaattgtaacaatttaaggaaacaagttgaaaataaaaacaagtatattgaagaacttcagcaggagaataaggccttgaaaaaaaaaggtacagcagaaagcaagcaactgaatgtttatgagataaaggtcaataaattagagttagaactagaaagtgccaaacagaaatttggagaaatcacagacacctatcagaaagaaattgaggacaaaaagatatcagaagaaaatcttttggaagaggttgagaaagcaaaagtaatagctgatgaagcagtaaaattacagaaagaaattgataagcgatgtcaacataaaatagctgaaatggtagcacttatggaaaaacataagcaccaatatgataagatcattgaagaaagagactcagaattaggactttataagagcaaagaacaagaacagtcatcactgagagcatctttggaaaaactcaaaagagaggcaaaagaaaacacagctactcttaaagaaaaaaaagacaagaaaacacaaacatttttattggaaacacctgaaatttattggaaattggattctaaagcagttccttcacaaactgtatctcgaaatttcacatcagttgatcatggcatatccaaagataaaagagactatctgtggacatctgccaaaaatactttatctacaccattgccaaaggcatatacagtgaagacaccaacaaaaccaaaactacagcaaagagaaaacttgaatatacccattgaagaaagtaaaaaaaagagaaaaatggcctttgaatttgatattaattcagatagttcagaaactactgatcttttgagcatggtttcagaagaagagacattgaaaacactgtataggaacaataatccaccagcttctcatctttgtgtcaaaacaccaaaaaaggccccttcatctctaacaacccctggatctacactgaagtttggagctataagaaaaatgcgggaggaccgttgggctgtaattgctaaaatggatagaaaaaaaaaactaaaagaagctgaaaagttatttgtttaa

SEQ ID NO: 21054 - DNA, 3126 bp, Homo sapiens
  misc_feature 1..3126: note = ENST00000358763
  source 1..3126: mol_type = unassigned DNA
gctcccgggacccggagcggatcgactggcgggcgccgcgccgaggcaccaccgggcgccgagttcctggcggctcgcacgcaggtaaataaaggcagctaaagctgactgctggttgcgcaaaatccccctggctcttctggctaaagtcctaccactccctgtacctggcagcagcctgtcttctgggcctcacctacacacgtctgggtaggagccagtcatctccatccatccacagccatgaatttcctccggcgacgtctctctgacagcagcttcatggccaacctgcctaatggctatatgacggacctgcaacgcccagatagctccaccagctcacctgcttcccccgccatggagaggaggcacccccagcccctggctgcctccttctcctctccaggatccagcctttttagctccctctccagtgccatgaagcaggcccctcaggccacctcaggactgatggagcctccaggtccctccacgcccattgttcaaagacccaggatcctgttggtgatcgatgatgcccatacagactggtcgaagtatttccatgggaagaaggtgaatggagagattgagatccgagtggagcaggctgaattctcagagttgaacctagctgcctatgtgaccgggggctgcatggtggacatgcaggtcgtgagaaatgggaccaaagtggtgagcagatccttcaagccagacttcatcctggtccgccagcatgcctacagcatggccctgggggaagactaccgcagcctggtcatcggcctgcagtatggagggctgcctgctgtcaactctctctactccgtctacaacttctgcagcaagccctgggtgttctctcagctcattaagatcttccattccctgggtcctgagaagttcccgcttgtggagcaaacatttttccccaaccataagccaatggtcacagccccacacttcccggtggtagtcaagctgggacatgcccacgctggaatgggaaagatcaaagtggaaaaccagcttgacttccaggacatcaccagcgtggtcgccatggccaaaacctacgccaccaccgaggccttcatcgactccaagtacgacatccgcatccagaaaattggatccaactacaaggcttacatgagaacctccatctctgggaactggaaggccaacacaggctctgccatgctggagcaggtggccatgacagagaggtacaggctgtgggtggacagctgctcggaaatgtttggcggcctggacatctgtgccgtcaaggctgtccacagcaaggatggcagagattacatcatcgaggtaatggacagctcaatgccgctgattggagagcatgtggaagaggacagacagctgatggccgaccttgttgtctccaaaatgagccagctcccgatgccaggaggcacagcgccctcccccctcagaccttgggctccacagattaaatcagcgaaatccccagggcaagcccagctggggcctcagctaggccagccccagccacgcccacctccgcaaggaggccctcgccaagctcagtctcctcagccccagagatctggaagcccctcccaacagaggctctccccacaaggccagcagcccctgagcccccagtccggatctccacagcagcaaaggtcaccaggctctccgcagctatcccgggcatccagtggcagctccccaaaccaggcctccaagccaggtgccaccctcgcctcacagccccggccccctgtgcagggccgtagtacctcccagcagggtgaagagtccaagaagccagcaccaccccatccgcatctcaacaaatctcagtccctgactaacagcctcagcacatccgacacctcccagcgtgggaccccaagtgaagacgaggccaaggctgaaaccatccgcaacctgaggaagtcttttgccagcctgttctctgactaacgccatccaggctgggaggggaagagtgctctgctacactcgtccccctcctgcctcatcttccttctcagccttggttcctgatgggaacagaatggagggcctgagaacatactttctaaatgcctttgacccaggaaccgattatctatatttgttcccattttccttcaccgtgacattccagcattgtctgactgtgaggtgggcctttgagagcctccaggttcctcaaaacaggcctgagcgatgggcatcacaccctctgcctacccacgtgcctgcttacctgccagataaccaagtgagatgtctgcgagtggctagttttcacattcttactagtgtttggctcacctttgggcaaaggccccctctaggccttgccccacctccatcaaacgcagacactgtagtcagacctcagcaatataggaggcaataatcttttaacagtgttttgcaaacaaacaaaaagagaaaaatcccagccaggggaactcgccacctgcccacgctagttccatccacgctcaagacccgcccttagaccaggcaggcaaaggcccccatcacactcggccactagtggggtcctgaggccaagaaagaaaccagaccctgtatgacaagtggggtctttcagaacacgacagaaacaggggggcccttgtaatgccactcatactcagagcattattcttatttggacagccaagggcagatcacaggttattgtaggaataaagactagtttacaaaggagaaagaggccctggacttcccaaggaaagggtcaggttagggctcctgtacccattctgttccaccactgtttgatctctctggcctcccaccaggaatgccgtttcctttttatggatctgttgggaaccagagagaatcaacagatcaatgacataggatccgaagtgcaatgatagtcacttctagtttggcatttcacaaactctgtacagcaaggtattggtaggttactcaatttcaaaagggccccatggccaaatatgtttaggaaccgctgtttgtatttctttttttggagacgcattgtatataatatatgtcaaaggctttcggaattcctgcaggaaagaaatcagctttgttaaatccaaa

SEQ ID NO: 21055 - DNA, 827 bp, Homo sapiens
  misc_feature 1..827: note = ENST00000483062
  source 1..827: mol_type = unassigned DNA
gtgatgcccaaccgccatctctcctggcatgggggtccctcagctctcccttcctccccacaggtaatggacagctcaatgccgctgattggagagcatgtggaagaggacagacagctgatggccgaccttgttgtctccaaaatgagccagctcccgatgccaggaggcacagcgccctcccccctcagaccttgggctccacagattaaatcagcgaaatccccagggcaagcccagctggggcctcagctaggccagccccagccacgcccacctccgcaaggaggccctcgccaagctcagtctcctcagccccagagatctggaagcccctcccaacagaggctctccccacaaggccagcagcccctgagcccccagtccggatctccacagcagcaaaggtcaccaggctctccgcagctatcccgggcatccagtggcagctccccaaaccaggcctccaagccaggtgccaccctcgcctcacagccccggccccctgtgcagggccgtagtacctcccagcagggtgaagagtccaagaagccagcaccaccccatccgcatctcaacaaatctcagtccctgactaacagcctcagcacatccgacacctcccagcgtgggaccccaagtgaagacgaggccaaggctgaaaccatccgcaacctgaggaagtcttttgccagcctgttctctgactaacgccatccaggctgggaggggaagagtgctctgctacactcgtccccctcctgcctcatcttccttctcagccttggttcctgatgggaacagaatggagggcctgagaacatact

SEQ ID NO: 21056 - DNA, 742 bp, Homo sapiens
  misc_feature 1..742: note = ENST00000467095
  source 1..742: mol_type = unassigned DNA
cttgattgttgggggccttggaattctactcaaagtcatttctgggtggctacaacatccccaagcttagatgcctcttggcttgcttgtggaagcctgtgtgccctgtacggtgagagggagaaaccaagattctctttgagctttctgtggctcctcttccaactgggaaaccttaataagactcagtctccacctctatgtggtgagaagaatggtatcttccctactgacctctctaggtcaagtgatatgttgcttttgaaagttcttggaaaagtttagagagcaactcaaaaagaggccctcgccaagctcagtctcctcagccccagagatctggaagcccctcccaacagaggctctccccacaaggccagcagcccctgagcccccagtccggatctccacagcagcaaaggtcaccaggctctccgcagctatcccgggcatccagtggcagctccccaaaccaggcctccaagccaggtgccaccctcgcctcacagccccggccccctgtgcagggccgtagtacctcccagcagggtgaagagtccaagaagccagcaccaccccatccgcatctcaacaaatctcagtccctgactaacagcctcagcacatccgacacctcccagcgtgggaccccaagtgaagacgaggccaaggctgaaaccatccgcaacctgaggaagtcttttgccagcctgttctctgactaacgccatccaggctggga

SEQ ID NO: 21057 - DNA, 713 bp, Homo sapiens
  misc_feature 1..713: note = ENST00000461446
  source 1..713: mol_type = unassigned DNA
acttctgggatgtgatgcccaaccgccatctctcctggcatgggggtccctcagctctcccttcctccccacaggtaatggacagctcaatgccgctgattggagagcatgtggaagaggacagacagctgatggccgaccttgttgtctccaaaatgagccagctcccgatgccaggaggcacagcgccctcccccctcagaccttgggaggccctcgccaagctcagtctcctcagccccagagatctggaagcccctcccaacagaggctctccccacaaggccagcagcccctgagcccccagtccggatctccacagcagcaaaggtcaccaggctctccgcagctatcccgggcatccagtggcagctccccaaaccaggcctccaagccaggtgccaccctcgcctcacagccccggccccctgtgcagggccgtagtacctcccagcagggtgaagagtccaagaagccagcaccaccccatccgcatctcaagtctgttgcctcccctcctatgactgagcctcctgaggcagggcctgaatcatattcgtcttacacccctgtcccctagcacaggggaagtgctcagcaagcagttgctacaggctggcatttaggaagcactcagaatggcatctgccattcaaaaagatggcactaaaagaattccaaaagcgggtgggggacagaattagccataaaga

SEQ ID NO: 21058 - DNA, 574 bp, Homo sapiens
  misc_feature 1..574: note = ENST00000459990
  source 1..574: mol_type = unassigned DNA
gtcttattcctccactaaacaggtgtctgtggagggcacacctgcttagcaggacacggggcccattcctaaccttgggggctcccagtctggtggtggagacatagtaagcaaggggtgacagtgccgtggataagctgtcccgtgtgaaaccaggtaatggacagctcaatgccgctgattggagagcatgtggaagaggacagacagctgatggccgaccttgttgtctccaaaatgagccagctcccgatgccaggaggcacagcgccctcccccctcagaccttgggaggccctcgccaagctcagtctcctcagccccagagatctggaagcccctcccaacagaggctctccccacaaggccagcagcccctgagcccccagtccggatctccacagcagcaaaggtcaccaggctctccgcagctatcccgggcatccagtggcagctccccaaaccaggcctccaagccaggtgccaccctcgcctcacagccccggccccctgtgcagggccgtagtacctcccagcagggtgaagagtccaagaagccagcaccaccccatcc

SEQ ID NO: 21059 - DNA, 507 bp, Homo sapiens
  misc_feature 1..507: note = ENST00000468922
  source 1..507: mol_type = unassigned DNA
ctaaacaggtgtctgtggagggcacacctgcttagcaggacacggggcccattcctaaccttgggggctcccagtctggtggtggagacatagtaagcaaggggtgacagtgccgtggataagctgtcccgtgtgaaaccaggtaatggacagctcaatgccgctgattggagagcatgtggaagaggacagacagctgatggccgaccttgttgtctccaaaatgagccagctcccgatgccaggaggcacagcgccctcccccctcagaccttgggctccacagattaaatcagcgaaatccccagggcaagcccagctggggcctcagctaggccagccccagccacgcccacctccgcaaggaggccctcgccaagctcagtctcctcagccccagagatctggaagcccctcccaacagaggctctccccacaaggccagcagcccctgagcccccagtccggatctccacagcagcaaaggtcaccaggctctccgcagct

SEQ ID NO: 21060 - DNA, 488 bp, Homo sapiens
  misc_feature 1..488: note = ENST00000462268
  source 1..488: mol_type = unassigned DNA
ctggtccgccagcatgcctacagcatggccctgggggaagactaccgcagcctggtcatcggcctgcagtatggagggctgcctgctgtcaactctctctactccgtctacaacttctgcagcaagccctgggtgttctctcagctcattaagatcttccattccctgggtcctgagaagttcccgcttgtggagcaaacatttttccccaaccataagccaatggtctcaccctccttaccctagtcctggccctgatcatccagctctgttcccctccagggtacatgctcttaaccaccccactatgtggcctctcccagtcaagggcaccatcaggattcaaagagctttgaaggaggtgacttatactgggagctggacgagaaggaagattgcaaagaggctcccaggggatggctctggcaaaatacaaagaaaaaagtttataaagcgtttaaataaacctgtgaaagacaagaaagata

SEQ ID NO: 21061 - DNA, 523 bp, Homo sapiens
  misc_feature 1..523: note = ENST00000467824
  source 1..523: mol_type = unassigned DNA
taccgcagcctggtcatcggcctgcagtatggagggctgcctgctgtcaactctctctactccgtctacaacttctgcagcaagccctgggtgttctctcagctcattaagatcttccattccctgggtcctgagaagttcccgcttgtggagcaaacatttttccccaaccataagccaatggtgagtgcccttttttactctgtttctttgcatgatgcggaatgaatacagatgacttgtcctcggtctctttggatggaggaggtggactctaggggttgtacactgaccacgcagactctaaggcggagtcacagtgtcctgtgggagtgcctggatttcctaagggaagtcgtctctccaggtgaaattcaggcaatagggcaaataacaaaggtgaaccacattccttggaacttggagattttcagcaaatcaggggacacgttctgggggcatgttagaaccagaggctgattataaaggtaaaagatgttttcaaggtgggatgttgttttac

SEQ ID NO: 21062 - DNA, 595 bp, Homo sapiens
  misc_feature 1..595: note = ENST00000472027
  source 1..595: mol_type = unassigned DNA
acctgtgcttttgttcctggaaacttaggttgagcctttcccctgctctctgcctgaaaacatcctccttgtcacagtctggaggccctggcaatgcagtttcagaaggctgaattctcagagttgaacctagctgcctatgtgaccgggggctgcatggtggacatgcaggtcgtgagaaatgggaccaaagtggtgaggtaagtaggattaaaatatgcagaaccttctgagaattgcatacgtggaacctcatgtagcccacccctccgtccacttcctgcgacctaactcctttgccacatgtactttcctgtacagaatgtctgcttcccaggtgtggttgcagtagtaatgaccagcggcacatatcatacgtgcagcacctgtggtgtccccaagtgagccctgggcttggagagaaaagacttgggttccatttctggctttgaggctctgctctggcatattatttagtcccttttgtcctctacttctcatctgcagcatgatgatatgcactgaagttagaggctgctaaagtttacagaaactcacatgtatgacagcaccctgttaactctgaagtgcggta

SEQ ID NO: 21063 - DNA, 855 bp, Homo sapiens
  misc_feature 1..855: note = ENST00000441821
  source 1..855: mol_type = unassigned DNA
ttgggtttgggaggtcaggtttgtcatgccatttccgatttccagtcatcctgggggcaggatgaaatttcagagtggtttcctggccaagctagaagcagagaatagctatggatacagcacctcgtgtatctatccagcacttacttggctttttctgagtgccaggaactgtgccaagccctagcagcatgaagaatggcctttggggagcttctggggctaagagggacagtaggaggagcaattgcagtgcagggtagtgcggaagactcgagatggagaagaggacggtgaggaagccaggaaggtttcagagaggagcaggtaaataaaggcagctaaagctgactgctggttgcgcaaaatccccctggctcttctggctaaagtcctaccactccctgtacctggcagcagcctgtcttctgggcctcacctacacacgtctgggtaggagccagtcatctccatccatccacagccatgaatttcctccggcgacgtctctctgacagcagcttcatggccaacctgcctaatggctatatgacggacctgcaacgcccagatagctccaccagctcacctgcttcccccgccatggagaggaggcacccccagcccctggctgcctccttctcctctccaggatccagcctttttagctccctctccagtgccatgaagcaggcccctcaggccacctcaggactgatggagcctccaggtccctccacgcccattgttcaaagacccaggatcctgttggtgatcgatgatgcccatacagactggtcgaagtatttccatgggaagaaggtgaatggagagattgagatccgagtggagcag

SEQ ID NO: 21064 - DNA, 632 bp, Homo sapiens
  misc_feature 1..632: note = ENST00000412575
  source 1..632: mol_type = unassigned DNA
ggattacaggcgtgagccaccctgtccggcgggaatgtaaattaatacggccattatggaaaacggcatggaggttcctcagaaaactaaaaatagaactaccatatgatccagcaggctcacttctggcaggtaaataaaggcagctaaagctgactgctggttgcgcaaaatccccctggctcttctggctaaagtcctaccactccctgtacctggcagcagcctgtcttctgggcctcacctacacacgtctgggtaggagccagtcatctccatccatccacagccatgaatttcctccggcgacgtctctctgacagcagcttcatggccaacctgcctaatggctatatgacggacctgcaacgcccagatagctccaccagctcacctgcttcccccgccatggagaggaggcacccccagcccctggctgcctccttctcctctccaggatccagcctttttagctccctctccagtgccatgaagcaggcccctcaggccacctcaggactgatggagcctccaggtccctccacgcccattgttcaaagacccaggatcctgttggtgatcgatgatgcccatacagactggtcgaagtatttccatgggaagaaggtgaa

SEQ ID NO: 21065 - DNA, 561 bp, Homo sapiens
  misc_feature 1..561: note = ENST00000619146
  source 1..561: mol_type = unassigned DNA
cagatcaaagtggaaaaccagcttgacttccaggacatcaccagcgtggtcgccatggccaaaacctacgccaccaccgaggccttcatcgactccaagtacgacatccgcatccagaaaattggatccaactacaaggcttacatgagaacctccatctctgggaactggaaggccaacacaggctctgccatgctggagcaggtggccatgacagagaggtacaggctgtgggtggacagctgctcggaaatgtttggcggcctggacatctgtgccgtcaaggctgtccacagcaaggatggcagagattacatcatcgaggtaatggacagctcaatgccgctgattggagagcatgtggaagaggacagacagctgatggccgaccttgttgtctccaaaatgagccagctcccgatgccaggaggcacagcgccctcccccctcagaccttgggctccacagattaaatcagcgaaatccccagggcaagcccagctggggcctcagctaggccagccccagccacgcccacctccgcaagggaatgtcccacct

SEQ ID NO: 21066 - DNA, 972 bp, Homo sapiens
  misc_feature 1..972: note = ENST00000332840
  source 1..972: mol_type = unassigned DNA
cagatcaaagtggaaaaccagcttgacttccaggacatcaccagcgtggtcgccatggccaaaacctacgccaccaccgaggccttcatcgactccaagtacgacatccgcatccagaaaattggatccaactacaaggcttacatgagaacctccatctctgggaactggaaggccaacacaggctctgccatgctggagcaggtggccatgacagagaggtacaggctgtgggtggacagctgctcggaaatgtttggcggcctggacatctgtgccgtcaaggctgtccacagcaaggatggcagagattacatcatcgaggtaatggacagctcaatgccgctgattggagagcatgtggaagaggacagacagctgatggccgaccttgttgtctccaaaatgagccagctcccgatgccaggaggcacagcgccctcccccctcagaccttgggctccacagattaaatcagcgaaatccccagggcaagcccagctggggcctcagctaggccagccccagccacgcccacctccgcaaggaggccctcgccaagctcagtctcctcagccccagagatctggaagcccctcccaacagaggctctccccacaaggccagcagcccctgagcccccagtccggatctccacagcagcaaaggtcaccaggctctccgcagctatcccgggcatccagtggcagctccccaaaccaggcctccaagccaggtgccaccctcgcctcacagccccggccccctgtgcagggccgtagtacctcccagcagggtgaagagtccaagaagccagcaccaccccatccgcatctcaacaaatctcagtccctgactaacagcctcagcacatccgacacctcccagcgtgggaccccaagtgaagacgaggccaaggctgaaaccatccgcaacctgaggaagtcttttgccagcctgttctctgactaa

SEQ ID NO: 21067 - DNA, 2522 bp, Homo sapiens
  misc_feature 1..2522: note = ENST00000376862
  source 1..2522: mol_type = unassigned DNA
agacactggccgcgggccaccatctggacgcgatcccccgctagggcctccctggtctgggccaaagttggtggccaccttcgcgcgggctgcgccctccttctcttccctgccctcctcccccggggcccgcgcccgctgcctccagcacgcgcgtcggcaggctcggcaagcgaagaggagcggctcgccccagggcgcccctcgcccagcctgccggccaggcgagcgcgacgagagtctccccgcaccccttcctctcccgggggccgagagggttgggctccgccccggcgccgcagctcccgactccccgccgctcgggctgccgccgctgccccgcgcccggcgctcggggcagccgggggcgcaggcggagagcgcagggcggggagaggcgtggggagcagagcggcgctgaggggagggcagaggaggagagagcctggcagcggaggagcagaggcgggcgccgcaccgccccgcacgctcgctcgctcgggagagtcgcgggcggccgcttgggcgcacttgccgggtcaccttgtcccggaggagaaatggcttccctgaggcaagtgtaacctacattcccagcccaccagcctgacgcccagccagggagagagtaccatggatggcatcattgaacagaagagcatgctggtgcacagtaaaatcagtgatgctggcaagaggaatggtttaattaacaccagaaacttgatggccgagagcagagatggtctggtgtctgtttacccagcgccccagtaccagagccaccgggtgggggccagcacagtgccggccagcctggacagcagcaggagtgagccgatgcagcagctgctggaccccaacaccctgcagcagtcagtggagtcccgctaccggcccaacatcatcctctattcagagggcgtgctgcgctcctggggggacggtgtggccgccgactgctgcgagaccaccttcatcgaggaccggtcgcccaccaaagacagcctcgagtacccggatgggaagttcattgacctctcagctgatgacataaaaatccacaccctgtcctacgatgtggaggaggaggaggagttccaggagctggagagcgactactcaagcgacacagagagtgaggacaatttcctcatgatgcccccgcgggaccacctgggcctcagtgtcttctccatgctctgctgcttctggcctctgggcatcgcagccttctacttgtcccatgagaccaacaaagccgtggccaagggggacttgcaccaggccagcaccagctcccggcgggccctattcctggcagtgctgtccatcaccattgggactggcgtctatgtgggcgtggccgtggccctcatcgcctacctctccaagaacaaccacctgtgagcttcctgcgaatggagggggagcacccggggccaggtctgtgtggacgtggaggaagcaggcataccgcatgatgctgtacagtacaaatgattgccaaatgatgccacgaagccctgggatttcctacccatggatttattttgtttttatcctttaatttcatgttcacagcactgtgtagagcaccagacagacgggcactgctaatccttccaaaggaaagctccaaagatcccagcccgcaaggctgtctctggatggattctggtggatgaatggcaacgcggctctctgcagcctgccagtgcccagagtgccaccgcattagcaatatacaaacagtccaaaaaagtgtttattttttatggaatacggtgcaataggcagaggacaagggacacatcactcttctgtctgtggccctgctggagtcctttgtgccccccggagtccacacgccttccctgcaagacgagaatggggctgggaagaaagaggcaacaccacggctggcaggagccccgctgcactgctctgcagacccattggcctgaccctgagaagcagagccagcaaagcccgggacctgcccctctttctttcccttcacaccaccccagcctcaggatgtcaagccacctccggaacgtgtctacactccacagctaccccgcagcaatacgcactcttgggacctcgctgatctaggatggggaggcaggccaccgcccctcccaagactcctcaagaaagagccccgcggttgctccggaaactcgaggcactgcagctatgggcactgcctcagcctaaagacacaggggcgcctcccaatcaccgcgctggcggatgctcaccccgtcataagcagaaactagtgatcctggaaatgagatgggccttactctgtcgactaaatgaatagctattttcttgtcattttttaaagtgcaactcttgcttcatgctgcttaagttaccagatgaatgctgagaaataagtaatcacagacattttaataccatttcattgctgttttacgagtgttcattacttaacaaaaaattatcttttagctttttcgcttaagacttttctttctgatgaa

SEQ ID NO: 21068 - DNA, 417 bp, Homo sapiens
  misc_feature 1..417: note = ENST00000482637
  source 1..417: mol_type = unassigned DNA
tgcccccgcgggaccacctgggcctcagtgtcttctccatgctctgctgcttctggcctctgggcatcgcagccttctacttgtcccatgagtccctttcagatcgattcattggccgtcgactggacacctgccacgttcgcgtgtttagtcccattggattcaacggatatcactggtcacacagcatcctccttactcaggcatttgcagcctgtgtagatggtaaaggggggcacaccccttgctggtgggacgcaaagaggctctgagtgctgaggaggggggagtgcagtaccctgggtgtgcggaaggccgtctgaccctgtcttccactgggagtccatgaacagatttctctctgaattccctcctccttccttcccctcgtgtccttttccatggtcctcttccaga

SEQ ID NO: 21069 - DNA, 2420 bp, Homo sapiens
  misc_feature 1..2420: note = ENST00000554823
  source 1..2420: mol_type = unassigned DNA
gacaggctctgaggactgctcagctggcccaggcccccctccccagcagctgccccagaaccatggagagtctgagtgaactacagaacccgctgctgcccaggagccctgcccatctccatggcccctatccctacccggagaccccacccagctggtcctgccaggaaaagctctactcctacctcctaggtggcgctgggcctgccggagcccaccagctcctggacccagggtccctgcagctggccgtggaggcctggtaccggcccagctgcctcctggggagagacaaggtcaaggagcccagggcaggcagctgtgagacaagcttcacagaggacagggagccccaggaggggcctccagagcagcccacaggacctggccaagctgcagagaatgtcaccatccagactgtgtcctatggggtacaagaggagctgcgggaccaggaggatgaccaggaggaagaggagagcgatgccacttcaacggagagtgaaagtgaagacaacttcctcacgctgcctcccagggaccacctgggacttactctcttctccatgctctgctgcttctggccactgggcattgctgccttctacttctcccaggggaccagcaaggccatctccaaaggggacttccgcctggccagcaccacctcccgccgggccctcttcctagccacactcgccatcgccgtgggggccggtctctacgtggctgtggtggtggctctggcagcttacatgtcccagaacggtcatggctagtagccagtagggcctgcatcctgactcccctgcccacctgaggaagcagtggggcttggagttgcagaccctatggaaaggcccggcccctgaagatgatcccgtgagagtggcttgctgagggggagacccccattccacagcctgcagagctcagccttcacttctgcttgcccgctgctcccagccccagagcagggcccggggcgccactctctaacccaggctacagacgggaaacagaaggcagggctgcccaccaggccatcccagcagggcctagctccatccattctgcccattccctagaggatctcctgccctacagccagcccaccacctaccctgccaacctccccacagagaaagagcaggaggttacagggagaaaagggggtgcccagagcacaaggggacccgtcccaatcctttcagcccacagggatcttcacctggggacagcctgagcttcccccaactccactgtctggccccatcatgcccagacctcagcaggccaagaaggaaatacgtggaggcaagggggcctcttgctgtctctgattctagagggtgcttatctctgcatgggcttgtgaggcactgtagattctagatagggaagaggagcctcggtatgtaaactctgaaccaagggcaggttcttggagcttcttcatgcgggtgcaaaaggcagttgcaatgacagagaatagagggtcctgaaatattgctgtactacatgactcttcctactctccccccactccccgcccctatcatccttttctgggctttgcctgggggtccgtgagctggtgccatcacaagtagactagacccagagagtgccctcagctcaccagccactgagcgcacggccctaggtccagccctacagaaaacgcagcaaggagagaccctagggagtagtgagtatagatgagggaagggactcagggaaggaatggcctgctgagtagtcagcggtgcttaggaaggcttcctggaggaggtatcccttgagcaagtcctaggatgaatagaattcatctaagggatttggtcacataactctttgtatttgtaggcagggatgtggcaggaaccttccatgggaagcttccaggctgtttggattctgcctggaacatctgggctggagccaaactacagccattcctaagggttctgccaactcaaggaggaacgtcacacctgtctctcaaagaccaatgatgttttcccatctctgaatgctagggggtcagtggtgggtacctggttacccctggggcatcttcactgatatctctgctcagtgccagtctcaacaccctcagccactagggcacatccagaattttagagacatctccaggtaggcggggggcagcaccaatgtgggcaggcctgtctggactcaagctacaggcccctgctgtgcatgatgtgggaacctggtcattcccatgccccatccagagcccagggctgtggctccaccactgagcatcccttgtcccactgtcctcccctgcctcgggcactgcccagccctccactcctgcatcacagcagttttaaggtcccattattgtactgatttatccttgtaataaatgtttctgtaacacctgg

SEQ ID NO: 21070 - DNA, 488 bp, Homo sapiens
  misc_feature 1..488: note = ENST00000554953
  source 1..488: mol_type = unassigned DNA
ggcggcggcgggctgcgggcgggagctgtccgcggtgctgaagcggcggctgctcagggacgcggggacgagagcaggggagccctcctgggagttccaccgcgaccgcgaggcgggggcgccgtcgctcaccggcccatgccgagcccccgagccccgcggaggaggcgggaccgtccgcggcgggacaggctctgaggactgctcagctggcccaggcccccctccccagcagctgccccagaaccatggagagtctgagtgaactacagaacccgctgctgcccaggagccctgcccatctccatggcccctatccctacccggagaccccacccagctggtcctgccaggaaaagctctactcctacctcctaggtggcgctgggcctgccggagcccaccagctcctggacccagggtccctgcagctggccgtggaggcctggtaccggcccagctgcctcctggggagagacaaggtcaag

SEQ ID NO: 21071 - DNA, 2607 bp, Homo sapiens
  misc_feature 1..2607: note = ENST00000331628
  source 1..2607: mol_type = unassigned DNA
ggcggcggcgggctgcgggcgggagctgtccgcggtgctgaagcggcggctgctcagggacgcggggacgagagcaggggagccctcctgggagttccaccgcgaccgcgaggcgggggcgccgtcgctcaccggcccatgccgagcccccgagccccgcggaggaggcgggaccgtccgcggcgggacaggctctgaggactgctcagctggcccaggcccccctccccagcagctgccccagaaccatggagagtctgagtgaactacagaacccgctgctgcccaggagccctgcccatctccatggcccctatccctacccggagaccccacccagctggtcctgccaggaaaagctctactcctacctcctaggtggcgctgggcctgccggagcccaccagctcctggacccagggtccctgcagctggccgtggaggcctggtaccggcccagctgcctcctggggagagacaaggtcaaggagcccagggcaggcagctgtgagacaagcttcacagaggacagggagccccaggaggggcctccagagcagcccacaggacctggccaagctgcagagaatgtcaccatccagactgtgtcctatggggtacaagaggagctgcgggaccaggaggatgaccaggaggaagaggagagcgatgccacttcaacggagagtgaaagtgaagacaacttcctcacgctgcctcccagggaccacctgggacttactctcttctccatgctctgctgcttctggccactgggcattgctgccttctacttctcccaggggaccagcaaggccatctccaaaggggacttccgcctggccagcaccacctcccgccgggccctcttcctagccacactcgccatcgccgtgggggccggtctctacgtggctgtggtggtggctctggcagcttacatgtcccagaacggtcatggctagtagccagtagggcctgcatcctgactcccctgcccacctgaggaagcagtggggcttggagttgcagaccctatggaaaggcccggcccctgaagatgatcccgtgagagtggcttgctgagggggagacccccattccacagcctgcagagctcagccttcacttctgcttgcccgctgctcccagccccagagcagggcccggggcgccactctctaacccaggctacagacgggaaacagaaggcagggctgcccaccaggccatcccagcagggcctagctccatccattctgcccattccctagaggatctcctgccctacagccagcccaccacctaccctgccaacctccccacagagaaagagcaggaggttacagggagaaaagggggtgcccagagcacaaggggacccgtcccaatcctttcagcccacagggatcttcacctggggacagcctgagcttcccccaactccactgtctggccccatcatgcccagacctcagcaggccaagaaggaaatacgtggaggcaagggggcctcttgctgtctctgattctagagggtgcttatctctgcatgggcttgtgaggcactgtagattctagatagggaagaggagcctcggtatgtaaactctgaaccaagggcaggttcttggagcttcttcatgcgggtgcaaaaggcagttgcaatgacagagaatagagggtcctgaaatattgctgtactacatgactcttcctactctccccccactccccgcccctatcatccttttctgggctttgcctgggggtccgtgagctggtgccatcacaagtagactagacccagagagtgccctcagctcaccagccactgagcgcacggccctaggtccagccctacagaaaacgcagcaaggagagaccctagggagtagtgagtatagatgagggaagggactcagggaaggaatggcctgctgagtagtcagcggtgcttaggaaggcttcctggaggaggtatcccttgagcaagtcctaggatgaatagaattcatctaagggatttggtcacataactctttgtatttgtaggcagggatgtggcaggaaccttccatgggaagcttccaggctgtttggattctgcctggaacatctgggctggagccaaactacagccattcctaagggttctgccaactcaaggaggaacgtcacacctgtctctcaaagaccaatgatgttttcccatctctgaatgctagggggtcagtggtgggtacctggttacccctggggcatcttcactgatatctctgctcagtgccagtctcaacaccctcagccactagggcacatccagaattttagagacatctccaggtaggcggggggcagcaccaatgtgggcaggcctgtctggactcaagctacaggcccctgctgtgcatgatgtgggaacctggtcattcccatgccccatccagagcccagggctgtggctccaccactgagcatcccttgtcccactgtcctcccctgcctcgggcactgcccagccctccactcctgcatcacagcagttttaaggtcccattattgtactgatttatccttgtaataaatgtttctgtaacacctggt

SEQ ID NO: 21072 - DNA, 7378 bp, Homo sapiens
  misc_feature 1..7378: note = ENST00000355585
  source 1..7378: mol_type = unassigned DNA
gcggggagctgtcgcgggcagcgcgccctcgggaggacgtggccccggcccccgcccgcagtgggcccgaccctcatggccctgagcaaagggctgcggctgctggggcgcctgggggccgagggggactgtagcgtgctgctggaggcgcgcggccgcgacgactgcctgctgttcgaggccggcacggtggccacgctggctccagaagaaaaggaagtcattaaaggacagtatggcaagctcacggacgcgtacggctgcctgggggagctgaggctgaaatctggtggcacgtctctgagcttcctggtgttggtgacaggctgcacatctgtgggcagaattccagatgctgaaatctacaaaatcactgccactgacttttaccctcttcaggaagaggccaaggaggaggaacgcctcatagctttgaagaaaatcctcagctcgggggtgttctatttctcatggccaaacgatgggtctcgctttgacctgactgtccgcacgcagaagcagggggatgacagctctgaatgggggaactccttcttctggaaccagctgttgcacgtgcccttgaggcagcaccaggtgagctgctgtgactggctgctgaagatcatctgcggggtggtcaccatccgcaccgtgtatgcctcccacaagcaggccaaggcctgcctcgtctctcgcgttagctgtgagcgcacaggcactcgcttccacacccgtggcgtgaacgacgacggccatgtgtccaacttcgtggagacagagcagatgatttacatggacgatggagtgtcatcttttgtccagatcagaggctccgttccgctgttctgggaacagccagggcttcaggttggctcccatcatctgagactccacagaggcctggaagccaatgcccctgctttcgacaggcacatggtgcttctgaaggagcagtacgggcagcaggtggtcgtgaaccttctgggaagcagaggcggagaggaggtgctcaacagagccttcaagaagctgctctgggcttcttgccacgcgggcgacacgcctatgatcaattttgacttccatcagtttgccaaaggtgggaagctagagaaattggagaccctcttgaggccacagttaaagctgcactgggaagacttcgatgtgttcacaaagggggagaacgtcagtccacgttttcagaaaggcactttgcggatgaactgtcttgactgcctggaccgaaccaacactgtgcagagcttcatcgcgctcgaggtcctgcatctgcagctcaagaccctggggctgagttcaaaacccatcgttgaccgctttgtggagtccttcaaagccatgtggtctctgaatggccacagcctgagcaaggtgttcacaggcagcagagccctggaagggaaggccaaggtggggaagctgaaggatggagcccggtccatgtctcgaaccatccagtccaacttcttcgacggggtgaagcaggaggccatcaagctgctgctggttggggacgtctacggcgaggaggtggcagacaaagggggcatgctgctggacagcacggcgctcctggtgactcccaggatcctgaaagctatgactgagcgtcagtccgaattcacaaatttcaagcggatccggattgctatggggacctggaacgtgaacggaggaaagcagttccggagcaacgtgctcaggacggcggagctgacagactggctgctcgactcgccccagctctcgggagctaccgactcccaggatgacagcagcccagctgacatatttgctgtggggtttgaagagatggtggaattgagcgcagggaatattgtcaatgccagtactaccaacaagaagatgtggggtgaacagcttcagaaagccatctcacgctctcatagatacattctgttgacttcggcacagctggtgggcgtctgtctttatatctttgtacgtccataccatgtcccgttcatcagggacgtagccatcgacacagtgaagacgggcatggggggcaaggcggggaacaagggcgccgtcggcatccgcttccagttccacagcaccagcttctgcttcatatgtagtcacctgacggccgggcagtcccaggtgaaggagcggaatgaagactacaaggagatcacccagaaactctgcttcccaatggggagaaatgttttttctcatgattatgtattttggtgtggcgatttcaactaccgcattgatcttacttatgaagaagtcttctattttgttaaacgccaagactggaagaaacttctggaatttgatcaactacagctacagaaatcaagtggaaaaatttttaaggactttcacgaaggagccattaactttggacccacctacaagtatgacgttggctcagccgcctacgatacaagcgacaaatgccgcacccccgcctggacagacagggtgctgtggtggaggaagaaacatccctttgataaaacagctggagaactcaaccttctagacagtgatctagatgttgacaccaaagtcagacacacctggtctcctggtgccctgcagtattatggtcgtgcggagctacaagcgtctgatcacagacctgtgctggcgatcgtggaggtggaagttcaggaagtcgatgtgggtgctcgggagagggttttccaggaagtgtcctccttccagggccccctggatgccactgttgtagtaaaccttcaatcaccgaccttagaagagaaaaacgagtttccagaggacctgcgtactgagctcatgcagaccttggggagttatgggacaattgttcttgtcaggatcaaccaagggcagatgctggtaacttttgcagacagtcactcggctctcagtgtcctggacgtggacggtatgaaggtgaaaggcagagcagtgaagattagaccgaagaccaaggactggctgaaaggtttgcgagaggagatcattcggaaacgagacagcatggcccccgtgtctcccactgccaactcctgtttgctggaggaaaactttgacttcacaagtttggactatgagtcagaaggggatattcttgaagacgatgaagactacttggtggatgaattcaatcagcctggagtctcggacagtgaactcgggggagacgacctctctgatgtccccggccccacagcactggctcctcccagcaagtcacctgctctcaccaaaaagaagcagcatccaacgtacaaagatgacgcggacctggtggagctcaagcgggagctggaagccgtcggggagttccgccaccgttctccgagcaggtctctgtcggtccccaaccggcctcggccacctcaacccccgcagagacccccccctccaaccggtttaatggtgaaaaagtcggcttcagatgcgtccatctcctccggcacccatggacagtattcaattttgcagacggcaagacttctaccaggagcacctcagcaacctcccaaggctcggactggaataagtaaaccttataatgtcaagcagatcaaaaccaccaatgcccaggaggcagaagcagcaatccggtgtctcctggaagccagaggaggtgcctccgaagaagccctaagtgccgtggccccaagggaccttgaagcatcctctgaaccagagcccacaccgggggcagccaaaccagagaccccacaggcgcccccactccttccccgtcggcccccacccagagttcctgccatcaagaagccaaccttgagaaggacaggaaagcccctgtcaccggaagaacagtttgagcaacagactgtccattttacaatcgggcccccggagacaagcgttgaggcccctcctgtcgtgacagcccctcgagtccctcctgttcccaaaccaagaacatttcagcctgggaaagctgcagagaggccaagccacaggaagccagcatcagacgaagcccctcctggggcaggagcctctgtgccaccacctctggaggcgccgcctcttgtgcccaaggtacccccgaggaggaagaagtcagcccccgcagccttccacctgcaggtcctgcagagcaacagccagcttctccagggcctcacttacaatagcagtgacagcccctctgggcacccacctgccgcgggcaccgtcttcccacaaggggactttctcagcacttcatctgctacaagccccgacagcgatggcaccaaagcgatgaagccagaggcagccccacttcttggtgattatcaggaccccttctggaaccttcttcaccaccctaaactgttgaataacacttggctttctaagagctcagaccctttggactcaggaaccaggagccccaaaagagatcccatagacccagtgtcagctggcgcttcagctgccaaggcagagctgccaccagatcatgaacacaaaaccttaggtcactgggtgacaatcagtgaccaagaaaagaggacagcactgcaggtgtttgacccactggcaaaaacatgactgagcagctttgaaggctgcagtcctatagaatgcataccttcctccctctagacatccctccaccagaagagacatctatttaaaggcacactggccaaaacgtttgtgcatctgtcactctcgtgtagtttacaaaaatcgtgtctcttattcagtaagatggttactcagccaccaaaatatatttcactcaaggcttgtacatctgaagtttgctcttcaaggaatgggaaccttcctgttaaattcggtgtatggattttaagaaaggaatctagccaatgaggtccaagaagttctcacccattgaatttttaaatggctgttcagttcatgttgtacgtgatggagatttgtcttttgttttatttgcattttacagatttggtataacattttggggagccacctgaaggttgatgtataaagtaaggattagagaaagaggtcgttgtgaccattagtagctgtcctggcccacttaaacaaggttacaaaaaatcagagtcggaagcagccaaataggtcaacctaatgactagactgtacattcccatgagccttcatgtttaagtgtgtacatgtgcgttaaccttgatgatgcgtgaatcccgagggagccggtggcatacaccgttagcttaaccttagcttaaactagctgaaggctcctgtgccatgtcttagacattgcatgccctatcaattactataatcctgagccatggtgtgctactgaaaccaatttttatccaccatctagtccttattaaatgaaacctcacggatcctttgttccgcttatattccatgcataccacataaaagcacacagtgcgaaaactcttgctgatacgcgatattgattctcattgttagaatatggagagtgtttcagcctcgtctgtccggctggagcttcgggatggaaagtgctatgtgtccctgcatataagaatcaccaggccagtgtttctgggtttgcttgtctatatgtttgtctatattttttgcctatacatttttcccacgtttccaacagcacttctcacctattcaataactgaaaaagacattaccatagtgctttacatttttaaagtaatgttacaaggtctggaatccatttggagcagataccgtgttttcgctatttaataagaagttcagtagtgaaatcttactgtaccgcctgttgtatctgggagcctcgtacagaggctcgcacagcagtgatcaagtgtcatcccttacgtgactgggggatgtctgtcctaaaagctgactgctaggatagtaaggatcatcttgcctgggctatgccactgtcttgttaccaattagacatctggaatttcataattagttttcattgtcactgtcaagatatattgcagattacttaaatatggccatcaaaacaaaagttacaacacgtatctcttttcatctgaaaactaatacctggaaaaggataaaaaaaaaaaggaatccgtgacccacagagctagacagataagatgcatagttgaccagtcataaaaggcggtgtttaggtgatcaggatgccgttggtggcatttacgtgctttatatgatttttacctctgtaacaaacacaagaaataaacagaatggtccttaacagagtttgggggagagagcaagatgggttccttggagaagctgatttgccaagatgcacatcgctattaacagccagagtcataaatgaaatgaaattgaagaattcattcaaatgctcttttccctataacctcttttctcaccaaaaaggagataaatttgaaaacagataaatgtaacaaccagtcaaagaagcaggggaaaagtaagctcctccaaagttgcttgcagtgctggaaatagatctcatttttaggttttctcttcgttccagataccaaataaatgggacagagaataaaatttttgttaaaatatgtgctcatctcctaagtagctcttcagagtctgaccgtaagtaaaaacacacagaattgtgttgactgggggaggtgaatcacaaaaaagttacgaggagtttaagagttaaatattatttgatcgtggctgtcaaatttagtgaacaacatagattggatttggagttggtagtaggtatggttctcataccagaattctcttaaaaaaaaaaaaaaggacaattggaattgccttatttatttttaaaatcaatgcttactagttggtaggattcccaggtcagcagcagggttgattaaataatcttgacaatgagcagctgccatcttgggggatttcattctgtggttttttaaatgtttcgtctttgatgctaccatccagggcttcttattgtgaccttgtagcctattttgttcctgctgttctctaacatggtgcagttcacgcagactggtttaggtacttcacaactcaccattgtctctctgaccccaagcctagtcccttttacatcaccatcttctcagacttcttgcctattcttaaaatatgttttggttaatgattgaattaggacatcagcttaagcaattcctgtaacggtttaacgttgttgaagttcaaggcacataataaaattctccctgatgtgtgtgtaagtataaacaaagtaatgtatcaaagcgttcactttataatgaagtcatttcattgggaaggaaagctgcaaagattattgggggactagtgattaataaaatcctgtaatatttttgaagtgaaaatttgtactgaaattgtacatgatacctattaaatgtttttgtctttttttaaa

SEQ ID NO: 21073 - DNA, 3959 bp, Homo sapiens
  misc_feature 1..3959: note = ENST00000640338
  source 1..3959: mol_type = unassigned DNA
cgaccctcatggccctgagcaaagggctgcggctgctggggcgcctgggggccgagggggactgtagcgtgctgctggaggcgcgcggccgcgacgactgcctgctgttcgaggccggcacggtggccacgctggctccagaagaaaaggaagtcattaaaggacagtatggcaagctcacggacgcgtacggctgcctgggggagctgaggctgaaatctggtggcacgtctctgagcttcctggtgttggtgacaggctgcacatctgtgggcagaattccagatgctgaaatctacaaaatcactgccactgacttttaccctcttcaggaagaggccaaggaggaggaacgcctcatagctttgaagaaaatcctcagctcgggggtgttctatttctcatggccaaacgatgggtctcgctttgacctgactgtccgcacgcagaagcagggggatgacagctctgaatgggggaactccttcttctggaaccagctgttgcacgtgcccttgaggcagcaccaggtgagctgctgtgactggctgctgaagatcatctgcggggtggtcaccatccgcaccgtgtatgcctcccacaagcaggccaaggcctgcctcgtctctcgcgttagctgtgagcgcacaggcactcgcttccacacccgtggcgtgaacgacgacggccatgtgtccaacttcgtggagacagagcagatgatttacatggacgatggagtgtcatcttttgtccagatcagaggctccgttccgctgttctgggaacagccagggcttcaggttggctcccatcatctgagactccacagaggcctggaagccaatgcccctgctttcgacaggcacatggtgcttctgaaggagcagtacgggcagcaggtggtcgtgaaccttctgggaagcagaggcggagaggaggtgctcaacagagccttcaagaagctgctctgggcttcttgccacgcgggcgacacgcctatgatcaattttgacttccatcagtttgccaaaggtgggaagctagagaaattggagaccctcttgaggccacagttaaagctgcactgggaagacttcgatgtgttcacaaagggggagaacgtcagtccacgttttcagaaaggcactttgcggatgaactgtcttgactgcctggaccgaaccaacactgtgcagagcttcatcgcgctcgaggtcctgcatctgcagctcaagaccctggggctgagttcaaaacccatcgttgaccgctttgtggagtccttcaaagccatgtggtctctgaatggccacagcctgagcaaggtgttcacaggcagcagagccctggaagggaaggccaaggtggggaagctgaaggatggagcccggtccatgtctcgaaccatccagtccaacttcttcgacggggtgaagcaggaggccatcaagctgctgctggttggggacgtctacggcgaggaggtggcagacaaagggggcatgctgctggacagcacggcgctcctggtgactcccaggatcctgaaagctatgactgagcgtcagtccgaattcacaaatttcaagcggatccggattgctatggggacctggaacgtgaacggaggaaagcagttccggagcaacgtgctcaggacggcggagctgacagactggctgctcgactcgccccagctctcgggagctaccgactcccaggatgacagcagcccagctgacatatttgctgtggggtttgaagagatggtggaattgagcgcagggaatattgtcaatgccagtactaccaacaagaagatgtggggtgaacagcttcagaaagccatctcacgctctcatagatacattctgttgacttcggcacagctggtgggcgtctgtctttatatctttgtacgtccataccatgtcccgttcatcagggacgtagccatcgacacagtgaagacgggcatggggggcaaggcggggaacaagggcgccgtcggcatccgcttccagttccacagcaccagcttctgcttcatatgtagtcacctgacggccgggcagtcccaggtgaaggagcggaatgaagactacaaggagatcacccagaaactctgcttcccaatggggagaaatgttttttctcatgattatgtattttggtgtggcgatttcaactaccgcattgatcttacttatgaagaagtcttctattttgttaaacgccaagactggaagaaacttctggaatttgatcaactacagctacagaaatcaagtggaaaaatttttaaggactttcacgaaggagccattaactttggacccacctacaagtatgacgttggctcagccgcctacgatacaagcgacaaatgccgcacccccgcctggacagacagggtgctgtggtggaggaagaaacatccctttgataaaacagctggagaactcaaccttctagacagtgatctagatgttgacaccaaagtcagacacacctggtctcctggtgccctgcagtattatggtcgtgcggagctacaagcgtctgatcacagacctgtgctggcgatcgtggaggtggaagttcaggaagtcgatgtgggtgctcgggagagggttttccaggaagtgtcctccttccagggccccctggatgccactgttgtagtaaaccttcaatcaccgaccttagaagagaaaaacgagtttccagaggacctgcgtactgagctcatgcagaccttggggagttatgggacaattgttcttgtcaggatcaaccaagggcagatgctggtaacttttgcagacagtcactcggctctcagtgtcctggacgtggacggtatgaaggtgaaaggcagagcagtgaagattagaccgaagaccaaggactggctgaaaggtttgcgagaggagatcattcggaaacgagacagcatggcccccgtgtctcccactgccaactcctgtttgctggaggaaaactttgacttcacaagtttggactatgagtcagaaggggatattcttgaagacgatgaagactacttggtggatgaattcaatcagcctggagtctcggacagtgaactcgggggagacgacctctctgatgtccccggccccacagcactggctcctcccagcaagtcacctgctctcaccaaaaagaagcagcatccaacgtacaaagatgacgcggacctggtggagctcaagcgggagctggaagccgtcggggagttccgccaccgttctccgagcaggtctctgtcggtccccaaccggcctcggccacctcaacccccgcagagacccccccctccaaccggtttaatggtgaaaaagtcggcttcagatgcgtccatctcctccggcacccatggacagtattcaattttgcagacggcaagacttctaccaggagcacctcagcaacctcccaaggctcggactggaataagtaaaccttataatgtcaagcagatcaaaaccaccaatgcccaggaggcagaagcagcaatccggtgtctcctggaagccagaggaggtgcctccgaagaagccctaagtgccgtggccccaagggaccttgaagcatcctctgaaccagagcccacaccgggggcagccaaaccagagaccccacaggcgcccccactccttccccgtcggcccccacccagagttcctgccatcaagaagccaaccttgagaaggacaggaaagattgttttttgctctcgctctcaagcttctcagccttgcttactgcttcaaagacatgagtttgtaaggacagtagcagcccaaagactggcatctgtagacacatctggatcttccgtttgatctcagtgttctagtaacggaccctcggtaatcccttcctggtcatcacagcacgatgctgcttcccccctagagagtgtgagg

SEQ ID NO: 21074 - DNA, 939 bp, Homo sapiens
  misc_feature 1..939: note = ENST00000367113
  source 1..939: mol_type = unassigned DNA
gcggccgcgacgactgcctgctgttcgaggccggcacggtggccacgctggctccagaagaaaaggaagtcattaaaggacagtatggcaagctcacggacgcgtacggctgcctgggggagctgaggctgaaatctggtggcacgtctctgagcttcctggtgttggtgacaggctgcacatctgtgggcagaattccagatgctgaaatctacaaaatcactgccactgacttttaccctcttcaggaagaggccaaggaggaggaacgcctcatagctttgaagaaaatcctcagctcgggggtgttctatttctcatggccaaacgatgggtctcgctttgacctgactgtccgcacgcagaagcagggggatgacagctctgaatgggggaactccttcttctgaggcagccacaggttttcatctggccttggtgctttggattccccagaagtgaattcctgatttctgccggaagaaggggaccctccccacatccctgtgtccatcccaacgctccccacccccacatcctctttggttctctggtattgtggatatttgggggcagtaatgtgcccagacttcaaaatgcacgtgaatcaaggctgggcatggtagctcacgcctgcaatcccagcactttgggaggccaaggcaggcggatcacctgaggtcagcagtttgagaccagcctggccaacatggtgaaaccctgtctctactaaagatacaaagaaaattagccaggtgtggtggcgcacacctgtaatcccagctacatgggaggctgaggcagaagaatcgtttgaacccaggaggctgagattgcagtgagccgagatcgcaccattgcactccagcctgggctacagggtgagactctgtctcaaaataaataaataaaataaaataaataaaatcgtgaatctca

SEQ ID NO: 21075 - DNA, 7332 bp, Homo sapiens
  misc_feature 1..7332: note = ENST00000638626
  source 1..7332: mol_type = unassigned DNA
ataaaacctccacacttggtgtttgtgggccgagctattgtctttgtgttttctttttggagtgggtgggaagccagcttggcaagccgggtgtgaatgaacaggaatgagcaggagacgctcgctgatgccttctgtgatgtgtttcttccccagctccagaagaaaaggaagtcattaaaggacagtatggcaagctcacggacgcgtacggctgcctgggggagctgaggctgaaatctggtggcacgtctctgagcttcctggtgttggtgacaggctgcacatctgtgggcagaattccagatgctgaaatctacaaaatcactgccactgacttttaccctcttcaggaagaggccaaggaggaggaacgcctcatagctttgaagaaaatcctcagctcgggggtgttctatttctcatggccaaacgatgggtctcgctttgacctgactgtccgcacgcagaagcagggggatgacagctctgaatgggggaactccttcttctggaaccagctgttgcacgtgcccttgaggcagcaccaggtgagctgctgtgactggctgctgaagatcatctgcggggtggtcaccatccgcaccgtgtatgcctcccacaagcaggccaaggcctgcctcgtctctcgcgttagctgtgagcgcacaggcactcgcttccacacccgtggcgtgaacgacgacggccatgtgtccaacttcgtggagacagagcagatgatttacatggacgatggagtgtcatcttttgtccagatcagaggctccgttccgctgttctgggaacagccagggcttcaggttggctcccatcatctgagactccacagaggcctggaagccaatgcccctgctttcgacaggcacatggtgcttctgaaggagcagtacgggcagcaggtggtcgtgaaccttctgggaagcagaggcggagaggaggtgctcaacagagccttcaagaagctgctctgggcttcttgccacgcgggcgacacgcctatgatcaattttgacttccatcagtttgccaaaggtgggaagctagagaaattggagaccctcttgaggccacagttaaagctgcactgggaagacttcgatgtgttcacaaagggggagaacgtcagtccacgttttcagaaaggcactttgcggatgaactgtcttgactgcctggaccgaaccaacactgtgcagagcttcatcgcgctcgaggtcctgcatctgcagctcaagaccctggggctgagttcaaaacccatcgttgaccgctttgtggagtccttcaaagccatgtggtctctgaatggccacagcctgagcaaggtgttcacaggcagcagagccctggaagggaaggccaaggtggggaagctgaaggatggagcccggtccatgtctcgaaccatccagtccaacttcttcgacggggtgaagcaggaggccatcaagctgctgctggttggggacgtctacggcgaggaggtggcagacaaagggggcatgctgctggacagcacggcgctcctggtgactcccaggatcctgaaagctatgactgagcgtcagtccgaattcacaaatttcaagcggatccggattgctatggggacctggaacgtgaacggaggaaagcagttccggagcaacgtgctcaggacggcggagctgacagactggctgctcgactcgccccagctctcgggagctaccgactcccaggatgacagcagcccagctgacatatttgctgtggggtttgaagagatggtggaattgagcgcagggaatattgtcaatgccagtactaccaacaagaagatgtggggtgaacagcttcagaaagccatctcacgctctcatagatacattctgttgacttcggcacagctggtgggcgtctgtctttatatctttgtacgtccataccatgtcccgttcatcagggacgtagccatcgacacagtgaagacgggcatggggggcaaggcggggaacaagggcgccgtcggcatccgcttccagttccacagcaccagcttctgcttcatatgtagtcacctgacggccgggcagtcccaggtgaaggagcggaatgaagactacaaggagatcacccagaaactctgcttcccaatggggagaaatgttttttctcatgattatgtattttggtgtggcgatttcaactaccgcattgatcttacttatgaagaagtcttctattttgttaaacgccaagactggaagaaacttctggaatttgatcaactacagctacagaaatcaagtggaaaaatttttaaggactttcacgaaggagccattaactttggacccacctacaagtatgacgttggctcagccgcctacgatacaagcgacaaatgccgcacccccgcctggacagacagggtgctgtggtggaggaagaaacatccctttgataaaacagctggagaactcaaccttctagacagtgatctagatgttgacaccaaagtcagacacacctggtctcctggtgccctgcagtattatggtcgtgcggagctacaagcgtctgatcacagacctgtgctggcgatcgtggaggtggaagttcaggaagtcgatgtgggtgctcgggagagggttttccaggaagtgtcctccttccagggccccctggatgccactgttgtagtaaaccttcaatcaccgaccttagaagagaaaaacgagtttccagaggacctgcgtactgagctcatgcagaccttggggagttatgggacaattgttcttgtcaggatcaaccaagggcagatgctggtaacttttgcagacagtcactcggctctcagtgtcctggacgtggacggtatgaaggtgaaaggcagagcagtgaagattagaccgaagaccaaggactggctgaaaggtttgcgagaggagatcattcggaaacgagacagcatggcccccgtgtctcccactgccaactcctgtttgctggaggaaaactttgacttcacaagtttggactatgagtcagaaggggatattcttgaagacgatgaagactacttggtggatgaattcaatcagcctggagtctcggacagtgaactcgggggagacgacctctctgatgtccccggccccacagcactggctcctcccagcaagtcacctgctctcaccaaaaagaagcagcatccaacgtacaaagatgacgcggacctggtggagctcaagcgggagctggaagccgtcggggagttccgccaccgttctccgagcaggtctctgtcggtccccaaccggcctcggccacctcaacccccgcagagacccccccctccaaccggtttaatggtgaaaaagtcggcttcagatgcgtccatctcctccggcacccatggacagtattcaattttgcagacggcaagacttctaccaggagcacctcagcaacctcccaaggctcggactggaataagtaaaccttataatgtcaagcagatcaaaaccaccaatgcccaggaggcagaagcagcaatccggtgtctcctggaagccagaggaggtgcctccgaagaagccctaagtgccgtggccccaagggaccttgaagcatcctctgaaccagagcccacaccgggggcagccaaaccagagaccccacaggcgcccccactccttccccgtcggcccccacccagagttcctgccatcaagaagccaaccttgagaaggacaggaaagcccctgtcaccggaagaacagtttgagcaacagactgtccattttacaatcgggcccccggagacaagcgttgaggcccctcctgtcgtgacagcccctcgagtccctcctgttcccaaaccaagaacatttcagcctgggaaagctgcagagaggccaagccacaggaagccagcatcagacgaagcccctcctggggcaggagcctctgtgccaccacctctggaggcgccgcctcttgtgcccaaggtacccccgaggaggaagaagtcagcccccgcagccttccacctgcaggtcctgcagagcaacagccagcttctccagggcctcacttacaatagcagtgacagcccctctgggcacccacctgccgcgggcaccgtcttcccacaaggggactttctcagcacttcatctgctacaagccccgacagcgatggcaccaaagcgatgaagccagaggcagccccacttcttggtgattatcaggaccccttctggaaccttcttcaccaccctaaactgttgaataacacttggctttctaagagctcagaccctttggactcaggaaccaggagccccaaaagagatcccatagacccagtgtcagctggcgcttcagctgccaaggcagagctgccaccagatcatgaacacaaaaccttaggtcactgggtgacaatcagtgaccaagaaaagaggacagcactgcaggtgtttgacccactggcaaaaacatgactgagcagctttgaaggctgcagtcctatagaatgcataccttcctccctctagacatccctccaccagaagagacatctatttaaaggcacactggccaaaacgtttgtgcatctgtcactctcgtgtagtttacaaaaatcgtgtctcttattcagtaagatggttactcagccaccaaaatatatttcactcaaggcttgtacatctgaagtttgctcttcaaggaatgggaaccttcctgttaaattcggtgtatggattttaagaaaggaatctagccaatgaggtccaagaagttctcacccattgaatttttaaatggctgttcagttcatgttgtacgtgatggagatttgtcttttgttttatttgcattttacagatttggtataacattttggggagccacctgaaggttgatgtataaagtaaggattagagaaagaggtcgttgtgaccattagtagctgtcctggcccacttaaacaaggttacaaaaaatcagagtcggaagcagccaaataggtcaacctaatgactagactgtacattcccatgagccttcatgtttaagtgtgtacatgtgcgttaaccttgatgatgcgtgaatcccgagggagccggtggcatacaccgttagcttaaccttagcttaaactagctgaaggctcctgtgccatgtcttagacattgcatgccctatcaattactataatcctgagccatggtgtgctactgaaaccaatttttatccaccatctagtccttattaaatgaaacctcacggatcctttgttccgcttatattccatgcataccacataaaagcacacagtgcgaaaactcttgctgatacgcgatattgattctcattgttagaatatggagagtgtttcagcctcgtctgtccggctggagcttcgggatggaaagtgctatgtgtccctgcatataagaatcaccaggccagtgtttctgggtttgcttgtctatatgtttgtctatattttttgcctatacatttttcccacgtttccaacagcacttctcacctattcaataactgaaaaagacattaccatagtgctttacatttttaaagtaatgttacaaggtctggaatccatttggagcagataccgtgttttcgctatttaataagaagttcagtagtgaaatcttactgtaccgcctgttgtatctgggagcctcgtacagaggctcgcacagcagtgatcaagtgtcatcccttacgtgactgggggatgtctgtcctaaaagctgactgctaggatagtaaggatcatcttgcctgggctatgccactgtcttgttaccaattagacatctggaatttcataattagttttcattgtcactgtcaagatatattgcagattacttaaatatggccatcaaaacaaaagttacaacacgtatctcttttcatctgaaaactaatacctggaaaaggataaaaaaaaaaaggaatccgtgacccacagagctagacagataagatgcatagttgaccagtcataaaaggcggtgtttaggtgatcaggatgccgttggtggcatttacgtgctttatatgatttttacctctgtaacaaacacaagaaataaacagaatggtccttaacagagtttgggggagagagcaagatgggttccttggagaagctgatttgccaagatgcacatcgctattaacagccagagtcataaatgaaatgaaattgaagaattcattcaaatgctcttttccctataacctcttttctcaccaaaaaggagataaatttgaaaacagataaatgtaacaaccagtcaaagaagcaggggaaaagtaagctcctccaaagttgcttgcagtgctggaaatagatctcatttttaggttttctcttcgttccagataccaaataaatgggacagagaataaaatttttgttaaaatatgtgctcatctcctaagtagctcttcagagtctgaccgtaagtaaaaacacacagaattgtgttgactgggggaggtgaatcacaaaaaagttacgaggagtttaagagttaaatattatttgatcgtggctgtcaaatttagtgaacaacatagattggatttggagttggtagtaggtatggttctcataccagaattctcttaaaaaaaaaaaaaaggacaattggaattgccttatttatttttaaaatcaatgcttactagttggtaggattcccaggtcagcagcagggttgattaaataatcttgacaatgagcagctgccatcttgggggatttcattctgtggttttttaaatgtttcgtctttgatgctaccatccagggcttcttattgtgaccttgtagcctattttgttcctgctgttctctaacatggtgcagttcacgcagactggtttaggtacttcacaactcaccattgtctctctgaccccaagcctagtcccttttacatcaccatcttctcagacttcttgcctattcttaaaatatgttttggttaatgattgaattaggacatcagcttaagcaattcctgtaacggtttaacgttgttgaagttcaaggcacataataaaattctccctgatgtgtgtgtaagtataaacaaagtaatgtatcaaagcgttcactttataatgaagtcatttcattgggaaggaaagctgcaaagattattgggggactagtgattaataaaatcctgtaatatttttgaagtgaaaatttgtactgaaattgtacatgatacctattaaatgtttttgtctttttttaaa

SEQ ID NO: 21076 - DNA, 680 bp, Homo sapiens
  misc_feature 1..680: note = ENST00000449320
  source 1..680: mol_type = unassigned DNA
agtgcaatggcgcgatctcggctcaccacaacctctgcctcctgggttcaagcaattctcctgcctcagcctcctgaatagctgggactacaggcatgcgccaccatgcccaactaattttttgtatttttagtagagacggggtttttccatgttggtcaggctggtctgaaactccgacctcaggtggtccacctgcctcagcctcccaaagtgctgggattacagccatgagccgccgtgcctggccgacctctcttctcttttaagatgtttctttatgcctcgggacctgctcctcctgcaggaacctgcaggtggggaggtcaaggtggcacgtctctgagcttcctggtgttggtgacaggctgcacatctgtgggcagaattccagatgctgaaatctacaaaatcactgccactgacttttaccctcttcaggaagaggccaaggaggaggaacgcctcatagctttgaagaaaatcctcagctcgggggtgttctatttctcatggccaaacgatgggtctcgctttgacctgactgtccgcacgcagaagcagggggatgacagctctgaatgggggaactccttcttctggaaccagctgttgcacgtgcccttgaggcagcaccaggtgagctgctgtgactggctgctgaagatcatctgcggggt

SEQ ID NO: 21077 - DNA, 2040 bp, Homo sapiens
  misc_feature 1..2040: note = ENST00000640569
  source 1..2040: mol_type = unassigned DNA
aaaggccggtttctacccgatgatctcttgggccccgtcccgagagtgaggcacggcgccaccaggcacccccgatacgcagcgtgttgtgaagtgcccttgtgagcagcgggggatagggaacagaaaaccagctgtcagcgacagcgaggtggtgccccagagagggctgcctcattcgcctggctgcagggtccgaggtcgtcttggtagcatttggcaggaatttatttaggaagcattcagcaaaccgagtgtgtgtggtgctgggagatgacgacgaaatggccctgcccccaaggaagcccctcccctgggggcacaggtggggagggaggtcatgagctttgtgtgtgtgacaactgctgatgggaatgctattggcacgtacgaggggtgcctgtccgtgtcttgggagagcaaggaaggcttcccggaggagttgctgccaagttggcccagaaggatgaggaggagttcttctggtgaagtggggagggcagaggcaggatggtccctacggagcatgtggggacgctcgtgttcttccagaggatggaatgctgggcccgaagcctgaagtattgttagggtagagacaggcgggaggtgcgtggagaaggggtcatggaggtcttgttgggcagatggcggtgggacgtcccaggcagggggagcatcttgggcaagagcccagggtgcgaggtcatgcttatggcacattggaccagctggaggacagccagctcaggagagcagccggctggggtgtctgcccacgtgtggggcagggatgggctgcagcggggagggatttgggagcttctgtcgtagtcctgcagggagtgggagctgtgcaagaaggaagggcggagcggctgtgatccaatgactttgggaaggccactcctgtgatggagtgggggaagacagaccccaggccaggggtcctgagtcaaggcagtggctgaggaggcactggggaaggtgatttggagaggctttgggggtaggtcctgggggtctggaagggctctaggccaggaattttcagactcctgggggcatcagaatcacctggagggcttgttaaagcaaagcttgcccccagcctcaggcagctgggcggcaggaatctgcatgtctaacaggctcccaggggatgctgacttgctggccagggtcccacactttgagaagccccgcctgaagcttacaggacagggcaggttcttgagccattgagttgggcaatgccatgggaagttgcaggtgcacagacgttgccttcctggctgcggttgaacctgggctccatttgtccccttggagctccaggcggccgggccgacttcgaccctgagctctcctgtctgatttcctttccaggtggcacgtctctgagcttcctggtgttggtgacaggctgcacatctgtgggcagaattccagatgctgaaatctacaaaatcactgccactgacttttaccctcttcaggaagaggccaaggaggaggaacgcctcatagctttgaagaaaatcctcagctcgggggtgttctatttctcatggccaaacgatgggtctcgctttgacctgactgtccgcacgcagaagcagggggatgacagctctgaatgggggaactccttcttctggtgaggccctgggtcccctgcagagggtgggccctgggtctcctgcagagggtgggccctggttggcatctgaggccttgacctccacttgcaccacccccgggttatggggcacctctggagagttaggacccaggcctgctctcagcacaatgagaggaaaactaaccctgaactccctgccaccccccacccctggcccctggaatgtgttcagtgtagatttggaaaagaaacctgcgccaggcatggtgcctcatgcctgtaatcccagcactttgggaggctgaggcaggtggatcacttgagttaaggagtttgagacaagcctggccaacatggtgaaagcccatctctactaaaaatacaaaaaaaaaaaa

SEQ ID NO: 21078 - DNA, 810 bp, Homo sapiens
  misc_feature 1..810: note = ENST00000485863
  source 1..810: mol_type = unassigned DNA
aggtgagctgctgtgactggctgctgaagatcatctgcggggtggtcaccatccgcaccgtgtatgcctcccacaagcaggccaaggcctgcctcgtctctcgcgttagctgtgagcgcacaggcactcgcttccacacccgtggcgtgaacgacgacggccatgtgtccaacttcgtggagacagagcagatgatttacatggacgatggagtgtcatcttttgtccagatcagaggctccgttccgctgttctgggaacagccagggcttcaggttggctcccatcatctgagactccacagaggcctggaagccaatgcccctgctttcgacaggcacatggtgcttctgaaggagcagtacgggcagcaggtggtcgtgaaccttctgggaagcagaggcggagaggaggtgctcaacagagccttcaaggtaaggccaggctgtcctctccacagctgggctgggcggcaggtggccatggtggagcgttgagcctggaggtggctcctgcagggactggagctgacagcccagccctccttcgtttcctgaggcttccccagcattccgaccagtgaacacggcagtgctcagtgactcgggccctgatacatttgccaaaggtgggaagctagagaaattggagaccctcttgaggccacagttaaagctgcactgggaagacttcgatgtgttcacaaagggggagaacgtcagtccacgttttcagaaaggcactttgcggatgaactgtcttgactgcctggaccgaaccaacactgtgcagagcttcatcgcgctcgag

SEQ ID NO: 21079 - DNA, 5091 bp, Homo sapiens
  misc_feature 1..5091: note = ENST00000367112
  source 1..5091: mol_type = unassigned DNA
cctaattacacattttgggagagcatagccaggaaattgcatctgtgaaaagaaaatacaaattttcctctagatgagtttgtgaacgcctgtgtggccccagcgctctgagaggtggggcctagaatgagtccgagtgttctcagctcctgcagctcttaccataccaattgctgccaaccttctgggattcctgggtcctggaaacccggcagcaacactgtgtctcaagcctacagtgggcatgctggcgaggactgcaggcatggtcatgactgttttgaataattatatgcgaggaatgtttttaaccaaaggccccaaagcatccgaagcctggcttcaaggtggaggagtaaggaggatgagtctgggacgtggggtggttcgtggcgcagacctctattgtggaagtgtcatgatcgcattcttggatattgactcgattctatatgggtctctcgaatggaacccctgcgagtagctggagaactcaaccttctagacagtgatctagatgttgacaccaaagtcagacacacctggtctcctggtgccctgcagtattatggtcgtgcggagctacaagcgtctgatcacaggtgaggtcctgacttccatggcgttttctcctgtgctgggcaaggcagcgtctccctctccgcaggaaaatgcatgctgtccccataaggatgtgtgtgcgcatgggggtgcattttgtgtgcatacaatacaccaaagaacaaagaatgatggaacaaatatctgtggacccaccaccaagaactaattaatcttagcattttgtcattgctccatatcataaatgacatcattgatgaaaatttcaaagatgcaacctacgtattttgcggcttttatattttcttaaatgatgtcgttgtgcaacttgcttttttgttactatttttgagatacagtcgtgttgatgttatagctctggtgcattcatttgtaactgctgtctagtatcccactaaatatatccatggaacttacaacttatccattcacctcttgatgaatattttctccaggattttatgattacaaacaccatagggtttttaaatctgggatgcacaaccttttttttttttttttttttgagagagagtcttgctctattgcccaggctggatggagtacagtggtgtgatctcagctcactgcaacctccgcttcccagattcaagcaattctcctgcctcagcctcccaagtagctgggattacaggtgcacaccaccatgcctggctaatttttgtgtttttagtagagacggggtttcaccatgttggccaggctggtcccaaactcctgacctcaggtgatccacccaccttggcctctcaaagtgttgggattacaggcgtgagccaccgcacctggccctaggatgcagggctttttaaatgctctgtgcatcatgcattgaggatagagtggaggcagcagagggagcaccgtgggcaccagcacctgtgccctgggattgctgcagaggaagactcaccctgcagaatgtctttaaagacagaggagaggatggcatttgagggtgtgaagaaggaagagtttgatcttcccaaggctgctgcctaaactctcatgtcagtttcaacttttacaaggaaagaaattaagaaaaagaagacctgtgctggcgatcgtggaggtggaagttcaggaagtcgatgtgggtgctcgggagagggttttccaggaagtgtcctccttccagggccccctggatgccactgttgtagtaaaccttcaatcaccgaccttagaagagaaaaacgagtttccagaggacctgcgtactgagctcatgcagaccttggggagttatgggacaattgttcttgtcaggatcaaccaagggcagatgctggtaacttttgcagacagtcactcggctctcagtgtcctggacgtggacggtatgaaggtgaaaggcagagcagtgaagattagaccgaagaccaaggactggctgaaaggtttgcgagaggagatcattcggaaacgagacagcatggcccccgtgtctcccactgccaactcctgtttgctggaggaaaactttgacttcacaagtttggactatgagtcagaaggggatattcttgaagacgatgaagactacttggtggatgaattcaatcagcctggagtctcggacagtgaactcgggggagacgacctctctgatgtccccggccccacagcactggctcctcccagcaagtcacctgctctcaccaaaaagaagcagcatccaacgtacaaagatgacgcggacctggtggagctcaagcgggagctggaagccgtcggggagttccgccaccgttctccgagcaggtctctgtcggtccccaaccggcctcggccacctcaacccccgcagagacccccccctccaaccggtttaatggtgaaaaagtcggcttcagatgcgtccatctcctccggcacccatggacagtattcaattttgcagacggcaagacttctaccaggagcacctcagcaacctcccaaggctcggactggaataagtaaaccttataatgtcaagcagatcaaaaccaccaatgcccaggaggcagaagcagcaatccggtgtctcctggaagccagaggaggtgcctccgaagaagccctaagtgccgtggccccaagggaccttgaagcatcctctgaaccagagcccacaccgggggcagccaaaccagagaccccacaggcgcccccactccttccccgtcggcccccacccagagttcctgccatcaagaagccaaccttgagaaggacaggaaagcccctgtcaccggaagaacagtttgagcaacagactgtccattttacaatcgggcccccggagacaagcgttgaggcccctcctgtcgtgacagcccctcgagtccctcctgttcccaaaccaagaacatttcagcctgggaaagctgcagagaggccaagccacaggaagccagcatcagacgaagcccctcctggggcaggagcctctgtgccaccacctctggaggcgccgcctcttgtgcccaaggtacccccgaggaggaagaagtcagcccccgcagccttccacctgcaggtcctgcagagcaacagccagcttctccagggcctcacttacaatagcagtgacagcccctctgggcacccacctgccgcgggcaccgtcttcccacaaggggactttctcagcacttcatctgctacaagccccgacagcgatggcaccaaagcgatgaagccagaggcagccccacttcttggtgattatcaggaccccttctggaaccttcttcaccaccctaaactgttgaataacacttggctttctaagagctcagaccctttggactcaggaaccaggagccccaaaagagatcccatagacccagtgtcagctggcgcttcagctgccaaggcagagctgccaccagatcatgaacacaaaaccttaggtcactgggtgacaatcagtgaccaagaaaagaggacagcactgcaggtgtttgacccactggcaaaaacatgactgagcagctttgaaggctgcagtcctatagaatgcataccttcctccctctagacatccctccaccagaagagacatctatttaaaggcacactggccaaaacgtttgtgcatctgtcactctcgtgtagtttacaaaaatcgtgtctcttattcagtaagatggttactcagccaccaaaatatatttcactcaaggcttgtacatctgaagtttgctcttcaaggaatgggaaccttcctgttaaattcggtgtatggattttaagaaaggaatctagccaatgaggtccaagaagttctcacccattgaatttttaaatggctgttcagttcatgttgtacgtgatggagatttgtcttttgttttatttgcattttacagatttggtataacattttggggagccacctgaaggttgatgtataaagtaaggattagagaaagaggtcgttgtgaccattagtagctgtcctggcccacttaaacaaggttacaaaaaatcagagtcggaagcagccaaataggtcaacctaatgactagactgtacattcccatgagccttcatgtttaagtgtgtacatgtgcgttaaccttgatgatgcgtgaatcccgagggagccggtggcatacaccgttagcttaaccttagcttaaactagctgaaggctcctgtgccatgtcttagacattgcatgccctatcaattactataatcctgagccatggtgtgctactgaaaccaatttttatccaccatctagtccttattaaatgaaacctcacggatcctttgttccgcttatattccatgcataccacataaaagcacacagtgcgaaaactcttgctgatacgcgatattgattctcattgttagaatatggagagtgtttcagcctcgtctgtccggctggagcttcgggatggaaagtgctatgtgtccctgcatataagaatcaccaggccagtgtttctgggtttgcttgtctatatgtttgtctatattttttgcctatacatttttcccacgtttccaacagcacttctcacctattcaataactgaaaaagacattaccatagtgctttacatttttaaagtaatgttacaaggtctggaatccatttggagcagataccgtgttttcgctatttaataagaagttcagtagtgaaatcttactgtaccgcctgttgtatctgggagcctcgtacagaggctcgcacagcagtgatcaagtgtcatcccttacgtgactgggggatgtctgtcctaaaagctgactgctaggatagtaaggatcatcttgcctgggctatgccactgtcttgttaccaattagacatctggaatttcataattagttttcattgtcactgtcaagatatattgcagattacttaaatatggccatcaaaacaaaagttacaacacgtatctcttttcatctgaaaactaatacctggaaaaggataaaaaaaaaaa

SEQ ID NO: 21080 - DNA, 3029 bp, Homo sapiens
  misc_feature 1..3029: note = ENST00000367122
  source 1..3029: mol_type = unassigned DNA
atcagaaagggggcgagcttaggggcggcattcctcttggggtgtgggtgtgggtgtttggatgctggaggaactcatcttttccccagcttgtggttggcctcatcttaccacctgggcctacccatggcttttgaatttccaccagcctttcggcgagctggcagcaggcgttgaactgacctccccactgagcccctgggtcccgggaagggcctgtgcctgccaagagcaccacgggtacacccctgcagcacctggagactaagactatgctgcccataatcctcttctctgactttcagaagatgtttaggtccctgtccctctgcttgtgttatttgggcagcttggcagtgtcctaggttagcaggtgaagggacgtagccatcgacacagtgaagacgggcatggggggcaaggcggggaacaagggcgccgtcggcatccgcttccagttccacagcaccagcttctgcttcatatgtagtcacctgacggccgggcagtcccaggtgaaggagcggaatgaagactacaaggagatcacccagaaactctgcttcccaatggggagaaatgttttttctcatgattatgtattttggtgtggcgatttcaactaccgcattgatcttacttatgaagaagtcttctattttgttaaacgccaagactggaagaaacttctggaatttgatcaactacagctacagaaatcaagtggaaaaatttttaaggactttcacgaaggagccattaactttggacccacctacaagtatgacgttggctcagccgcctacgatacaagcgacaaatgccgcacccccgcctggacagacagggtgctgtggtggaggaagaaacatccctttgataaaacagctggagaactcaaccttctagacagtgatctagatgttgacaccaaagtcagacacacctggtctcctggtgccctgcagtattatggtcgtgcggagctacaagcgtctgatcacagacctgtgctggcgatcgtggaggtggaagttcaggaagtcgatgtgggtgctcgggagagggttttccaggaagtgtcctccttccagggccccctggatgccactgttgtagtaaaccttcaatcaccgaccttagaagagaaaaacgagtttccagaggacctgcgtactgagctcatgcagaccttggggagttatgggacaattgttcttgtcaggatcaaccaagggcagatgctggtaacttttgcagacagtcactcggctctcagtgtcctggacgtggacggtatgaaggtgaaaggcagagcagtgaagattagaccgaagaccaaggactggctgaaaggtttgcgagaggagatcattcggaaacgagacagcatggcccccgtgtctcccactgccaactcctgtttgctggaggaaaactttgacttcacaagtttggactatgagtcagaaggggatattcttgaagacgatgaagactacttggtggatgaattcaatcagcctggagtctcggacagtgaactcgggggagacgacctctctgatgtccccggccccacagcactggctcctcccagcaagtcacctgctctcaccaaaaagaagcagcatccaacgtacaaagatgacgcggacctggtggagctcaagcgggagctggaagccgtcggggagttccgccaccgttctccgagcaggtctctgtcggtccccaaccggcctcggccacctcaacccccgcagagacccccccctccaaccggtttaatggtgaaaaagtcggcttcagatgcgtccatctcctccggcacccatggacagtattcaattttgcagacggcaagacttctaccaggagcacctcagcaacctcccaaggctcggactggaataagtaaaccttataatgtcaagcagatcaaaaccaccaatgcccaggaggcagaagcagcaatccggtgtctcctggaagccagaggaggtgcctccgaagaagccctaagtgccgtggccccaagggaccttgaagcatcctctgaaccagagcccacaccgggggcagccaaaccagagaccccacaggcgcccccactccttccccgtcggcccccacccagagttcctgccatcaagaagccaaccttgagaaggacaggaaagcccctgtcaccggaagaacagtttgagcaacagactgtccattttacaatcgggcccccggagacaagcgttgaggcccctcctgtcgtgacagcccctcgagtccctcctgttcccaaaccaagaacatttcagcctgggaaagctgcagagaggccaagccacaggaagccagcatcagacgaagcccctcctggggcaggagcctctgtgccaccacctctggaggcgccgcctcttgtgcccaaggtacccccgaggaggaagaagtcagcccccgcagccttccacctgcaggtcctgcagagcaacagccagcttctccagggcctcacttacaatagcagtgacagcccctctgggcacccacctgccgcgggcaccgtcttcccacaaggggactttctcagcacttcatctgctacaagccccgacagcgatggcaccaaagcgatgaagccagaggcagccccacttcttggtgattatcaggaccccttctggaaccttcttcaccaccctaaactgttgaataacacttggctttctaagagctcagaccctttggactcaggaaccaggagccccaaaagagatcccatagacccagtgtcagctggcgcttcagctgccaaggcagagctgccaccagatcatgaacacaaaaccttaggtcactgggtgacaatcagtgaccaagaaaagaggacagcactgcaggtgtttgacccactggcaaaaacatgactgagcagctttgaaggctgcagtcctatagaatgcataccttcctccctctagacatccctccaccagaagagacatctatttaaaggcacactggcc

SEQ ID NO: 21081 - DNA, 566 bp, Homo sapiens
  misc_feature 1..566: note = ENST00000478456
  source 1..566: mol_type = unassigned DNA
aaacagattcagtggccttggagaaggaagctagtctaaatgatcatgtcattcttactcaggcagttacaaagagtgttacactgcgcctttaaggaaaactttccttcatcattcctgtaagcgtggacatgcaacttctctcaccacaaaggttctgccttaaagggctttcctggagtgtcaataggacctcaaaagaagagaacctgaggggacttccagctgcagaaggagtaagtgaaccgtgaagcagaataacctttgctgaagtcaaagaggggcagctttttgcaatctttgcatttgcaacatgcggtggctattctggaggcctgcggctgagtgtggactgcgtcaacaagacagaaagtaacctcagcatcgacatagcgtttgcctacccattcaggttgcaccaggtgacgtttgaggtgcccacctgcgagggaaaggaacggcagaagctggcattgattggtgactcctcgtcttcagcagagttcttcgtcactgttgctgtcttcgccttcctctactctttggctgccactgtcgtttacatt

SEQ ID NO: 21082 - DNA, 2709 bp, Homo sapiens
  misc_feature 1..2709: note = ENST00000478300
  source 1..2709: mol_type = unassigned DNA
aagtttccccggagccagagggcaccgggcgcacggctgagcctgcaccaatgtctgtgggccctgcctcgcccacctcctcgccctcccctctggagcgcggctggccaatgacagccttcccctggctccatgggtttccccctcccctgttgtatctaccctgccccagctcttccctgcccacccctcgctgactcgcttcgcttccccgacgcgctgggttcccggagcgcagagcccagcgttagcgggtgggctccccgaggccccctgccctcgccgggctgctccagggtgtcgctcctctggctgctcccgaaggggcttctggccctgaggacggtggtgccaagcgaacttcatttttaaaaagaactggtggatgagaagagcgagcgagggcgagctatggaccctgtgagtcagctggcctctgcgggcaccttccgggtgctgaaggagccccttgccttcctgcgagccctggaattgctttttgcaatctttgcatttgcaacatgcggtggctattctggaggcctgcggctgagtgtggactgcgtcaacaagacagaaagtaacctcagcatcgacatagcgtttgcctacccattcaggttgcaccaggtgacgtttgaggtgcccacctgcgagggaaaggaacggcagaagctggcattgattggtgactcctcgtcttcagcagagttcttcgtcactgttgctgtcttcgccttcctctactctttggctgccactgtcgtttacattttcttccagaacaaataccgggaaaacaaccggggcccactcattgacttcattgtcactgtagtcttttcgttcttgtggttggtgggttcatcagcttgggcaaaaggactgtctgacgtcaaagttgcaacggatcccaaggaagtattgctactaatgtcagcttgcaaacagccatccaacaaatgcatggctatccacagccctgttatgtcaagcttaaacacttctgtggtctttggattcttgaactttattctctgggctggaaacatatggtttgttttcaaggagaccggctggcattcttcgggacagagatatctttcagatccaatggagaagcactccagcagctataatcaaggtggttacaaccaagacagctatggatcaagcagtgggtacagtcagcaggcgagtttggggccaacctcagatgagtttggccaacagcctactggccccacttcctttaccaatcagatttaacagagtagcatttgcattcttctgcagtcgcctcaccatcttccatttcagtggcagaagaattttttaagggtttcaatcaattattaatgcagagagtattgaatgtaaatcagagctctctagtcttcattaaggcagcaagtcctgggttgtgaaaaatgatacttagagatgaggcgacatgaggagatatattattcatcatagatggctaattggagagtaccttgttatatatacagatactttcatggtcattttgtatgtatgttaaagtagtagaagtattttgtagcttaaagtctctagtatgtaatatgcataaagtaaatcaaatagcgttgagttttcttatgcattttgatgtgaaagatgttataataatttctagaagacaatttggtgtatcacaacatgcatgtcttatttttttttagttttaagtcctataggactatgagtctctaagttatttgtttcagaaaattattctttttttatgtgataaatcatatgatttaagtgcatgaataagcattttcccacacaatgaacatttgaactgtgtttatgaaaattttctggtttgcaccatgaatttgtcaaatggatatttataggaatatattcactactttgtatactttgcaaatttgtctctctggctttacccaagttctgaatgcattgtaattaaaatttaagtttttcttttcccccattagtaaacatttagtgctacatatgataactgcccaatatttattctatttacttagctaaatatttgcattcttgtaaccttctatggtgttttgtggctcttatcttgtggaccataaataacacggcccaataactctttgtgtttatggagtgttgttttcttagaataatggagatgcagatatagataccatagtcaaggtaccgccttgctgaagtatttatttataaagaatattctgtagaacctctactaccagctatatttttaaatcctgtttatttgtaaagctaatatgctcctcaatgtaattattaaaaattctcaagtcacagctaaacttactaattctgattttagtgtagcccctaaattaaaaatggcttccatatgccactctgtaccccaaagagagttctcatgaaatattctccagaatgtattcattatcaagaaaatgtcaatcgtcacttcctcgttttaactcagctgaaacaccaggacccaatagagagggcaagctgagcatctgtatttccagataaaagttgttattgatgtataaactcgttgcgtgattagtgatgttggaagcattttagcacaaaacagccttgtgtcttagatgatatctgtaaccagtttctgaatcccgttggataaaactgtattgtgatatctatttgatgttaataaagttattgcataca

SEQ ID NO: 21083 - DNA, 1004 bp, Homo sapiens
  misc_feature 1..1004: note = ENST00000450542
  source 1..1004: mol_type = unassigned DNA
gactcgcttcgcttccccgacgcgctgggttcccggagcgcagagcccagcgttagcgggtgggctccccgaggccccctgccctcgccgggctgctccagggtgtcgctcctctggctgctcccgaaggggcttctggccctgaggacggtggtgccaagcgaacttcatttttaaaaagaactggtggatgagaagagcgagcgagggcgagctatggaccctgtgagtcagctggcctctgcgggcaccttccgggtgctgaaggagccccttgccttcctgcgagccctggaattggttgcaccaggtgacgtttgaggtgcccacctgcgagggaaaggaacggcagaagctggcattgattggtgactcctcgtcttcagcagagttcttcgtcactgttgctgtcttcgccttcctctactctttggctgccactgtcgtttacattttcttccagaacaaataccgggaaaacaaccggggcccactcattgacttcattgtcactgtagtcttttcgttcttgtggttggtgggttcatcagcttgggcaaaaggactgtctgacgtcaaagttgcaacggatcccaaggaagtattgctactaatgtcagcttgcaaacagccatccaacaaatgcatggctatccacagccctgttatgtcaagcttaaacacttctgtggtctttggattcttgaactttattctctgggctggaaacatatggtttgttttcaaggagaccggctggcattcttcgggacagagatatctttcagatccaatggagaagcactccagcagctataatcaaggtggttacaaccaagacagctatggatcaagcagtgggtacagtcagcaggcgagtttggggccaacctcagatgagtttggccaacagcctactggccccacttcctttaccaatcagatttaacagagtagcatttgcattcttctgcagtcgcctcaccatcttccatttcagtggc

SEQ ID NO: 21084 - DNA, 1304 bp, Homo sapiens
  misc_feature 1..1304: note = ENST00000468110
  source 1..1304: mol_type = unassigned DNA
gcttccccgacgcgctgggttcccggagcgcagagcccagcgttagcgggtgggctccccgaggccccctgccctcgccgggctgctccagggtgtcgctcctctggctgctcccgaaggggcttctggccctgaggacggtggtgccaagcgaacttcatttttaaaaagaactggtggatgagaagagcgagcgagggcgagctatggaccctgtgagtcagctggcctctgcgggcaccttccgggtgctgaaggagccccttgccttcctgcgagccctggaattgctttttgcaatctttgcatttgcaacatgcggtggctattctggaggcctgcggctgagtgtggactgcgtcaacaagacagaaagtaacctcagcatcgacatagcgtttgcctacccattcaggacttcattgtcactgtagtcttttcgttcttgtggttggtgggttcatcagcttgggcaaaaggactgtctgacgtcaaagttgcaacggatcccaaggaagtattgctactaatgtcagcttgcaaacagccatccaacaaatgcatggctatccacagccctgttatgtcaagcttaaacacttctgtggtctttggattcttgaactttattctctgggctggaaacatatggtttgttttcaaggagaccggctggcattcttcgggacagagatatctttcagatccaatggagaagcactccagcagctataatcaaggtggttacaaccaagacagctatggatcaagcagtgggtacagtcagcaggcgagtttggggccaacctcagatgagtttggccaacagcctactggccccacttcctttaccaatcagatttaacagagtagcatttgcattcttctgcagtcgcctcaccatcttccatttcagtggcagaagaattttttaagggtttcaatcaattattaatgcagagagtattgaatgtaaatcagagctctctagtcttcattaaggcagcaagtcctgggttgtgaaaaatgatacttagagatgaggcgacatgaggagatatattattcatcatagatggctaattggagagtaccttgttatatatacagatactttcatggtcattttgtatgtatgttaaagtagtagaagtattttgtagcttaaagtctctagtatgtaatatgcataaagtaaatcaaatagcgttgagttttcttatgcattttgatgtgaaagatgttataataatttctagaagacaatttggtgtatcacaacatgcatgtcttattttttttta

SEQ ID NO: 21085 - DNA, 553 bp, Homo sapiens
  misc_feature 1..553: note = ENST00000496889
  source 1..553: mol_type = unassigned DNA
ctctctctcgcctcattcccccaaagctggcctctgcgggcaccttccgggtgctgaaggagccccttgccttcctgcgagccctggaattggctcacctgtgcctggtgtcaagaagctcagtgactctttctggactcagaagtgcctctcagccctcaggagccttttctccagcaaatgtaccctatggaaaagtagtccttgatccaatcagttatttgttgactggactgggtcagtttcctctaggttctactggtgcattcttctggaatacatgacttcaaggacagacctctacatgtgagttttctaattctttttgcaatctttgcatttgcaacatgcggtggctattctggaggcctgcggctgagtgtggactgcgtcaacaagacagaaagtaacctcagcatcgacatagcgtttgcctacccattcaggttgcaccaggtgacgtttgaggtgcccacctgcgagggaaaggaacggcagaagctggcattgattggtgactcctcgtcttcagcagagttcttcgtcactgttg

SEQ ID NO: 21086 - DNA, 526 bp, Homo sapiens
  misc_feature 1..526: note = ENST00000460142
  source 1..526: mol_type = unassigned DNA
ttcccccaaagctggcctctgcgggcaccttccgggtgctgaaggagccccttgccttcctgcgagccctggaattggctgtagaagaaacctggtgtcactatccacttctggtgaaggcctcaggctgcttccactcatggcagaaggcagagaggagctggtgtgtgcagagatcacatggtgagaaaggaagcaaaagctttttgcaatctttgcatttgcaacatgcggtggctattctggaggcctgcggctgagtgtggactgcgtcaacaagacagaaagtaacctcagcatcgacatagcgtttgcctacccattcaggttgcaccaggtgacgtttgaggtgcccacctgcgagggaaaggaacggcagaagctggcattgattggtgactcctcgtcttcagcagagttcttcgtcactgttgctgtcttcgccttcctctactctttggctgccactgtcgtttacattttcttccagaacaaataccgggaaaacaaccggggcccactcatt

SEQ ID NO: 21087 - DNA, 703 bp, Homo sapiens
  misc_feature 1..703: note = ENST00000493532
  source 1..703: mol_type = unassigned DNA
cgtttccaagaagcaaagattcttggttctttgttgctttaagaaaatttaggccaggttttccttagacaaggaaattgaaattaaaacagtagctctttttagtttttcaggcaatagagatcaaatttgggagcagtgggtgataacactgaggaatgttatctgagatgacaaattcctgaagctttttgcaatctttgcatttgcaacatgcggtggctattctggaggcctgcggctgagtgtggactgcgtcaacaagacagaaagtaacctcagcatcgacatagcgtttgcctacccattcaggttgcaccaggtgacgtttgaggtgcccacctgcgagggaaaggaacggcagaagctggcattgattggtgactcctcgtcttcagcagagttcttcgtcactgttgctgtcttcgccttcctctactctttggctgccactgtcgtttacattttcttccagaacaaataccgggaaaacaaccggggcccactcattgacttcattgtcactgtagtcttttcgttcttgtggttggtgggttcatcagcttgggcaaaaggactgtctgacgtcaaagttgcaacggatcccaaggaagtattgctactaatgtcagcttgcaaacagccatccaacaaatgcatggctatccacagccctgttatgtcaagcttaaacacttctgtg

SEQ ID NO: 21088 - DNA, 506 bp, Homo sapiens
  misc_feature 1..506: note = ENST00000467934
  source 1..506: mol_type = unassigned DNA
aaagcagtcctgcacttccagttgtgagccaagagccaagtgtgggagctcaccatggtggcagccacctccccaccaagcaggcagcgttcaccagaggggagtatcaggttcctgtactcagctgtgggttgtcactgtctaataatatgaccgttttgccatctctctgcaaatgaggctgaagctgctatctgattgctttttgcaatctttgcatttgcaacatgcggtggctattctggaggcctgcggctgagtgtggactgcgtcaacaagacagaaagtaacctcagcatcgacatagcgtttgcctacccattcaggttgcaccaggtgacgtttgaggtgcccacctgcgagggaaaggaacggcagaagctggcattgattggtgactcctcgtcttcagcagagttcttcgtcactgttgctgtcttcgccttcctctactctttggctgccactgtcgtttacattttcttccagaacaaataccgggaaaa

SEQ ID NO: 21089 - DNA, 2607 bp, Homo sapiens
  misc_feature 1..2607: note = ENST00000295894
  source 1..2607: mol_type = unassigned DNA
aaagcagtcctgcacttccagttgtgagccaagagccaagtgtgggagctcaccatggtggcagccacctccccaccaagcaggcagcgttcaccagaggggagtatcaggttcctgtactcagctgtgggttgtcactgtctaataatatgaccgttttgccatctctctgcaaatgaggctgaagctgctatctgattggtataacatctcactttccctctgcattgattttcttcttctcctcctttgcttcataaaaagagggacaagtggctggtgctgtggacagagaagctttatttttagtatgagacaacctctattttctttcaggagagggaagttggattatcaattcttttgtaaatgtgtatggtgatatttgctccgctttttgcaatctttgcatttgcaacatgcggtggctattctggaggcctgcggctgagtgtggactgcgtcaacaagacagaaagtaacctcagcatcgacatagcgtttgcctacccattcaggttgcaccaggtgacgtttgaggtgcccacctgcgagggaaaggaacggcagaagctggcattgattggtgactcctcgtcttcagcagagttcttcgtcactgttgctgtcttcgccttcctctactctttggctgccactgtcgtttacattttcttccagaacaaataccgggaaaacaaccggggcccactcattgacttcattgtcactgtagtcttttcgttcttgtggttggtgggttcatcagcttgggcaaaaggactgtctgacgtcaaagttgcaacggatcccaaggaagtattgctactaatgtcagcttgcaaacagccatccaacaaatgcatggctatccacagccctgttatgtcaagcttaaacacttctgtggtctttggattcttgaactttattctctgggctggaaacatatggtttgttttcaaggagaccggctggcattcttcgggacagagatatctttcagatccaatggagaagcactccagcagctataatcaaggtggttacaaccaagacagctatggatcaagcagtgggtacagtcagcaggcgagtttggggccaacctcagatgagtttggccaacagcctactggccccacttcctttaccaatcagatttaacagagtagcatttgcattcttctgcagtcgcctcaccatcttccatttcagtggcagaagaattttttaagggtttcaatcaattattaatgcagagagtattgaatgtaaatcagagctctctagtcttcattaaggcagcaagtcctgggttgtgaaaaatgatacttagagatgaggcgacatgaggagatatattattcatcatagatggctaattggagagtaccttgttatatatacagatactttcatggtcattttgtatgtatgttaaagtagtagaagtattttgtagcttaaagtctctagtatgtaatatgcataaagtaaatcaaatagcgttgagttttcttatgcattttgatgtgaaagatgttataataatttctagaagacaatttggtgtatcacaacatgcatgtcttatttttttttagttttaagtcctataggactatgagtctctaagttatttgtttcagaaaattattctttttttatgtgataaatcatatgatttaagtgcatgaataagcattttcccacacaatgaacatttgaactgtgtttatgaaaattttctggtttgcaccatgaatttgtcaaatggatatttataggaatatattcactactttgtatactttgcaaatttgtctctctggctttacccaagttctgaatgcattgtaattaaaatttaagtttttcttttcccccattagtaaacatttagtgctacatatgataactgcccaatatttattctatttacttagctaaatatttgcattcttgtaaccttctatggtgttttgtggctcttatcttgtggaccataaataacacggcccaataactctttgtgtttatggagtgttgttttcttagaataatggagatgcagatatagataccatagtcaaggtaccgccttgctgaagtatttatttataaagaatattctgtagaacctctactaccagctatatttttaaatcctgtttatttgtaaagctaatatgctcctcaatgtaattattaaaaattctcaagtcacagctaaacttactaattctgattttagtgtagcccctaaattaaaaatggcttccatatgccactctgtaccccaaagagagttctcatgaaatattctccagaatgtattcattatcaagaaaatgtcaatcgtcacttcctcgttttaactcagctgaaacaccaggacccaatagagagggcaagctgagcatctgtatttccagataaaagttgttattgatgtataaactcgttgcgtgattagtgatgttggaagcattttagcacaaaacagccttgtgtcttagatgatatctgtaaccagtttctgaatcccgttggataaaactgtattgtgatatctatttgatgttaataaagttattgcataca

SEQ ID NO: 21090 - DNA, 1296 bp, Homo sapiens
  misc_feature 1..1296: note = ENST00000498449
  source 1..1296: mol_type = unassigned DNA
aagtgtgggagctcaccatggtggcagccacctccccaccaagcaggcagcgttcaccagaggggagtatcaggttcctgtactcagctgtgggttgtcactgtctaataatatgaccgttttgccatctctctgcaaatgaggctgaagctgctatctgattggtataacatctcactttccctctgcattgattttcttcttctcctcctttgcttcataaaaagagggacaagtggctggtgctgtggacagagaagctttatttttagtatgagacaacctctattttctttcaggagagggaagttggattatcaattcttttgtaaatgtgtatggtgatatttgctccgctttttgcaatctttgcatttgcaacatgcggtggctattctggaggcctgcggctgagtgtggactgcgtcaacaagacagaaagtaacctcagcatcgacatagcgtttgcctacccattcaggacttcattgtcactgtagtcttttcgttcttgtggttggtgggttcatcagcttgggcaaaaggactgtctgacgtcaaagttgcaacggatcccaaggaagtattgctactaatgtcagcttgcaaacagccatccaacaaatgcatggctatccacagccctgttatgtcaagcttaaacacttctgtggtctttggattcttgaactttattctctgggctggaaacatatggtttgttttcaaggagaccggctggcattcttcgggacagagatatctttcagatccaatggagaagcactccagcagctataatcaaggtggttacaaccaagacagctatggatcaagcagtgggtacagtcagcaggcgagtttggggccaacctcagatgagtttggccaacagcctactggccccacttcctttaccaatcagatttaacagagtagcatttgcattcttctgcagtcgcctcaccatcttccatttcagtggcagaagaattttttaagggtttcaatcaattattaatgcagagagtattgaatgtaaatcagagctctctagtcttcattaaggcagcaagtcctgggttgtgaaaaatgatacttagagatgaggcgacatgaggagatatattattcatcatagatggctaattggagagtaccttgttatatatacagatactttcatggtcattttgtatgtatgttaaagtagtagaagtattttgtagcttaaagtctctagtatgtaatatgcataaagtaaatcaaatagcgttgagttttcttatgcatttt

SEQ ID NO: 21091 - DNA, 527 bp, Homo sapiens
  misc_feature 1..527: note = ENST00000472899
  source 1..527: mol_type = unassigned DNA
ttcttcttctcctcctttgcttcataaaaagagggacaagtggctggtgctgtggacagagaagctttatttttagtatgagacaacctctattttctttcaggagagggaagttggattatcaattcttttgtaaatgtgtatggtgatatttgctccgaaagggtttctcaaacgttttttctctggatctcttcaaaaagctttttgcaatctttgcatttgcaacatgcggtggctattctggaggcctgcggctgagtgtggactgcgtcaacaagacagaaagtaacctcagcatcgacatagcgtttgcctacccattcaggttgcaccaggtgacgtttgaggtgcccacctgcgagggaaaggaacggcagaagctggcattgattggtgactcctcgtcttcagcagagttcttcgtcactgttgctgtcttcgccttcctctactctttggctgccactgtcgtttacattttcttccagaacaaataccgggaaaacaaccggggcccactcatt

SEQ ID NO: 21092 - DNA, 2436 bp, Homo sapiens
  misc_feature 1..2436: note = ENST00000479198
  source 1..2436: mol_type = unassigned DNA
gcttcataaaaagagggacaagtggctggtgctgtggacagagaagctttatttttagtatgagacaacctctattttctttcaggagagggaagttggattatcaattcttttgtaaatgtgtatggtgatatttgctccgctttttgcaatctttgcatttgcaacatgcggtggctattctggaggcctgcggctgagtgtggactgcgtcaacaagacagaaagtaacctcagcatcgacatagcgtttgcctacccattcaggttgcaccaggtgacgtttgaggtgcccacctgcgagggaaaggaacggcagaagctggcattgattggtgactcctcgtcttcagcagagttcttcgtcactgttgctgtcttcgccttcctctactctttggctgccactgtcgtttacattttcttccagaacaaataccgggaaaacaaccggggcccactcattgacttcattgtcactgtagtcttttcgttcttgtggttggtgggttcatcagcttgggcaaaaggactgtctgacgtcaaagttgcaacggatcccaaggaagtattgctactaatgtcagcttgcaaacagccatccaacaaatgcatggctatccacagccctgttatgtcaagcttaaacacttctgtgctttctgaaattcaatctgcgaaggcacttaagaagagagaaagggttgctactctgactggactgtgatttctgctttggtctttggattcttgaactttattctctgggctggaaacatatggtttgttttcaaggagaccggctggcattcttcgggacagagatatctttcagatccaatggagaagcactccagcagctataatcaaggtggttacaaccaagacagctatggatcaagcagtgggtacagtcagcaggcgagtttggggccaacctcagatgagtttggccaacagcctactggccccacttcctttaccaatcagatttaacagagtagcatttgcattcttctgcagtcgcctcaccatcttccatttcagtggcagaagaattttttaagggtttcaatcaattattaatgcagagagtattgaatgtaaatcagagctctctagtcttcattaaggcagcaagtcctgggttgtgaaaaatgatacttagagatgaggcgacatgaggagatatattattcatcatagatggctaattggagagtaccttgttatatatacagatactttcatggtcattttgtatgtatgttaaagtagtagaagtattttgtagcttaaagtctctagtatgtaatatgcataaagtaaatcaaatagcgttgagttttcttatgcattttgatgtgaaagatgttataataatttctagaagacaatttggtgtatcacaacatgcatgtcttatttttttttagttttaagtcctataggactatgagtctctaagttatttgtttcagaaaattattctttttttatgtgataaatcatatgatttaagtgcatgaataagcattttcccacacaatgaacatttgaactgtgtttatgaaaattttctggtttgcaccatgaatttgtcaaatggatatttataggaatatattcactactttgtatactttgcaaatttgtctctctggctttacccaagttctgaatgcattgtaattaaaatttaagtttttcttttcccccattagtaaacatttagtgctacatatgataactgcccaatatttattctatttacttagctaaatatttgcattcttgtaaccttctatggtgttttgtggctcttatcttgtggaccataaataacacggcccaataactctttgtgtttatggagtgttgttttcttagaataatggagatgcagatatagataccatagtcaaggtaccgccttgctgaagtatttatttataaagaatattctgtagaacctctactaccagctatatttttaaatcctgtttatttgtaaagctaatatgctcctcaatgtaattattaaaaattctcaagtcacagctaaacttactaattctgattttagtgtagcccctaaattaaaaatggcttccatatgccactctgtaccccaaagagagttctcatgaaatattctccagaatgtattcattatcaagaaaatgtcaatcgtcacttcctcgttttaactcagctgaaacaccaggacccaatagagagggcaagctgagcatctgtatttccagataaaagttgttattgatgtataaactcgttgcgtgattagtgatgttggaagcattttagcacaaaacagccttgtgtcttagatgatatctgtaaccagtttctgaatcccgttggataaaactgtattgtgatatctatttgatgttaataaagttattgcataca

SEQ ID NO: 21093 - DNA, 805 bp, Homo sapiens
  misc_feature 1..805: note = ENST00000478744
  source 1..805: mol_type = unassigned DNA
ataaaaagagggacaagtggctggtgctgtggacagagaagctttatttttagtatgagacaacctctattttctttcaggagagggaagttggattatcaattcttttgtaaatgtgtatggtgatatttgctccgctttttgcaatctttgcatttgcaacatgcggtggctattctggaggcctgcggctgagtgtggactgcgtcaacaagacagaaagtaacctcagcatcgacatagcgtttgcctacccattcaggttgcaccaggtgacgtttgaggtgcccacctgcgagggaaaggaacggcagaagctggcattgattggtgactcctcgtcttcagcagagttcttcgtcactgttgctgtcttcgccttcctctactctttggctgccactgtcgtttacattttcttccagaacaaataccgggaaaacaaccggggcccactcattgcagaaggttcagagtgtgggttgaaatccagagctcaattcataatcaccatgcaagaggcccaagatcctgatagccaatgtgctacagaagttagagaggtggagataggacttcattgtcactgtagtcttttcgttcttgtggttggtgggttcatcagcttgggcaaaaggactgtctgacgtcaaagttgcaacggatcccaaggaagtattgctactaatgtcagcttgcaaacagccatccaacaaatgcatggctatccacagccctgttatgtcaagcttaaacacttctgtgctttctgaaattcaatctgcgaaggcacttaagaagagag

SEQ ID NO: 21094 - DNA, 2383 bp, Homo sapiens
  misc_feature 1..2383: note = ENST00000460711
  source 1..2383: mol_type = unassigned DNA
ataaaaagagggacaagtggctggtgctgtggacagagaagctttatttttagtatgagacaacctctattttctttcaggagagggaagttggattatcaattcttttgtaaatgtgtatggtgatatttgctccgcataatgaagaatgcaagagtcatttccatttactttttgcaatctttgcatttgcaacatgcggtggctattctggaggcctgcggctgagtgtggactgcgtcaacaagacagaaagtaacctcagcatcgacatagcgtttgcctacccattcaggttgcaccaggtgacgtttgaggtgcccacctgcgagggaaaggaacggcagaagctggcattgattggtgactcctcgtcttcagcagagttcttcgtcactgttgctgtcttcgccttcctctactctttggctgccactgtcgtttacattttcttccagaacaaataccgggaaaacaaccggggcccactcattgacttcattgtcactgtagtcttttcgttcttgtggttggtgggttcatcagcttgggcaaaaggactgtctgacgtcaaagttgcaacggatcccaaggaagtattgctactaatgtcagcttgcaaacagccatccaacaaatgcatggctatccacagccctgttatgtcaagcttaaacacttctgtggtctttggattcttgaactttattctctgggctggaaacatatggtttgttttcaaggagaccggctggcattcttcgggacagagatatctttcagatccaatggagaagcactccagcagctataatcaaggtggttacaaccaagacagctatggatcaagcagtgggtacagtcagcaggcgagtttggggccaacctcagatgagtttggccaacagcctactggccccacttcctttaccaatcagatttaacagagtagcatttgcattcttctgcagtcgcctcaccatcttccatttcagtggcagaagaattttttaagggtttcaatcaattattaatgcagagagtattgaatgtaaatcagagctctctagtcttcattaaggcagcaagtcctgggttgtgaaaaatgatacttagagatgaggcgacatgaggagatatattattcatcatagatggctaattggagagtaccttgttatatatacagatactttcatggtcattttgtatgtatgttaaagtagtagaagtattttgtagcttaaagtctctagtatgtaatatgcataaagtaaatcaaatagcgttgagttttcttatgcattttgatgtgaaagatgttataataatttctagaagacaatttggtgtatcacaacatgcatgtcttatttttttttagttttaagtcctataggactatgagtctctaagttatttgtttcagaaaattattctttttttatgtgataaatcatatgatttaagtgcatgaataagcattttcccacacaatgaacatttgaactgtgtttatgaaaattttctggtttgcaccatgaatttgtcaaatggatatttataggaatatattcactactttgtatactttgcaaatttgtctctctggctttacccaagttctgaatgcattgtaattaaaatttaagtttttcttttcccccattagtaaacatttagtgctacatatgataactgcccaatatttattctatttacttagctaaatatttgcattcttgtaaccttctatggtgttttgtggctcttatcttgtggaccataaataacacggcccaataactctttgtgtttatggagtgttgttttcttagaataatggagatgcagatatagataccatagtcaaggtaccgccttgctgaagtatttatttataaagaatattctgtagaacctctactaccagctatatttttaaatcctgtttatttgtaaagctaatatgctcctcaatgtaattattaaaaattctcaagtcacagctaaacttactaattctgattttagtgtagcccctaaattaaaaatggcttccatatgccactctgtaccccaaagagagttctcatgaaatattctccagaatgtattcattatcaagaaaatgtcaatcgtcacttcctcgttttaactcagctgaaacaccaggacccaatagagagggcaagctgagcatctgtatttccagataaaagttgttattgatgtataaactcgttgcgtgattagtgatgttggaagcattttagcacaaaacagccttgtgtcttagatgatatctgtaaccagtttctgaatcccgttggataaaactgtattgtgatatctatttgatgttaataaagttattgcatac

SEQ ID NO: 21095 - DNA, 829 bp, Homo sapiens
  misc_feature 1..829: note = ENST00000465156
  source 1..829: mol_type = unassigned DNA
aaagagggacaagtggctggtgctgtggacagagaagctttatttttagtatgagacaacctctattttctttcaggagagggaagttggattatcaattcttttgtaaatgtgtatggtgatatttgctccgctttttgcaatctttgcatttgcaacatgcggtggctattctggaggcctgcggctgagtgtggactgcgtcaacaagacagaaagtaacctcagcatcgacatagcgtttgcctacccattcaggttgcaccaggtgacgtttgaggtgcccacctgcgagggaaaggaacggcagaagctggcattgattggtgactcctcgtcttcagcagagttcttcgtcactgttgctgtcttcgccttcctctactctttggctgccactgtcgtttacattttcttccagaacaaataccgggaaaacaaccggggcccactcattgtctttggattcttgaactttattctctgggctggaaacatatggtttgttttcaaggagaccggctggcattcttcgggacagagatatctttcagatccaatggagaagcactccagcagctataatcaaggtggttacaaccaagacagctatggatcaagcagtgggtacagtcagcaggcgagtttggggccaacctcagatgagtttggccaacagcctactggccccacttcctttaccaatcagatttaacagagtagcatttgcattcttctgcagtcgcctcaccatcttccatttcagtggcagaagaattttttaagggtttcaatcaattattaatgcagagagtattgaatgtaaatc

SEQ ID NO: 21096 - DNA, 4461 bp, Homo sapiens
  misc_feature 1..4461: note = ENST00000228567
  source 1..4461: mol_type = unassigned DNA
actccatgccgggtctctagttccagcgcgcctcggctcgctcgcgcggcgggagagttggcgcaaacctcgcggcagccgcagcctcctcgcgcgcctctccttcccctacgccctccgctcccgccatggggccaacgtggggctcctaagagttgccggctctcagcggcgcaatctccagccaaagtcaccgcgggcggactatggcttagggcgccagaggggttagaggtacgggaagaggaaaagacggctaactgggaaaaaaagagaaaacgaaagaaaagccaaacgatgagtttccacaaggaggacggagtgaacagtctgtgccagaaggctctgcacatcgtcaccgagctgtgcttcgccggccaggtggagtgggagaagtgctcgggcatcttccctcgggacaggggcagccagggcggaagcagcacagatatttcagtcagcctgttagctgtcgttgtcagcttttgtggactggccttgttggttgtctcactttttgtcttctggaagctgtgttggccatgctggaaaagcaaacctgtgacttccaacatcactacgcttccacagagcatttcaagtgctcctactgaagtttttgagactgaagagaaaaaagaaattaaggaaaatgaaaagccagccgtaaaagctattgagcctgcaataaaaatcagccacacttcccctgacatcccagcagaagtccaaactgctttaaaagaacatttaattaaacatgcacgtgtgcaaagacaaattactgagcctacgtcatcaacccgccacagttccttccgaagacacctgccgaggcaaatgcaggtttccagtgttgattttagcatgggcacagaacctgttttacaacgaggagaaacaacaaccagcattgggaggataaagccagaactctacaaacagaaatcagttgactctgagggcaaccaaaacgaagatgtcaaaatctgtgggaaacttaactttaccctccagtatgattatgaaaatgaacttctagttgttaaaattatcaaagctttagatctccctgctaaagacttcacaggaacttctgacccttatgtgaagatgtatcttcttccagataggaaaaagaaatttcagacccgcgtgcacagaaagactttaaatcctctatttgatgaaacttttcaatttcctgtagcatatgatcaactaagcaaccgaaaactacatttcagtgtgtatgattttgacagattttctagacatgacatgattggggaagtgattcttgataatttgtttgaagtctctgatctctccagggaagccacagtatggaaagatattcactgtgctaccacagaaagtatagacctgggtgaaatcatgttttccctttgttacctaccgacggctgggcgtatgacattgacagtcattaagtgcagaaatctgaaggcgatggatattactggctcatcagatccttatgtcaaagtgtccctgatgtgtgaaggtcgaagattaaaaaagaggaaaacaactacaaagaaaaacactctaaaccctgtgtacaatgaggccattatttttgacatccctccagagaacgtggaccaggtcagcctctccattgcggtcatggattacgatagggtaggacacaatgaggtcataggagtgtgcagaacaggactggatgctgagggtcttgggcgagaccactggaatgaaatgctggcctatcatcgaaaaccaataacgcactggcacccattgctggagttacctggccgggcgaccagttttgatagtcaaggatcctgcccttctcctaaaccaccttccacaccataatgcctccaaaatgagaccatgatattaagcatctaggatcacgtgctcattgaatcagaaaaaaagtggaaggtttggtttcctcatttgaaatatatccgtactaatgaacaaacttgatgtgcacttttttatttgcttttattgttgattttttaactttgaacatcaatacattttacttgaatacatatagtccttagttgcataaggcattttatccttcgtatcaaatgcctgttagcacaaagagtgttttactatgttgtaattctttgcatatgaaatgtttttttaaacagttcatacttacctaaaattaaatatagtttatgctgctattgtataaagtagcacatgtcatatatgtatgggtttgattttgttatactgtgttcatttctagttgtgcaggtggttctgtataaacttaaaaggagattttgaacttaacttacacaacattaaatccttgcacaatcaaattaatgttacttatctgataatacttttctttcattctcagaaaattactttcttggtgaggtttggctctgctaaactcaaaacttgtctctcaagcttgttctttaaaatacatagacaaagctgtaaatttaaagaatcattttgaatataaatttaagaagtaatacttattggctgaaaaacggaggctgagccattgtggctaccattttacactgttttactgtaacattagctcaaatatctgttgcactgttcaactgatatttttaaaattctaataatcttcatctcaaatgtagcattagtatttctaagtgaacagaatcagaagttaatttttaagtgtttgtaaggttctcaagtactgtgacatgtatttttttgtgacgtgtattttttgtgacttgaagctatcatatagatcctgtatttctgatagaccatactaacagacaccaaaggaacaacaacactgtctgtgttcatcaccgtttagattgtacacagtaatggtgactcttaaacccagtcagaagctcatcattggaattcagtattttcttaaagaaaggatgatttattttcagcaacatatagaaatatactataaatattaataatacaacttcaatgcttaataataataaacaaattaattctaaaggcccaggcctccagtccttgcatgaaaggcatttgccttcataaggatcaaggttcaggccactacatgtaaaaactatgcaagtgtttttacaagacagaactttcttttaagtcaggtcaacatattttgtcccattttcaggccctgttggaaggtatctatactgaattaccccaaccttacttttaagatgtgtggtatagatagtatatatttcaagcttatttcaaaattggtggtttttttaaaaaaagaggcaagaaaataaaaacatatttacctggatgagaaaattttatcagcggttatgaaatttttatttttgtaaaatcccattatttctaaatattaaaaaaaagttttaaaagccttgaaattttgttgacatctcttatagtgatggcattactgttaattaagaggtaaatattttgcacattaccattttaaaggcaaacacagttctgcctcagatttttcaaaaatgcttataccaccctaaggaaaacaggtactcctagctaacattttctcattgaaaataatagaagaaagctgtttggaaacatttggctaccttgtcgagcctaaaagaattatttgctataggtaaaatgaaagatgacacttgcattttgaaattatttgttttattgggaaataaaacttttcaaataggaagacaaaaagttatactattaatagaatgacatttttggagacagttgttttattagtagatataactgcagcttaaagtaaattagcaattacgtttcctaagtgagtataattattttcacccaaaaacacatttttaaggactttttgttgattcttagaaactcgcttttctttactccctaaggagaaaaagccaatgcttgtgatgaaaaaatgtgaaccattggccaatcagaagactctaatatgggaattgtagattaaaataagttttaaaagaattttttaaatgtttccttgaagttagaataaactcatcatgcaaggatatgtgttaatcctgagaaagagatcagcgagaggaaattcaccacaactcatctttcatgtaattcaggaggtaggtttatgctcagattaataaggcatgattgttaaaaatgacagttcatattattaaaatgtaatcctaacaattttaatacaacacaccctcactctacacagcccacacattcatatacacataacttaccatctttctgcttgtaattgaagatgaaatattttcagtttcagtatttaaaataagatttgatattacaaatccccttatttgtgtgggacatcacattttaatgacagtactgacacattatgaagctgcagttcaggtatataatgaacatctaatttcagggacttcttcagggacttaccaaatatcagtctaggaaaaaaaagagtaa

SEQ ID NO: 21097 - DNA, 2433 bp, Homo sapiens
  misc_feature 1..2433: note = ENST00000539102
  source 1..2433: mol_type = unassigned DNA
gcaatctccagccaaagtcaccgcgggcggactatggcttagggcgccagaggggttagaggtacgggaagaggaaaagacggctaactgggaaaaaaagagaaaacgaaagaaaagccaaacgatgagtttccacaaggaggacggagtgaacagtctgtgccagaaggctctgcacatcgtcaccgagctgtgcttcgccggccaggtggagtgggagaagtgctcgggcatcttccctcgggacaggggcagccagggcggaagcagcacagatatttcagtcagcctgttagctgtcgttgtcagcttttgtggactggccttgttggttgtctcactttttgtcttctggaagctgtgttggccatgctggaaaagcaaacctgtgacttccaacatcactacgcttccacagagcatttcaagtgctcctactgaagtttttgagactgaagagaaaaaagaaattaaggaaaatgaaaagccagccgtaaaagctattgagcctgcaataaaaatcagccacacttcccctgacatcccagcagaagtccaaactgctttaaaagaacatttaattaaacatgcacgtgtgcaaagacaaattactgagcctacgtcatcaacccgtggttggggaaagaagaagaagaaaagaattttgagcacttgcaattttgtcactatgccaaggcacccttcctgataatccttcaccaacctgcatgaaagtttctgaagaccacagcatgttgaaaaaaagaaaatgtactcatttttggctgccacaactatatattctttttaaaaccacagttccttccgaagacacctgccgaggcaaatgcaggtttccagtgttgattttagcatgggcacagaacctgttttacaacgaggagaaacaacaaccagcattgggaggataaagccagaactctacaaacagaaatcagttgactctgagggcaaccaaaacgaagatgtcaaaatctgtgggaaacttaactttaccctccagtatgattatgaaaatgaacttctagttgttaaaattatcaaagctttagatctccctgctaaagacttcacaggaacttctgacccttatgtgaagatgtatcttcttccagataggaaaaagaaatttcagacccgcgtgcacagaaagactttaaatcctctatttgatgaaacttttcaatttcctgtagcatatgatcaactaagcaaccgaaaactacatttcagtgtgtatgattttgacagattttctagacatgacatgattggggaagtgattcttgataatttgtttgaagtctctgatctctccagggaagccacagtatggaaagatattcactgtgctaccacagaaagtatagacctgggtgaaatcatgttttccctttgttacctaccgacggctgggcgtatgacattgacagtcattaagtgcagaaatctgaaggcgatggatattactggctcatcagatccttatgtcaaagtgtccctgatgtgtgaaggtcgaagattaaaaaagaggaaaacaactacaaagaaaaacactctaaaccctgtgtacaatgaggccattatttttgacatccctccagagaacgtggaccaggtcagcctctccattgcggtcatggattacgatagggtaggacacaatgaggtcataggagtgtgcagaacaggactggatgctgagggtcttgggcgagaccactggaatgaaatgctggcctatcatcgaaaaccaataacgcactggcacccattgctggagttacctggccgggcgaccagttttgatagtcaaggatcctgcccttctcctaaaccaccttccacaccataatgcctccaaaatgagaccatgatattaagcatctaggatcacgtgctcattgaatcagaaaaaaagtggaaggtttggtttcctcatttgaaatatatccgtactaatgaacaaacttgatgtgcacttttttatttgcttttattgttgattttttaactttgaacatcaatacattttacttgaatacatatagtccttagttgcataaggcattttatccttcgtatcaaatgcctgttagcacaaagagtgttttactatgttgtaattctttgcatatgaaatgtttttttaaacagttcatacttacctaaaattaaatatagtttatgctgctattgtataaagtagcacatgtcatatatgtatgggtttgattttgttatactgtgttcatttctagttgtgcaggtggttctgtataaacttaaaaggagattttgaacttaacttacacaacattaaatccttgcacaatcaaattaatgttacttatctgataatacttttctttcattctcagaaaattactttcttggtgaggtttggctctg

SEQ ID NO: 21098 - DNA, 544 bp, Homo sapiens
  misc_feature 1..544: note = ENST00000567656
  source 1..544: mol_type = unassigned DNA
actgagcctacgtcatcaacccgagtttctgaagaccacagcatgttgaaaaaaagaaaatgtactcatttttggctgccacaactatatattctttttaaaagtaaatatgtatttagttagattaagaattagaaacaactcattataagaaaatgtggacctataacatgtttttaattttaatactatagtcactaaaatgtgaaattcatgagactcaaatatccaggtgaaaagaaaccagccatctgaatgattttgtctgtataatacttacatctagatagacccagatgactgataacattcacaattttctgtggaatattgaatttttttgctaatcatgtttctttagaattgtttttaattatgtgcttatgattgagagtacaaaatttcaaaagcatatgaaaattaacattggccagccacgtgttgtggctcacttgtgttatctcggcactttgggagactgaggtgagaggattgcgtgagcccagaagttcaagaccagcctgggcaacatagcaagactctg

SEQ ID NO: 21099 - DNA, 4534 bp, Homo sapiens
  misc_feature 1..4534: note = ENST00000393946
  source 1..4534: mol_type = unassigned DNA
gaagttctagaaaatgttaattgggggagctgtggctggcagagaaggaaaaaggaagctgaagggcacttgggctcataatggtctctccaaccctgatcctgtcctttatggacatttggcagcgctgctgccttgaggtgccttgcaatgctttatctttttgttaaagccacctctgttgcttcagccagcttgagcggttttctgttacttgctagtggttgggaaggcttagccgacgaagggaaaatgagtcaggtcctgaaggatgagcaagttacgggagtgggccgcatggtgagggagtggacttcctgatggggttaagggcgcctgaacacctgggaggcaagttgaggccaagacctggggtgatggagaggcagggtaggctacccagtgagtaggaggccgaaggaaccacagcagggctccagatctcctggcccagaggggctggtacgggaagcccagaagacactcatccctaaggggagcctgagactgaggaactctcatgccctgcgtcgggctcgtgggcgaagggccttcccagggactgcaccatggcctgtccccagccttacccaggggcctccctctcaggttctgaaggacccaggggtcacagctgtgtggggtgctccactgaacacttccttcaaactccttcaggctggagtgcagtggcgcgatctcagctccatgggagagagtttgaaaggatgaagagtttacatcctctggaaagaagcaaatagaaggcattccaggcaaaaggaactgcatcgagtaaaagcatggaggcaagaaagggcttggtgtgtttgagaaacagtgagtagggcatggtggtggcagaagcttaaagtgtatggcccgtggacagtgacagccggacaagaagctgaagtgacagaacaagttgaaccaaaggaattccagacctgggaaagtggagaaagaattttggggtcagagccgtttaagactttgcctagggcctgggtcttctttctcctaaaggcctcaacccacagcacgccacacaaatatgtcacataacacacaaacaaacatcatatttcacagtccaggaaatgaaatgaagacaaaagcgccccctgtgggtgaagtcacagtcactgcagcagacatcatggctgtggatgtggcagaataccatctgagcgtcatcaagagcccccctggctgggaggtgggtgtctatgctgcaggggccctggccctgctgggaatcgcagctgtgagcctgtggaagctctggacgtcggggagcttccccagcccctctccgttccccaattacgactacaggtaccttcagcagaagtacggcgagagctgcgcagaggccagggagaagagagtgcctgcctggaatgcccagcgggccagcacgcggggaccacccagccgcaaaggcagtctcagcattgaggacacctttgagagcatcagtgaactggggcctctggagctgatgggccgggagttggacctggccccctatgggaccctccggaagtcccagtcggccgactccctgaactccatctcctccgtgagcaacacctttgggcaggacttcacactgggccaggtggaggtgagcatggagtacgacactgcctcccacacgctgaacgtggcggtgatgcagggcaaggacctcctggagcgggaggaggccagcttcgagtcctgcttcatgcgcgtcagcctgctgccggacgagcagatcgtgggcatttctcggatccagagaaatgcctactccatcttctttgatgagaagttctccatccccctggatcccacagccctggaggagaagagcctgcggttttctgtatttggcatcgatgaggatgagcgcaacgtcagcacgggggtggtggagctgaagctttctgtgcttgacctcccgctgcagcccttcagtggctggctctatttacaggaccagaacaaggccgccgatgctgtgggggagatcctgctctccctcagctacctccccacagccgagcgcctcaccgtggtcgtggttaaggccaagaacctcatctggaccaacgacaagaccacagcggaccccttcgtcaaggtgtacctgctgcaggatgggaggaagatgagcaaaaagaagacagccgtgaagagggatgaccccaacccggtgttcaacgaagccatgatcttctcggtgccagccattgtgctccaggacctgtctctccgcgtgacggtggctgagagcagcagcgacggccgtggggacaacgtgggccatgtcatcattgggccgtcagccagtggcatgggaaccacacattggaaccagatgttggccacgctgcgcaggcccgtgtccatgtggcacgctgtccggcgaaactagcaaccagggcgggccagttgggcaatggagctgctggagcccggtacccactcagctctgtctgatgccctctccatagcccagctggagccgtgaacactggggtcccctggcagagtcctcatgacccatcctggtctctctgtccagattgcagcagaggagtgggcgtggctctgtgtccagggccccagggtctgctcctgctgaggaccagctgtggctgggccaggacagaggactcaaccctgctcctcccggtaggccagctgccgagctgggctatgttctggaacccagtgaatcttgggggccaggcactgtgctaggcaccagcaggggtaacacgaagaagacccggcccttagggcatcaggaagactagctcccctgccccggaggatctgctcagtgctgatggcagcccagctgtgtggactcagggggctctgagggctagggaaacaggaagggcctctttgacaaggtaggagctgtgcttggaggggcaggaaaagaactgagcatgtcgcaggcagcgggcccagcctgagcaatggcaggatgtgaacttccccatcgcaaatgcagttctcagcccactgcagtggatacaaggaagggcctttctcggggccggagaagagaccaagagaccaggcccgggcagcagcctaccggccacgtggaacactggctccggagttattctctgtcaaatctactccccggacctcaaccatggcaagaaccagaggtccaaagaggcccagacccaggtccttgtgctcagtcctgcgcaaaccaggcccagaccctgcaagcatttgttgatgcccttgcaggcccactgggagaaagatgcctcaggcaggtctcagcctgggggtggcaggggtggggcagagagaatactgacagcagaggtcttggtgggctgcacgtgcctgcgaagatgtggtggacaaggaggctctcgggctgggccttggaggggtggcagcggaaggacagcccaggtggctgaggcctgatgggaagccggggaaggccagggtggaagggcggcttgagggacgccaggagaagactgaatgccaggctaggaaggaggcggctctcgatcacggggtgggtgcccccgacaccgggtctcctagcttgagttccctagaagcgaaatctgagagggggattctggggcaagtagtttcttgcgggtgagtgttctcagagaaacttaccagatcaagaaagggagctcaggctggatggaggaagccacgcaagtgtggcttcaagatccatcgccttggcctgatcgctgtgggggcaggggcctggagtacgaggggcaccctgggggctcccacccagaagcagaggggctgggctgttgcacctctactggcatcagtctttggttaccccccagccccagtaggaggagagcaggcagagcttgtcatccccagcctggtgtcccgcagtcccaggaagccgcttcttgccttcatggctgagtgctgggaagggctgagctcacccaggccagcaggtggggtatcatctgctcggtggggccacccacaggtgacagcatggaccctcaggctggctgcccctgttccttggtccataactggtgagctatggagacccaggccaacaaattatccccagtgatatggggggaggaggggctagaacaagggcccaggggactggaggcaggatggtggctttccctacctgacacagccatggcccagccccaaggccaggctgtctaccctatggccacagcaggaggtcagcccagggccaggagacacatggctggacaaggctttgcagcctgggagaccccgactttctctaacccagtggctgtgcggtgcaggccactgactccccccctgccctctcccctctctccctccccctaactgcatgacatgttaactgtgtgcccaggacagccgtggtggggaccgggtatgccaactggaatgattctagaaccaaaataaagttggggcaggaagagggggcttccagggagccctgctcggccctgaatcaccttcgtctcttctctaggaa

SEQ ID NO: 21100 - DNA, 1678 bp, Homo sapiens
  misc_feature 1..1678: note = ENST00000525457
  source 1..1678: mol_type = unassigned DNA
atgtaaaaaatggagtcaccacgaccagattaggccacggtgaggactgagatgatgttgtaaggcaccagcacagagctgacctacagctcaatcgtggtgggagggagtaattatccattcagaaaaggggaaactttccgctgcgcctcctgtcgctgttttccttggctcccggaggtgcgcagtatcgggtccgtttttaagtcacagtcactgcagcagacatcatggctgtggatgtggcagaataccatctgagcgtcatcaagagcccccctggctgggaggtgggtgtctatgctgcaggggccctggccctgctgggaatcgcagctgtgagcctgtggaagctctggacgtcggggagcttccccagcccctctccgttccccaattacgactacaggtaccttcagcagaagtacggcgagagctgcgcagaggccagggagaagagagtgcctgcctggaatgcccagcgggccagcacgcggggaccacccagccgcaaaggcagtctcagcattgaggacacctttgagagcatcagtgaactggggcctctggagctgatgggccgggagttggacctggccccctatgggaccctccggaagtcccagtcggccgactccctgaactccatctcctccgtgagcaacacctttgggcaggacttcacactgggccaggtggaggtgagcatggagtacgacactgcctcccacacgctgaacgtggcggtgatgcagggcaaggacctcctggagcgggaggaggccagcttcgagtcctgcttcatgcgcgtcagcctgctgccggacgagcagatcgtgggcatttctcggatccagagaaatgcctactccatcttctttgatgagaagttctccatccccctggatcccacagccctggaggagaagagcctgcggttttctgtatttggcatcgatgaggatgagcgcaacgtcagcacgggggtggtggagctgaagctttctgtgcttgacctcccgctgcagcccttcagtggctggctctatttacaggaccagaacaaggccgccgatgctgtgggggagatcctgctctccctcagctacctccccacagccgagcgcctcaccgtggtcgtggttaaggccaagaacctcatctggaccaacgacaagaccacagcggaccccttcgtcaaggtgtacctgctgcaggatgggaggaagatgagcaaaaagaagacagccgtgaagagggatgaccccaacccggtgttcaacgaagccatgatcttctcggtgccagccattgtgctccaggacctgtctctccgcgtgacggtggctgagagcagcagcgacggccgtggggacaacgtgggccatgtcatcattgggccgtcagccagtggcatgggaaccacacattggaaccagatgttggccacgctgcgcaggcccgtgtccatgtggcacgctgtccggcgaaactagcaaccagggcgggccagttgggcaatggagctgctggagcccggtacccactcagctctgtctgatgccctctccatagcccagctggagccgtgaacactggggtcccctggcagagtcctcatgacccatcctggtctctctgtccagattgcagcagaggagtgggcgtggctctgtgt

SEQ ID NO: 21101 - DNA, 1661 bp, Homo sapiens
  misc_feature 1..1661: note = ENST00000527043
  source 1..1661: mol_type = unassigned DNA
actgcaggggtggcgttgccgccggcggccgggctaggcgcaggtgcgtgcgcgctgcgggaggcgggccggcagctggagcccagccggagcggcggcccctccgcggagcccggtcacagtcactgcagcagacatcatggctgtggatgtggcagaataccatctgagcgtcatcaagagcccccctggctgggaggtgggtgtctatgctgcaggggccctggccctgctgggaatcgcagctgtgagcctgtggaagctctggacgtcggggagcttccccagcccctctccgttccccaattacgactacaggtaccttcagcagaagtacggcgagagctgcgcagaggccagggagaagagagtgcctgcctggaatgcccagcgggccagcacgcggggaccacccagccgcaaaggcagtctcagcattgaggacacctttgagagcatcagtgaactggggcctctggagctgatgggccgggagttggacctggccccctatgggaccctccggaagtcccagtcggccgactccctgaactccatctcctccgtgagcaacacctttgggcaggacttcacactgggccaggtggaggtgagcatggagtacgacactgcctcccacacgctgaacgtggcggtgatgcagggcaaggacctcctggagcgggaggaggccagcttcgagtcctgcttcatgcgcgtcagcctgctgccggacgagcagatcgtgggcatttctcggatccagagaaatgcctactccatcttctttgatgagaagttctccatccccctggatcccacagccctggaggagaagagcctgcggttttctgtatttggcatcgatgaggatgagcgcaacgtcagcacgggggtggtggagctgaagctttctgtgcttgacctcccgctgcagcccttcagtggctggctctatttacaggaccagaacaaggccgccgatgctgtgggggagatcctgctctccctcagctacctccccacagccgagcgcctcaccgtggtcgtggttaaggccaagaacctcatctggaccaacgacaagaccacagcggaccccttcgtcaaggtgtacctgctgcaggatgggaggaagatgagcaaaaagaagacagccgtgaagagggatgaccccaacccggtgttcaacgaagccatgatcttctcggtgccagccattgtgctccaggacctgtctctccgcgtgacggtggctgagagcagcagcgacggccgtggggacaacgtgggccatgtcatcattgggccgtcagccagtggcatgggaaccacacattggaaccagatgttggccacgctgcgcaggcccgtgtccatgtggcacgctgtccggcgaaactagcaaccagggcgggccagttgggcaatggagctgctggagcccggtacccactcagctctgtctgatgccctctccatagcccagctggagccgtgaacactggggtcccctggcagagtcctcatgacccatcctggtctctctgtccagattgcagcagaggagtgggcgtggctctgtgtccagggccccagggtctgctcctgctgaggaccagctgtggctgggccaggacagaggactcaaccctgctcct

SEQ ID NO: 21102 - DNA, 527 bp, Homo sapiens
  misc_feature 1..527: note = ENST00000526281
  source 1..527: mol_type = unassigned DNA
aggtgcgtgcgcgctgcgggaggcgggccggcagctggagcccagccggagcggcggcccctccgcggagcccggtcacagtcactgcagcagacatcatggctgtggatgtggcagaataccatctgagcgagagtgcctgcctggaatgcccagcgggccagcacgcggggaccacccagccgcaaaggcagtctcagcattgaggacacctttgagagcatcagtgaactggggcctctggagctgatgggccgggagttggacctggccccctatgggaccctccggaagtcccagtcggccgactccctgaactccatctcctccgtgagcaacacctttgggcaggacttcacactgggccaggtggaggtgagcatggagtacgacactgcctcccacacgctgaacgtggcggtgatgcagggcaaggacctcctggagcgggaggaggccagcttcgagtcctgcttcatgcgcgtcagcctgctgccggacgagcagatcgtgggcatttctcgggt

SEQ ID NO: 21103 - DNA, 6028 bp, Homo sapiens
  misc_feature 1..6028: note = ENST00000531392
  source 1..6028: mol_type = unassigned DNA
tttaatgggaaactctccccgcacacacacacactttttttttgaggcacagtctcactatgttgtccagactggttttgaactcctgggctcaagagatcctcccacaccagcctccccagtagctgggactacaggcatgacccactgcacccagctaaatttttcaattttaaaatgttggcaactcacttaaatgtaagacaaataaacacatctgtaggctggcagtgctgcccacactgcccagactaggggttagggggtctgtatgggccatcaccaggctgctaaccacagcaaccaatatgtgccaagcctgactacacgtaccttctcattccaccctcctggcagcctcacatctgctttacaggtggggaactgaggctctaagagactaagaaaattacccaaggccactgcagctagccaggggcaggtatgggagtcagagctgggtgcagctgactacaaaccctgtgctcaggatgacaccctctaggagcctcgacctctctcccagttctcttctccctccactcaggcaaatgagctctgccttcacagggcaccaggctggaacatatgtctggaggccaggggcggtggctcacgcctgtaatcctagcactttgggaggccaagatgggaggatcattgaggtcaggagttcaagaccatcctggccaacatgatgaaaccccgtctctactgaaaatacaaaaactagctgggcatggtggctcatgcctgtaatcccagctacttgggaggctgaggcaggagaatcacttgaacccaggaggcagaggttgcagtgagctgagatcgcgccattgcattcaagcctgggtgacacagtgaggctctgtctcaaaaaaaaaaaaaaaaaaaaaaaaaagaaggaacttctgtctggggtgtgcctagcagtcattcacaccctcactgaaatctcagctccctgggaaaggatgtcgtgttaaagggagaggaaagaacagacagcgtgggagtctggggtctgagctgggccagccatggaggtgatggggcccccgacagccagaggccagatgcagcttgaggctttgtcccgtaccacgcctgttgtgctgtggggtgtactttgccatgcataccttgctcgcgtgctgcgggcattggctgtcccagcttggccccactcttgcaaagtcagcttgtgccaggtaagcaggaaaaagccgatggcttatctgattcccggcaaggcagaagcaggctgggaggtgcgtgtgtgtacattagcatgtgtttcagcgtatccagaccagcttccgccaggagctaggaccaccttgggcaggtacatggtgacccatttgacctgcagattcttaggaaactttttggaaaccatatgcccacttgcagtgagacacagtggttaggagcatggagccagttggcctgggttgaacagtttattagctgtgtggcctggggcaaattacgccctgggactctcacccgcaaaccagagataataatagtacctacctcatggggctgttaggcaaattaaatgaggtcagataaatgcaaagtgcttagaatggcgcttgatgtgtaagaagggctcgacaaggttctctattactatcattatctccagcccaggcccaggaatgagcttccactctagtcaggatgggtgaagcccttcctggcttagcaccacccttccatcaccatgacaacgcacatctccttgtgggagtgggggcagcatcaggagaactggaagccaggagctggctgtgcaccttatctgacctgcttctagaggctcctgggcacctccaggacttaagggggtagactaggacttatggcaccccaaatgtgctggataaccctgactggagcatggcaccgaagcttcttgactccaaagccacagactggggagaaccccggaattcctgaaaatgtggagggccttagctttaccctctgattcgaccccagtcccaaagggaacctacaggatgctccgaggggttgggaattggtgggtcacactccccaaggactttttatactgcgtctgaatggtgtttgcatttttttgcaaattggttgctacctttaaaactcaggaaatggcacataaaaaattcaggtatctggcttttctttaaagtgccagaagatcaagccacggtggttggcattcctgctggggcaaaaatgcagctgcccttgggccaggccatcactctgcagttcttacctccccttccccttgccctaccaccctgcaccaggcctgcaggcttaccatgtgtaaccacctctctgaactacaagggaatccagaaattggggtgggcattatcctggccctcggtgcccttgacctgagatcagtgcagcccatcccaaattcctttttccaggactcccacatacacccacttagaacacatctgtgagccagatttacttcttagcacactaataaaacaatgagcagtcacctaggttcaggtaatgggttgtacgagctcccagacctttctagaacaacttaagcctcagtcattcctaaaagctgggggtggaggatggggtggggaagaaaccatgccaagcagtgaaaggactgataatagaatattgcagacacgcagcctttccttcccaatcaaaatggaagcatttgaaggaaggctctggctcaagccaggggggccttgctctaatgagtcacctactgcgtcgccgctggtcagcctgatgttgttaggatggaaatgagctggggttgccagatttggcaaatacaaaaacaggacacccaggagcattgatgttttggatgaacaatggaaaagattttggcgtaaatatgtcctgtggaatatttgggacacacatattaaaaacgtatttgaaatttggccaggcgctgtggctcacacctgtaatctcagcactttgggagaccaaggctggtggatcacctgaggccaggagttcgatatcagcctggccaacatggtgaaaccgcatctctacaaaaaatacaaaaattagccgggtggggtggcacatgcctgtcatcccagctacttgggaggctgaggcaggagatcacttgaacccaggggcagaggctgcagtgagccgagatcgcgccactgcactctagcctgggcaacaaagagagactccatctgaaaaaacaaaacaaaacaaaacaaaatctgaaattcacatgccactgggcatcctgtgttttatctggcaatcctgagaagagtcttagaatgcttgaaaagagctttaaacatcatttcttaaaatgccaagcctccctttggtggcactccccttatagctgagtgtaagctctggatgacaggcacgtgggtgccaggaggccaggacctaggagcgggacgctgactctctgcagccctctcctctcactctcttttcccttccagtcacagtcactgcagcagacatcatggctgtggatgtggcagaataccatctgagcgggtccccggggagaccctcatcctgctgcaccctggggatgagcctgtgactcggaatccactcaccgaggccttctgtggagactgtcaagtagccaagggaaaataagcccaggaaggtcaaggttagattcatggggcgttaaactcagagaccacccagtccagaggcagaggttatagtgagctgagatcacaccactgcactccagctttccagcctgggcaacagagtgagactccgtctcatcagaaaaaaaaagaggccacccagtccagggccatggctcccaccttgtcaccctttgcctcagcagggagatgggagctggctgggagatgcctcgagactccagacatactcctgcagccctccccatggacagcggatggggtcagagaagaaacataccagccgtcttttctccctttgttcctctcctcattcacagatgggagaagtgaggcttagagagtaacggggtcaggatgtgcactcaggtctcctgactcccagccccgtgctccccatcactctagcccctaccctaacgcagcccctggggagcccagggctgatctgaagggtgtgcccgggaatcacctttcccatcactttttcccaaaagtgagccagggagccgcacttttcaccctcaggctcacaggtcttgcccccctgcccccaccctgccccctacccgtatggccttgggcaagtggtgaaaccggaacttctacttacttatctgtaaaatgcaaaagatgaggcttgcctcagggctgttgggaagatttagagagctgatggttgtgcagcgcccagcatggtgcaaacgccactcttccagtggcagcgctttgcacacgctgttcccctgtcctggagtccttccctgcctctgccactgcctgcctgagtcctggcacctggtggtggggttataggtgcagatctggacccagtctgtctggaggcagatctctcctccgtccctcagcttcctcatctgtaaaatggggaaaacaatagaaccaacctcacaggattgccttgactccatgggttaatatacgtgacgtgcttagaacagggcctggcaaatcataaatagtaagtgcttcataaggggagctattcctcctcctcctcatcccactcgtttctggtcttcgcctagaccccacttccaatatcaccccaagactggtattccataaaatcaataaatgaatgcgaattgtcatttcatgtcaccttcctggggcttttccttctgtgcccccagccctgcccccttttctgccaccccgggcatgggctccacccttcagctcccaaagagcctcaggcacaggggagcctgaacctgctttgccacctggctgtgcccacagcctgcttagagaccttgggcctctggtcctgccctctagccaacccccggctactacccagccctgctgtgaccctgttcccaggactcccagaatacaccaagccttagcagggcggggcccgggagcctccatggatctctttgtcatgggcatacgtagcccacaggtgacattctgtcaacagcggcaggaggaaggagggtttcttcacagcccttccaccgtcgttacccattccttctgtttttccctggtctgcccagcccgtgactatgtgctgcgtgacttttgcgcacgtcacacgattgcgtgattagaccatgttggggattcatttttttcctctcttaacaatgccagaaatgtgtctctgcattgccacagtgccatcctaatgacctcaattgtcattctcgaaggccagtgacatttcctcccaagacagagccaccagccctcactggccccctcggtgggaccttcaggctgtctccagatttctgctgttataaatacagcctcgatgactcatcccagacacaaaacctgttgggattttccctttagaataaattcaccagagtgggaccgctggatgggggatgttcttgtcatccgcattttccaaacggagtatgaagcccagaggtgctgggtgacttgcctggaagccaaggtaccggtgcccggctctgccgtttctcaccgctggccttgagtggagaaacagatgtgctcattacccttccttggtctcagttttcctcttttagaaagtagggccttggccaggggcggtggctcacgcctgtaatcccagcactttgggaggccaaggcgagtggatcacctgaggtcaggagtttgagaccagcctggccaatatggtggaaccccatctctactagaaatacaaaaaattagctgggcatggtggtggacgcctgtaattccagctactcgggaggctgaggcaggagaatcgcttgaaccggggaggcagaggttgcagtgagccgaaatcgtgccattgcactccagcctgggcaacaagagtgaaactccatctc

SEQ ID NO: 21104 - DNA, 593 bp, Homo sapiens
  misc_feature 1..593: note = ENST00000533427
  source 1..593: mol_type = unassigned DNA
attcacaccctcactgaaatctcagctccctgggaaaggatgtcgtgttaaagggagaggaaagaacagacagcgtgggagtctggggtctgagctgggccagccatggaggtgatggggcccccgacagccagaggccagatgcagcttgaggctttgtcccgtaccacgcctgttgtgctgtggggtgtactttgccatgcataccttgctcgcgtgctgcgggcattggctgtcccagcttggccccactcttgcaaagtcagcttgtgccagtcacagtcactgcagcagacatcatggctgtggatgtggcagaataccatctgagcgtcatcaagagcccccctggctgggaggtgggtgtctatgctgcaggggccctggccctgctgggaatcgcagctgtgagcctgtggaagctctggacgtcggggagcttccccagcccctctccgttccccaattacgactacaggtaccttcagcagaagtacggcgagagctgcgcagaggccagggagaagagagtgcctgcctggaatgcccagcgggccagcacgcggggaccacccagccgcaaaggcagtctc

SEQ ID NO: 21105 - DNA, 519 bp, Homo sapiens
  misc_feature 1..519: note = ENST00000525149
  source 1..519: mol_type = unassigned DNA
ctcactctcttttcccttccagtcacagtcactgcagcagacatcatggctgtggatgtggcagaataccatctgagcgggtccccggggagaccctcatcctgctgcaccctggggatgagcctgtgactcggaatccactcaccgaggccttctgtggagactgtcaagtagccaagggaaaataagcccaggaaggtcaagtcatcaagagcccccctggctgggaggtgggtgtctatgctgcaggggccctggccctgctgggaatcgcagctgtgagcctgtggaagctctggacgtcggggagcttccccagcccctctccgttccccaattacgactacaggtaccttcagcagaagtacggcgagagctgcgcagaggccagggagaagagagtgcctgcctggaatgcccagcgggccagcacgcggggaccacccagccgcaaaggcagtctcagcattgaggacacctttgagagcatcagtgaactggggcctctggagctgatgg

SEQ ID NO: 21106 - DNA, 2997 bp, Homo sapiens
  misc_feature 1..2997: note = ENST00000367019
  source 1..2997: mol_type = unassigned DNA
ccctctcgctggcggactcagcgcgtcctccgccagccctcgcgtctgctgcccccgccatccagttggtgcggtccatggcgagcgcatcatggcgattgaaggtggagagagaacctgtggagtacatgaacttatctgtattagaaaagtatctccagaggcagttggatttttgtcagctgttggggtgtttattatcttgatgctgctcctttttctctatattaataagaagttctgttttgaaaatgttggcgggtttccagatcttggttcagaatacagtacaaggaagaattcacaagataaaatttataattcctacatggacaaagatgagcatggttcatcctctgaaagtgaagatgaagcgctgggtaaatatcatgaggccttatccagaacacacaattccagactaccactggcagattctagacaaaggaactatgcttgggaaacaaggcagaaatacagtcctctatcggcagagtatgatggatacagtagtgaagcatcaatagatgaaggaaactgcattcagagaatgagaagaacacccccgctggatgaattgcagccaccaccatatcaggatgacagtggttctccccatctgtcatgtacaccctcagaaattggggacagtaaatgtgaattttcccactgcagcaacagtccaagatgctcatataacaagtgcccaagtgaaggaagcacaggtcatgaaatagaaagttttcataataaaggatatgaagaagatgttccaagtgacagcactgcagtcctgagccctgaagatatgtcagctcaaggatcatcttcgcagcttcctaaaccttttgatcctgagccagaagctaaatatggcacactggatgtgacttttgactatgactcacaagaacagaagcttctggtaacagtgacagctgtcacagacatcccaacatataacaggacaggtggcaactcatggcaagtacaccttgttcttctacctataaagaaacagagagcaaaaaccagcatccagagaggaccatgccctgtcttcacagaaacatttaaatttaatcatgttgaatctgagatgattggaaattatgcagttcggtttagactgtatggtgtacatcgcatgaaaaaagaaaagattgtgggggaaaagattttttatttaacaaaattgaatcttcaagggaaaatgtcattgcctgtgatattggaaccttcttacaatcattctggctgtgactcccaaatgagcgtgtcagaaatgtcgtgtagtgaaagtacatcctcatgtcagtctcttgaacatggctcagttccagaaattcttattggcctgctttataatgccacaactggaagactatcagcagaagtgataaaaggcagccacttcaaaaatttggcagcaaacagaccacccaatggactgttctgttgtctaaaacacttgataggtggacaggtttatataatccgagatacatatgttaagttaactctactgaattccatgggtcaagagatgtccaaatgcaagacatccatccgcagagggcagccaaatccagtatataaggaaacttttgtctttcaagtggccctatttcagctttctgatgtgacactcatactgtctgtgtataacaaacgcagcatgaaaagaaaagagatgataggctggatttctttaggtctcaacagctctggagaagaagaactcaatcactggactgaaatgaaagagtcaaaaggacagcaagtatgtagatggcatgcgttgctagagtcatgatgaatagaataagcaagcagttaccatcaaaggcagcatatttccaattccaacattactgtttctaccaagtcccattagaagagctgttctttgaagaatcatattcaaccttctaccaaaatgctttaagttctatggaaagaacgtctcatactgacataaatgaagaaaatatgtgtatctagtagagcttgtttaggaaactgagaaacgtacactatcattgctaaactaacagtcctccagaaatttaataagatgtttttgatttgaagttaattttaatttagcaaaagagccagtcattttatgaaaaatcaaaattataagtgattttaaaaaccagaattttagttgcaatacaattttaatatcaccctacatattatttataaaacatagtttgactggccagtccctggtgtttgtaatgttctttaatatgaaaaagtagttctccaactctatcataagtcatatctaatggtgaagggtttcagtcacattgaaaattgttttatttcaggcatgttccctttgtgcacttaggttcattgtgcctcagttcctctcaaaagcactaaatctaagtgcaaacaagtattcattttcatacaggaatttttttaatatgttatttttttaaaagttcatttttcatttgcctccgctttcgcctgatccaaagagaccaagtcactgtactggtcccttgcaagtcttctagacaggttgtactgtagaactacgtaactttctgttgaaagcacttcctgtattcttgtattccaatgtaggaagctaatagagcaggactttactttcaaatttctttcagtgattgactcttcaaaattgcagtagtgtgaaaatacattttttacaaactgaaaatacagtagataagctgtcgaaaatggaaaacaattcaattttaattttctgctctgagtatttagtaaccaacactgcgtaaagcaggtagcattcaaaataagaaactgttctctctctaaatcttcactcttacttcaatttatatttgtgatatgaagactatccagttctcagtttgaattggaacatcatgttaaaaacagttatgagattccttatgaagtttctagtaacttgtaactagactttatgaaattaacagataaagttcttcaacgtga

SEQ ID NO: 21107 - DNA, 13567 bp, Homo sapiens
  misc_feature 1..13567: note = ENST00000637265
  source 1..13567: mol_type = unassigned DNA
cggactcagcgcgtcctccgccagccctcgcgtctgctgcccccgccatccagttggtgcggtccatggcgagcgcatcatggcgattgaaggtggagagagaacctgtggagtacatgaacttatctgtattagaaaagtatctccagaggcagttggatttttgtcagctgttggggtgtttattatcttgatgctgctcctttttctctatattaataagaagttctgttttgaaaatgttggcgggtttccagatcttggttcagaatacagtacaaggaagaattcacaagataaaatttgtgtagaataaaaaaccaatagtatttgagggaaaaatattgtcttgctgctgttataatagctgtggagtgagaaaaaatgtcataacgtttaaaccaagtggtttgattttttttttccggaagaatctttacttcaacatatttctttcaatgcataatgtatttacagaaagattaaaagctacaatgtgaattgctaatattgagctgacgaatagcaacatttaagtaaatgttaaattcaagttccaaagtggttgatattttcagaagagaaaattccattattgcaccttttaggaacaaggaattagaaaatggcatttttcagaaatttccaacagaatctgccttcagtgtcctctctagtagacacaatcagtagtgctgtagaggatttgaccactgctgttggggaggtcagctatgctttaactgactcagttgctgagcaggtaacaagtatgatgagtggctttcgcccagaagaggaaagctctgtagcagaagaagctgtagacacttctaaacaaaaaaatgccgggttaacagaagtctccaaaaacactaattgtcagaaaacacaagccaatttagagcatagagcaaagcaaataaatacttgtaaaacttcactaaagcaagatcaaggaatacatgaagaaagagtatttaaacatgttaatgataggcaacaaactctatcagaatatcaagacactggtaatactggtgattcttctttgaaaggctacatgaataatggtgggatatcagttatcagacagaatacaagggctggatctatttgtcaagaacttgaaagtactgacagatgtaaaacaattggagtaggaatttccaataatggtaagaatgatttaaaggaggtaggatatcaagaaatgaaaggaaatcagaagaatgccaacggaataaacaaattgtatgagcaaaagaaatatgttggtacagataattgtaaaaaggaggaatattctaaatctcgacatgtatatttgggaagagatcaagagaatatggggcatttcaataaatgtaaacatcttcccgatttagggcattcagatcatttaaagaaagctgaaaaatgtgttaaaagtaaagcatccaaagggaatgagtgttcaggaaatgaatgttctttaaaagatattttgacaagcaataggcatatgacacagaaatctattataaaagaagacatacatccagcaccatcaactaattctaaagataagttatctgggaaaattgaagaacaaataaattcaacgaaatactgtaaagtgaacgaagacataaaaccaaagaaaactgaggccatttctgccaagaaaggaacagcaaagagtaaagatgaaaaatattctaagataataccagaaaaagataattcctacatggacaaagatgagcatggttcatcctctgaaagtgaagatgaagcgctgggtaaatatcatgaggccttatccagaacacacaattccagactaccactggcagattctagacaaaggaactatgcttgggaaacaaggcagaaatacagtcctctatcggcagagtatgatggatacagtagtgaagcatcaatagatgaaggaaactgcattcagagaatgagaagaacacccccgctggatgaattgcagccaccaccatatcaggatgacagtggttctccccatctgtcatgtacaccctcagaaattggggacagtaaatgtgaattttcccactgcagcaacagtccaagatgctcatataacaagtgcccaagtgaaggaagcacaggtcatgaaatagaaagttttcataataaaggatatgaagaagatgttccaagtgacagcactgcagtcctgagccctgaagatatgtcagctcaaggatcatcttcgcagcttcctaaaccttttgatcctgagccagaagctaaatatggcacactggatgtgacttttgactatgactcacaagaacagaagcttctggtaacagtgacagctgtcacagacatcccaacatataacaggacaggtggcaactcatggcaagtacaccttgttcttctacctataaagaaacagagagcaaaaaccagcatccagagaggaccatgccctgtcttcacagaaacatttaaatttaatcatgttgaatctgagatgattggaaattatgcagttcggtttagactgtatggtgtacatcgcatgaaaaaagaaaagattgtgggggaaaagattttttatttaacaaaattgaatcttcaagggaaaatgtcattgcctgtgatattggaaccttcttacaatcattctggctgtgactcccaaatgagcgtgtcagaaatgtcgtgtagtgaaagtacatcctcatgtcagtctcttgaacatggctcagttccagaaattcttattggcctgctttataatgccacaactggaagactatcagcagaagtgataaaaggcagccacttcaaaaatttggcagcaaacagaccacccaatggactgttctgttgtctaaaacacttgataggtggacaggtttatataatccgagatacatatgttaagttaactctactgaattccatgggtcaagagatgtccaaatgcaagacatccatccgcagagggcagccaaatccagtatataaggaaacttttgtctttcaagtggccctatttcagctttctgatgtgacactcatactgtctgtgtataacaaacgcagcatgaaaagaaaagagatgataggctggatttctttaggtctcaacagctctggagaagaagaactcaatcactggactgaaatgaaagagtcaaaaggacagcaagtatgtagatggcatgcgttgctagagtcatgatgaatagaataagcaagcagttaccatcaaaggcagcatatttccaattccaacattactgtttctaccaagtcccattagaagagctgttctttgaagaatcatattcaaccttctaccaaaatgctttaagttctatggaaagaacgtctcatactgacataaatgaagaaaatatgtgtatctagtagagcttgtttaggaaactgagaaacgtacactatcattgctaaactaacagtcctccagaaatttaataagatgtttttgatttgaagttaattttaatttagcaaaagagccagtcattttatgaaaaatcaaaattataagtgattttaaaaaccagaattttagttgcaatacaattttaatatcaccctacatattatttataaaacatagtttgactggccagtccctggtgtttgtaatgttctttaatatgaaaaagtagttctccaactctatcataagtcatatctaatggtgaagggtttcagtcacattgaaaattgttttatttcaggcatgttccctttgtgcacttaggttcattgtgcctcagttcctctcaaaagcactaaatctaagtgcaaacaagtattcattttcatacaggaatttttttaatatgttatttttttaaaagttcatttttcatttgcctccgctttcgcctgatccaaagagaccaagtcactgtactggtcccttgcaagtcttctagacaggttgtactgtagaactacgtaactttctgttgaaagcacttcctgtattcttgtattccaatgtaggaagctaatagagcaggactttactttcaaatttctttcagtgattgactcttcaaaattgcagtagtgtgaaaatacattttttacaaactgaaaatacagtagataagctgtcgaaaatggaaaacaattcaattttaattttctgctctgagtatttagtaaccaacactgcgtaaagcaggtagcattcaaaataagaaactgttctctctctaaatcttcactcttacttcaatttatatttgtgatatgaagactatccagttctcagtttgaattggaacatcatgttaaaaacagttatgagattccttatgaagtttctagtaacttgtaactagactttatgaaattaacagataaagttcttcaacgtgatgtcatcttgtgcctttcatgtaagttaaatttgctcatacagcttgaacgttgtatttgcaaaattaagccttcgatttttataaatgtaaagattcctcagaacagtgtcgcaagatctttatttcctctgaagtatgtaaaagttgtataatgtgctaactttttaatggcaaggcactttcatttgtttttatatttaggaactctaatcaggaatattataagctgttttctttttaattttgcttcttacctaatatatcattttatgcatatactttatcagagtatgttttatatatattaaaaatagtttcttttttctccttctcatttctagttaaaatagacaaaaacatactatttaccagttactaaaaagcagtatatcattgcttctagtcccaactaagtactatatattattgtaaactagaacttgttattaccataataacaaaacaatgcgtagatattacttcagcttggctgtactgaaaggccttaaaagaaacccaaaaagaccgtgaacttctgtatttttttagtttaaaaaatggcagctctatgcattcatacacatgaattataagaaaaaatacaaatgctatattggatgacatgaggtttgagaatgtgtgttacagggctgcattaaagggaaaaatccatcttttattgttacatcaatgagctttttccaggatttttcaaataaacaagtaagagttagaacctgaatcaaatggcaaaatatctcatttaagtgttttcagcaacagtatgaaaaaagacttgaagaggggatgtagattttactgagaaattggacttaggcatttgaagctataatgaactttttagactttgaaacaactgactgcattgctaacaactgttatcttcctaataaaaagagttatcagtcttatctgtaactgtaacagagcttagtgaaacacattagtaagaccagcttggtgctttcactcttagtgagaaaaagacctaactaattgttatttgttaaatctaccttttttcagactattcccagaattgtgtgtgtgatttgatacatccctagggatttatctggcataagtatcaaatccttcatggcttaaaaattaataaacagttttttaatatttctggaaagaccctacctccaccccagctgccaagtcctcaaagattataaattatctatatgagtgtatgtatctgtatacacacatgcaccattacacatacaacataaatatgtatatgtatattcatttgtaaaggcaaaggtgccctggctttttcagataactgaatagaaaaacatttcatacatttaggattatttttctcctctatgtatttactagatattatatttggtttgggttgctttctgctgctgttctccttcacacacagcaaaatatacatttgtttctgtagattgacacaacttataataattactcccaaaaagttgtctgttcttttagaaaaggattaaataaggctcaggggacccacttcactctactgaatctaatgtacgagacagtactactgcttctttgtgtgcttgaatttgcatgaaagcttaatagcaaaatcttctatctcagtaattatagcaaatagggacctactggtagggagcaggtgttggctcagaaacctgaaaaagacaacccactttcatacagttctattaaaatcccctaagttttctaataaaatgatatagtccaaatatggcaatcgactggcatttatgggagcctctaaacctggaattatggggtttatttttctcccaaatgagctgcaaaagataattattgctgcccagtaaacaaaatgtatgtcaaatcagtaaagaatttgtttagcataatattgccttatctttcagaagctttcttctatattcttgtgtcttcagtacaatccacttttgtttgaaatccatttgcatattatcttactgtgcatttagtgaattctcaataatgttgtatttgctgacaagaataataaattggaccacaattaaaaaaaaagaaaacccaatgagaaaataactacctgattaatatacacatgtttaaatgtaggacctggtaaagcagtttcatccaacctagcgaaaatgcccagggctgtttgttaaatcatttgcttgataccatcatcattttcatttcacttatcaagtgaatcagaagcataatcaataactgcaaagtaagatagtaccaataggagaaagaggtaaaagaattgagagtgtttgtcaatatgaagatgtgtggggatactgaatgatatcatagtctttccagtgaaagaaaaaataggctatgggaagatgtaaatttttgatggagtaagaacagtggtcaccaccaagtatttttcaagatccctctccagctatgaatagaaaggacacaaattcatttgcgtaaaattgccatttgcctacatagactagacaattcacagatttttcacaaagacagttattatatatatagttatttgagttatcactatattatttcacattgatagtttttatttctaattttgtttccattcactgtcctcagttcctctgtggcctacattgaaggtagctgtcagtattattattgtcaaccatatttaatattgaatacaagtttaagcatgctgcaaagcattttctaacgttaattttaaaacattgtctctgccctccaaagtgatggttaacagctataatttactaagatctagcacaataatttattacttgcttgattctcaaaacaatactgtgaggtaagtaatgttatcaacattttattgataaagaaactgcagcatgaagaggttaagcagactttcccaaggtcattcggtaagtaagtagtagaactgggattggaacccaggtgtaaattactctaaaacccatgctatgcatgttgcatttgcctccctgtttgaaaaaaaaactacttaggacattatatttatcaataatcccactcaccttgattgaatggcagaactaagggggaaaaaacagctggggaaagagaaaagactagaaaagaagatcagaaattttttttcttctcaggacacaagtggtggtacttttgtgtcattttgtagatgactttgatttgcaaagatttggaattgatttattctaccagtttagcctatacttatattccaaaagcatattaatcagttctgctccttgaccacttttaggaatccaaggtgttttaattgttacatgacccccttactactctatgaagggcataacctgtgtctagcccatatctcactcatatcagtggtgagacaaaagatttgtcttcctctgtcctctcattgcaatttatttatgttttattctcaattttattaagatttgtcaggaattacagctagtttattacatatgtctctcttccccctaggtaagtagtcaatgccttgttagtatctttctgtacccctttgcttatagtaggcagacagtaaatattgaattgaactaaattccctgtggaagaagccagtcacactattacatgagtcttagtttttatgaatcttgtgttatgtatggatttatttattccttcagttaatatatatttaagagtactagatatgtgccatgtgttgttgttccaagtgctacagatgcagagataataaattggtcgaagtctttgccctcatggggcctacattctaaggtaggaagatggccacagaatgggataatttcaggctagtataatgaagcattaagataggggcatgcatagagtaccgtgggatttagtagaagagtgcaacatggaattcaaaaaaatcttcctggaaaagataatccctgagttgggtcttaaagaacaaatacatgttagactcccatcaaacttgaggacacacgttctttccaagaacaaaatgtaaaataatggtttctaaactgtagtatccttaagaattattttgaaaatttaacttgggccaggcgtggtggcttacgcctgtaatcccaacactttgggaggctgaggtaggcagattacttgagctcaggagtttaagaccagcctgggcaacatagcaaaaccccatctctaccaaaaatttaaaaattagctgagcacggtggtgcatgcctgtggtcccagctactcaggaggcttaggtgggagaatcgctggagcctggcaagtcaaggctgcagtgagccaagatagcgccactgcacttcagcctgggtgacacagaagaccttgtagaaagggaggaagaaaggagggagagagagaggaagggaggaggagaagggaaggaaggaggagacgggaaagaatgaaggagaagggaaagaagggagggaaatttaacttgtattccaaaactccacctccagagattctacttcatttggcctggaagggagcccaataatctacattttattaagctctccaggaaattctgtctgagatctattgatatagaatattaagtgtattacatagtagtattcatgaaatgtttcagtgcctgtagatcagacctttaagtgtgatagtgatagtaatacagagattaagactaggattaatgttattcatctttttcttgtgcttccttaaaaaggaagatatttaatgaaaaaaattaatatttaataatgaatttctgtacattcacattcaacatacatttttcaaagtgtttcttggtataataaatatgttgattttatggcttccaaaaattcctttctatcactgttcaaatatttccttctaagttatctttacaatgatggatataaagtgaagaatggggaggtatttatcaagtaatttctttatcagtatcctaaatgaaataagactgacctttgagcaaatgtgtagtagcagccataggtgctggcatgtttgcattcttgcatacagtaagatttcttgcttccctttatcatcatctaaatggcttcattgtcatcacactcatcagatgaaatgcagtactggattcttctctaaaagcagtgattctgtgactgctgctctaaactctagttccttgattgttttgttcttaggatcctttgtttcaaatagcaagttaatacagcagcctcaggaccttctctttctctcagaataaatgctgtggataaggtacatctgagtttccatttcccctcatttcacatatagccatattttcttctctgatgtaatattttgtattaacacattttacattttgaagttttcttttcccccacaaagatatgtggttatcccacttaaaaatgagcttatttgaatatgtgaaataatgttgtcattgaattaagctgttttgtgactgctgatgtatcactgtgtttgatttggtgacagcttgaggtctggttaatataatcttaaggtaatcagcttgatagactggaattactagtttattatcaaaaaatgaatgtaaaaatattgctcttttctctccctgtttagactagtatgtgcctttttaaaaatactccctttcttcttccctgccttttttccccactcttattcatatacactcaaactagataccagagttagttcatcaaagctgaataatacctatcaaaaagtgataccctgacttttttctcttaatcacctgtactggaccatagggaggaccaaataggctttcttggggactacagaaagagcaaagcgtaatactctttaatcatagcatgtttgttgttgctgtttcggtggtggtggtggtggtggtggtggttgtgtacttaccttgaatagtgtgaagtatcctaaaattatgttgtgtgggctgggagcaggaaggaaactgattattcgtctaacaaaggtttggcataattttattgtaaaatttcaactgtttatgacatgaaaatttctaattaattataagaacaaagtcactgtggtggcaatagttgtacaagatgtttgacattatttctatgtcagtttgatagtctgtgttataaattgtcttattaggacccttcttcaccctcttctttattattctgattatcagtaaatccagtttgtactgttagacatttgagtttgtcttttaaatattgaagactattttaaaaagaaaaaccataacatctttctgtttattacattaacatgtgatctctcacctgacgatgtgtttaaaatgaattaatagataaaatataatactccgttatatactgaaaaaaattttcaaactttgtctatatattcagatattgctagcagttcatattaaatatgactattttgtttaatgagaaaataggaatttttccttatctctgagacttactgcttctctttgccattcacatctggttgaaggtggatggttttgaacctcgtaacgtcacttcactcgtcagtttctgagtgtgccaacctccttctgacggtttaattttcagtaacaatcaaaccatttattcctcaggggttggtcctcctagtgattcctgtccttaacccccattagtgttgatggaagtaatccataagcaccaataggagaaaaggcccataaaggatcagtatcccagaaccctgaaataggacggccgcttcagtacccaaatgtcattgcaattctaatggagtagaagccagcttcttggaagtgaagatttgagatcattatgtcatattctctccttttggtgtcctcccttctccctctagcttgcacattctttttattttaaattttacaggaagccttcttttaaaaacctggtttttaaaatttcacatgttgctgtaaccaggtgatttcaaaacccagaaaactgaagtacataccatacagtcataagaagtttgggggcttttttggtttttatgtttttggtgttttttttttttttttttttttttttttttgtagtgtggggagtggggaggaggaaaagggagaaatcgtgcttgttttggttttgggaagtctttttggataaatattgagaatatttatagtattctgtaattatgtgacatttgttgtgtgaggggagaccagagtagctgttgcacatacatcgactctcttaatattgaagcatatttaaacagttgtttgaagcagagctagaaattaatggtgatacttctaacagcattttgatgttataaatattactttaagtttatcaagagaaaaattccagtagtagcttgcgttataaaattaattgatttattatgtttctgtataattttattgaaattgcttttttgtggtgaatataatatagtggcaacgattttgaggaatctttaaagctgtttggaagagatggccagcctttggctagatttttactagaattttgaaataagaaagtgtataaatatgttttcagttaaattagccttgaggaagaatagttattatatgagttttaagggtcttgataaatgttgggacctactctaaaactcatgaggttcctcactgatcaatactcttgcattgtattttatttctcaaaataatgaaatttttatggaaaagctcaattagtggaatcttttattcaatattcccttactcttctttcttccttccttctttctttcctttcttccttccctccctccttccttcctagttctttcattttttcaggcaagaagcttccttaataatatagtttctacagagctttcttacttatttttctaataatggatataacagtgtgataaagtttaaatgctccgtgagcaaaactcttatcaaacaactgaagaaatacactgctgattaaccttttccttggtcttgaattgtctccagcatatttgctagtgactaaaccattaatggatcttattagtataaacacatgtctgtgtggttatcaacagtgttgtattattgtcacatttatttacatttttggtcaaaaatataaacatgcgtgtgtgaagcagtctgttttatagagtgagcatatatgtaatcgttttcatataattgaaaatgtgctgtgtgttgcattttattctcatgtcgacttttctactatgtatacaccgattgtctcggtgcctttttccttttgtataattgtattacatacagaaattgctgacctctgtgaaaacagtgtaaaaaaagttaaaattattattccgatgagattttaatggcagtttaattttccagagaataaattttgtgtgggttaaaagttatttttcttcacctttatgtaaaaaatctgtttacgttttagtactcacatggaatgggtaaacatctgacttcattgatgatgatacataaacatcagtcctaattcttgtcattgacaaataaatgttaatatgactgttacacaaaataaaataatgtcaattacataaggaaatatcaaatggatatatgtacatgttatttagatcttgggtttgaaaggaatctcatctaaatgtgctataaaatattactctcaaaaggtttgggtcatattattttctttaattgtaagtcaaatctggcttccaaagaaaatagacttacaaatgcaaacatttaaaaatattctcctttaaagttcatataaatcacaaattaaactaaatagctttaaaatgatctcagtatcttcagctggaatatgaactgttacctagtttgttctttcacttaatgtgaatttgttgtcattcatatcagtattgctatcctgtttaacaaaataattttctctttgccaatagtagtttgttgatttttaattctttttcattagctagttgtattgtttccctaagacctggagtttagatatttttcatatttcattaccttgtccattttacttccagcaacaaagatttataacaacagacttaacaagtactattttgcatatgaaaaagaatttaaacgtttggtgctctaaaactgaaagaaattaaagttgctgcatcatctaatctctgattgtctttgaatccttagttccataaattatccagagccttttttagttaacatttttaaagagggg

SEQ ID NO: 21108 - DNA, 2549 bp, Homo sapiens
  misc_feature 1..2549: note = ENST00000637945
  source 1..2549: mol_type = unassigned DNA
atggcgagcgcatcatggcgattgaaggtggagagagaacctgtggagtacatgaacttatctgtattagaaaagatagggtatttctctgtggccaggctggagtacagtggcaccatcttggctcactgcaacttccgcctcctgggttcaaacgattcttctgcctcagcatcccaagtaactgggactacagtatctccagaggcagttggatttttgtcagctgttggggtgtttattatcttgatgctgctcctttttctctatattaataagaagttctgttttgaaaatgttggcgggtttccagatcttggttcagaatacagtacaaggaagaattcacaagataaaatttataattcctacatggacaaagatgagcatggttcatcctctgaaagtgaagatgaagcgctgggtaaatatcatgaggccttatccagaacacacaattccagactaccactggcagattctagacaaaggaactatgcttgggaaacaaggcagaaatacagtcctctatcggcagagtatgatggatacagtagtgaagcatcaatagatgaaggaaactgcattcagagaatgagaagaacacccccgctggatgaattgcagccaccaccatatcaggatgacagtggttctccccatctgtcatgtacaccctcagaaattggggacagtaaatgtgaattttcccactgcagcaacagtccaagatgctcatataacaagtgcccaagtgaaggaagcacaggtcatgaaatagaaagttttcataataaaggatatgaagaagatgttccaagtgacagcactgcagtcctgagccctgaagatatgtcagctcaaggatcatcttcgcagcttcctaaaccttttgatcctgagccagaagctaaatatggcacactggatgtgacttttgactatgactcacaagaacagaagcttctggtaacagtgacagctgtcacagacatcccaacatataacaggacaggtggcaactcatggcaagtacaccttgttcttctacctataaagaaacagagagcaaaaaccagcatccagagaggaccatgccctgtcttcacagaaacatttaaatttaatcatgttgaatctgagatgattggaaattatgcagttcggtttagactgtatggtgtacatcgcatgaaaaaagaaaagattgtgggggaaaagattttttatttaacaaaattgaatcttcaagggaaaatgtcattgcctgtgatattggaaccttcttacaatcattctggctgtgactcccaaatgagcgtgtcagaaatgtcgtgtagtgaaagtacatcctcatgtcagtctcttgaacatggctcagttccagaaattcttattggcctgctttataatgccacaactggaagactatcagcagaagtgataaaaggcagccacttcaaaaatttggcagcaaacagaccacccaatggactgttctgttgtctaaaacacttgataggtggacaggtttatataatccgagatacatatgttaagttaactctactgaattccatgggtcaagagatgtccaaatgcaagacatccatccgcagagggcagccaaatccagtatataaggaaacttttgtctttcaagtggccctatttcagctttctgatgtgacactcatactgtctgtgtataacaaacgcagcatgaaaagaaaagagatgataggctggatttctttaggtctcaacagctctggagaagaagaactcaatcactggactgaaatgaaagagtcaaaaggacagcaagtatgtagatggcatgcgttgctagagtcatgatgaatagaataagcaagcagttaccatcaaaggcagcatatttccaattccaacattactgtttctaccaagtcccattagaagagctgttctttgaagaatcatattcaaccttctaccaaaatgctttaagttctatggaaagaacgtctcatactgacataaatgaagaaaatatgtgtatctagtagagcttgtttaggaaactgagaaacgtacactatcattgctaaactaacagtcctccagaaatttaataagatgtttttgatttgaagttaattttaatttagcaaaagagccagtcattttatgaaaaatcaaaattataagtgattttaaaaaccagaattttagttgcaatacaattttaatatcaccctacatattatttataaaacatagtttgactggccagtccctggtgtttgtaatgttctttaatatgaaaaagtagttctccaactctatcataagtcatatctaatggtgaagggtttcagtcacattgaaaattgttttatttcaggcatgttccctttgtgcacttaggttcattgtgcctcagttcctctcaaaagcactaaatctaagtgcaaacaagtattcattttcatacaggaatttttttaatatgttatttttttaaaagttcatttttcatttgcctccgctttcgcctgatccaa

SEQ ID NO: 21109 - DNA, 2966 bp, Homo sapiens
  misc_feature 1..2966: note = ENST00000472886
  source 1..2966: mol_type = unassigned DNA
atggcgagcgcatcatggcgattgaaggtggagagagaacctgtggagtacatgaacttatctgtattagaaaagtatctccagaggcagttggatttttgtcagctgttggggtgtttattatcttgatgctgctcctttttctctatattaataagaagttctgttttgaaaatgttggcgggtttccagatcttggttcagaatacagtacaaggaagaattcacaagataaaatttataattcctacatggacaaagatgagcatggttcatcctctgaaagtgaagatgaagcgctgggtaaatatcatgaggccttatccagaacacacaattccagactaccactggcagattctagacaaaggaactatgcttgggaaacaaggcagaaatacagtcctctatcggcagagtatgatggatacagtagtgaagcatcaatagatgaaggaaactgcattcagagaatgagaagaacacccccgctggatgaattgcagccaccaccatatcaggatgacagtggttctccccatctgtcatgtacaccctcagaaattggggacagtaaatgtgaattttcccactgcagcaacagtccaagatgctcatataacaagtgcccaagtgaaggaagcacaggtcatgaaatagaaagttttcataataaaggatatgaagaagatgttccaagtgacagcactgcagtcctgagccctgaagatatgtcagctcaaggatcatcttcgcagcttcctaaaccttttgatcctgagccagaagctaaatatggcacactggatgtgacttttgactatgactcacaagaacagaagcttctggtaacagtgacagctgtcacagacatcccaacatataacaggacaggtggcaactcatggcaagtacaccttgttcttctacctataaagaaacagagagcaaaaaccagcatccagagaggaccatgccctgtcttcacagaaacatttaaatttaatcatgttgaatctgagatgattggaaattatgcagttcggtttagactgtatggtgtacatcgcatgaaaaaagaaaagattgtgggggaaaagattttttatttaacaaaattgaatcttcaagggaaaatgtcattgcctgtgatattggaaccttcttacaatcattctggctgtgactcccaaatgagcgtgtcagaaatgtcgtgtagtgaaagtacatcctcatgtcagtctcttgaacatggctcagttccagaaattcttattggcctgctttataatgccacaactggaagactatcagcagaagtgataaaaggcagccacttcaaaaatttggcagcaaacagaccacccaatacatatgttaagttaactctactgaattccatgggtcaagagatgtccaaatgcaagacatccatccgcagagggcagccaaatccagtatataaggaaacttttgtctttcaagtggccctatttcagctttctgatgtgacactcatactgtctgtgtataacaaacgcagcatgaaaagaaaagagatgataggctggatttctttaggtctcaacagctctggagaagaagaactcaatcactggactgaaatgaaagagtcaaaaggacagcaagtatgtagatggcatgcgttgctagagtcatgatgaatagaataagcaagcagttaccatcaaaggcagcatatttccaattccaacattactgtttctaccaagtcccattagaagagctgttctttgaagaatcatattcaaccttctaccaaaatgctttaagttctatggaaagaacgtctcatactgacataaatgaagaaaatatgtgtatctagtagagcttgtttaggaaactgagaaacgtacactatcattgctaaactaacagtcctccagaaatttaataagatgtttttgatttgaagttaattttaatttagcaaaagagccagtcattttatgaaaaatcaaaattataagtgattttaaaaaccagaattttagttgcaatacaattttaatatcaccctacatattatttataaaacatagtttgactggccagtccctggtgtttgtaatgttctttaatatgaaaaagtagttctccaactctatcataagtcatatctaatggtgaagggtttcagtcacattgaaaattgttttatttcaggcatgttccctttgtgcacttaggttcattgtgcctcagttcctctcaaaagcactaaatctaagtgcaaacaagtattcattttcatacaggaatttttttaatatgttatttttttaaaagttcatttttcatttgcctccgctttcgcctgatccaaagagaccaagtcactgtactggtcccttgcaagtcttctagacaggttgtactgtagaactacgtaactttctgttgaaagcacttcctgtattcttgtattccaatgtaggaagctaatagagcaggactttactttcaaatttctttcagtgattgactcttcaaaattgcagtagtgtgaaaatacattttttacaaactgaaaatacagtagataagctgtcgaaaatggaaaacaattcaattttaattttctgctctgagtatttagtaaccaacactgcgtaaagcaggtagcattcaaaataagaaactgttctctctctaaatcttcactcttacttcaatttatatttgtgatatgaagactatccagttctcagtttgaattggaacatcatgttaaaaacagttatgagattccttatgaagtttctagtaacttgtaactagactttatgaaattaacagataaagttcttcaacgtgatgtcatcttgtgcctttcatgtaagttaaatttgctcatacagcttgaacgttgtatttgcaaaattaagccttcgatttttataaatgtaaagattcctcag

SEQ ID NO: 21110 - DNA, 11880 bp, Homo sapiens
  misc_feature 1..11880: note = ENST00000399639
  source 1..11880: mol_type = unassigned DNA
gcatcatggcgattgaaggtggagagagaacctgtggagtacatgaacttatctgtattagaaaagaatctggaatctgagtgcatgctgatctcccattgacttctgttctattactgtaccccatcagagagatgtgaggagttggttgaaattcaaatcgggaacatatccaaagaccacaacatcctttgacaccaacaactgtctatgcttccttagaaggagccacctgacaactgggtggttcaacaaagtggccccaggaaagtatctccagaggcagttggatttttgtcagctgttggggtgtttattatcttgatgctgctcctttttctctatattaataagaagttctgttttgaaaatgttggcgggtttccagatcttggttcagaatacagtacaaggaagaattcacaagataaaatttataattcctacatggacaaagatgagcatggttcatcctctgaaagtgaagatgaagcgctgggtaaatatcatgaggccttatccagaacacacaattccagactaccactggcagattctagacaaaggaactatgcttgggaaacaaggcagaaatacagtcctctatcggcagagtatgatggatacagtagtgaagcatcaatagatgaaggaaactgcattcagagaatgagaagaacacccccgctggatgaattgcagccaccaccatatcaggatgacagtggttctccccatctgtcatgtacaccctcagaaattggggacagtaaatgtgaattttcccactgcagcaacagtccaagatgctcatataacaagtgcccaagtgaaggaagcacaggtcatgaaatagaaagttttcataataaaggatatgaagaagatgttccaagtgacagcactgcagtcctgagccctgaagatatgtcagctcaaggatcatcttcgcagcttcctaaaccttttgatcctgagccagaagctaaatatggcacactggatgtgacttttgactatgactcacaagaacagaagcttctggtaacagtgacagctgtcacagacatcccaacatataacaggacaggtggcaactcatgggctgtgactcccaaatgagcgtgtcagaaatgtcgtgtagtgaaagtacatcctcatgtcagtctcttgaacatggctcagttccagaaattcttattggcctgctttataatgccacaactggaagactatcagcagaagtgataaaaggcagccacttcaaaaatttggcagcaaacagaccacccaatacatatgttaagttaactctactgaattccatgggtcaagagatgtccaaatgcaagacatccatccgcagagggcagccaaatccagtatataaggaaacttttgtctttcaagtggccctatttcagctttctgatgtgacactcatactgtctgtgtataacaaacgcagcatgaaaagaaaagagatgataggctggatttctttaggtctcaacagctctggagaagaagaactcaatcactggactgaaatgaaagagtcaaaaggacagcaagtatgtagatggcatgcgttgctagagtcatgatgaatagaataagcaagcagttaccatcaaaggcagcatatttccaattccaacattactgtttctaccaagtcccattagaagagctgttctttgaagaatcatattcaaccttctaccaaaatgctttaagttctatggaaagaacgtctcatactgacataaatgaagaaaatatgtgtatctagtagagcttgtttaggaaactgagaaacgtacactatcattgctaaactaacagtcctccagaaatttaataagatgtttttgatttgaagttaattttaatttagcaaaagagccagtcattttatgaaaaatcaaaattataagtgattttaaaaaccagaattttagttgcaatacaattttaatatcaccctacatattatttataaaacatagtttgactggccagtccctggtgtttgtaatgttctttaatatgaaaaagtagttctccaactctatcataagtcatatctaatggtgaagggtttcagtcacattgaaaattgttttatttcaggcatgttccctttgtgcacttaggttcattgtgcctcagttcctctcaaaagcactaaatctaagtgcaaacaagtattcattttcatacaggaatttttttaatatgttatttttttaaaagttcatttttcatttgcctccgctttcgcctgatccaaagagaccaagtcactgtactggtcccttgcaagtcttctagacaggttgtactgtagaactacgtaactttctgttgaaagcacttcctgtattcttgtattccaatgtaggaagctaatagagcaggactttactttcaaatttctttcagtgattgactcttcaaaattgcagtagtgtgaaaatacattttttacaaactgaaaatacagtagataagctgtcgaaaatggaaaacaattcaattttaattttctgctctgagtatttagtaaccaacactgcgtaaagcaggtagcattcaaaataagaaactgttctctctctaaatcttcactcttacttcaatttatatttgtgatatgaagactatccagttctcagtttgaattggaacatcatgttaaaaacagttatgagattccttatgaagtttctagtaacttgtaactagactttatgaaattaacagataaagttcttcaacgtgatgtcatcttgtgcctttcatgtaagttaaatttgctcatacagcttgaacgttgtatttgcaaaattaagccttcgatttttataaatgtaaagattcctcagaacagtgtcgcaagatctttatttcctctgaagtatgtaaaagttgtataatgtgctaactttttaatggcaaggcactttcatttgtttttatatttaggaactctaatcaggaatattataagctgttttctttttaattttgcttcttacctaatatatcattttatgcatatactttatcagagtatgttttatatatattaaaaatagtttcttttttctccttctcatttctagttaaaatagacaaaaacatactatttaccagttactaaaaagcagtatatcattgcttctagtcccaactaagtactatatattattgtaaactagaacttgttattaccataataacaaaacaatgcgtagatattacttcagcttggctgtactgaaaggccttaaaagaaacccaaaaagaccgtgaacttctgtatttttttagtttaaaaaatggcagctctatgcattcatacacatgaattataagaaaaaatacaaatgctatattggatgacatgaggtttgagaatgtgtgttacagggctgcattaaagggaaaaatccatcttttattgttacatcaatgagctttttccaggatttttcaaataaacaagtaagagttagaacctgaatcaaatggcaaaatatctcatttaagtgttttcagcaacagtatgaaaaaagacttgaagaggggatgtagattttactgagaaattggacttaggcatttgaagctataatgaactttttagactttgaaacaactgactgcattgctaacaactgttatcttcctaataaaaagagttatcagtcttatctgtaactgtaacagagcttagtgaaacacattagtaagaccagcttggtgctttcactcttagtgagaaaaagacctaactaattgttatttgttaaatctaccttttttcagactattcccagaattgtgtgtgtgatttgatacatccctagggatttatctggcataagtatcaaatccttcatggcttaaaaattaataaacagttttttaatatttctggaaagaccctacctccaccccagctgccaagtcctcaaagattataaattatctatatgagtgtatgtatctgtatacacacatgcaccattacacatacaacataaatatgtatatgtatattcatttgtaaaggcaaaggtgccctggctttttcagataactgaatagaaaaacatttcatacatttaggattatttttctcctctatgtatttactagatattatatttggtttgggttgctttctgctgctgttctccttcacacacagcaaaatatacatttgtttctgtagattgacacaacttataataattactcccaaaaagttgtctgttcttttagaaaaggattaaataaggctcaggggacccacttcactctactgaatctaatgtacgagacagtactactgcttctttgtgtgcttgaatttgcatgaaagcttaatagcaaaatcttctatctcagtaattatagcaaatagggacctactggtagggagcaggtgttggctcagaaacctgaaaaagacaacccactttcatacagttctattaaaatcccctaagttttctaataaaatgatatagtccaaatatggcaatcgactggcatttatgggagcctctaaacctggaattatggggtttatttttctcccaaatgagctgcaaaagataattattgctgcccagtaaacaaaatgtatgtcaaatcagtaaagaatttgtttagcataatattgccttatctttcagaagctttcttctatattcttgtgtcttcagtacaatccacttttgtttgaaatccatttgcatattatcttactgtgcatttagtgaattctcaataatgttgtatttgctgacaagaataataaattggaccacaattaaaaaaaaagaaaacccaatgagaaaataactacctgattaatatacacatgtttaaatgtaggacctggtaaagcagtttcatccaacctagcgaaaatgcccagggctgtttgttaaatcatttgcttgataccatcatcattttcatttcacttatcaagtgaatcagaagcataatcaataactgcaaagtaagatagtaccaataggagaaagaggtaaaagaattgagagtgtttgtcaatatgaagatgtgtggggatactgaatgatatcatagtctttccagtgaaagaaaaaataggctatgggaagatgtaaatttttgatggagtaagaacagtggtcaccaccaagtatttttcaagatccctctccagctatgaatagaaaggacacaaattcatttgcgtaaaattgccatttgcctacatagactagacaattcacagatttttcacaaagacagttattatatatatagttatttgagttatcactatattatttcacattgatagtttttatttctaattttgtttccattcactgtcctcagttcctctgtggcctacattgaaggtagctgtcagtattattattgtcaaccatatttaatattgaatacaagtttaagcatgctgcaaagcattttctaacgttaattttaaaacattgtctctgccctccaaagtgatggttaacagctataatttactaagatctagcacaataatttattacttgcttgattctcaaaacaatactgtgaggtaagtaatgttatcaacattttattgataaagaaactgcagcatgaagaggttaagcagactttcccaaggtcattcggtaagtaagtagtagaactgggattggaacccaggtgtaaattactctaaaacccatgctatgcatgttgcatttgcctccctgtttgaaaaaaaaactacttaggacattatatttatcaataatcccactcaccttgattgaatggcagaactaagggggaaaaaacagctggggaaagagaaaagactagaaaagaagatcagaaattttttttcttctcaggacacaagtggtggtacttttgtgtcattttgtagatgactttgatttgcaaagatttggaattgatttattctaccagtttagcctatacttatattccaaaagcatattaatcagttctgctccttgaccacttttaggaatccaaggtgttttaattgttacatgacccccttactactctatgaagggcataacctgtgtctagcccatatctcactcatatcagtggtgagacaaaagatttgtcttcctctgtcctctcattgcaatttatttatgttttattctcaattttattaagatttgtcaggaattacagctagtttattacatatgtctctcttccccctaggtaagtagtcaatgccttgttagtatctttctgtacccctttgcttatagtaggcagacagtaaatattgaattgaactaaattccctgtggaagaagccagtcacactattacatgagtcttagtttttatgaatcttgtgttatgtatggatttatttattccttcagttaatatatatttaagagtactagatatgtgccatgtgttgttgttccaagtgctacagatgcagagataataaattggtcgaagtctttgccctcatggggcctacattctaaggtaggaagatggccacagaatgggataatttcaggctagtataatgaagcattaagataggggcatgcatagagtaccgtgggatttagtagaagagtgcaacatggaattcaaaaaaatcttcctggaaaagataatccctgagttgggtcttaaagaacaaatacatgttagactcccatcaaacttgaggacacacgttctttccaagaacaaaatgtaaaataatggtttctaaactgtagtatccttaagaattattttgaaaatttaacttgggccaggcgtggtggcttacgcctgtaatcccaacactttgggaggctgaggtaggcagattacttgagctcaggagtttaagaccagcctgggcaacatagcaaaaccccatctctaccaaaaatttaaaaattagctgagcacggtggtgcatgcctgtggtcccagctactcaggaggcttaggtgggagaatcgctggagcctggcaagtcaaggctgcagtgagccaagatagcgccactgcacttcagcctgggtgacacagaagaccttgtagaaagggaggaagaaaggagggagagagagaggaagggaggaggagaagggaaggaaggaggagacgggaaagaatgaaggagaagggaaagaagggagggaaatttaacttgtattccaaaactccacctccagagattctacttcatttggcctggaagggagcccaataatctacattttattaagctctccaggaaattctgtctgagatctattgatatagaatattaagtgtattacatagtagtattcatgaaatgtttcagtgcctgtagatcagacctttaagtgtgatagtgatagtaatacagagattaagactaggattaatgttattcatctttttcttgtgcttccttaaaaaggaagatatttaatgaaaaaaattaatatttaataatgaatttctgtacattcacattcaacatacatttttcaaagtgtttcttggtataataaatatgttgattttatggcttccaaaaattcctttctatcactgttcaaatatttccttctaagttatctttacaatgatggatataaagtgaagaatggggaggtatttatcaagtaatttctttatcagtatcctaaatgaaataagactgacctttgagcaaatgtgtagtagcagccataggtgctggcatgtttgcattcttgcatacagtaagatttcttgcttccctttatcatcatctaaatggcttcattgtcatcacactcatcagatgaaatgcagtactggattcttctctaaaagcagtgattctgtgactgctgctctaaactctagttccttgattgttttgttcttaggatcctttgtttcaaatagcaagttaatacagcagcctcaggaccttctctttctctcagaataaatgctgtggataaggtacatctgagtttccatttcccctcatttcacatatagccatattttcttctctgatgtaatattttgtattaacacattttacattttgaagttttcttttcccccacaaagatatgtggttatcccacttaaaaatgagcttatttgaatatgtgaaataatgttgtcattgaattaagctgttttgtgactgctgatgtatcactgtgtttgatttggtgacagcttgaggtctggttaatataatcttaaggtaatcagcttgatagactggaattactagtttattatcaaaaaatgaatgtaaaaatattgctcttttctctccctgtttagactagtatgtgcctttttaaaaatactccctttcttcttccctgccttttttccccactcttattcatatacactcaaactagataccagagttagttcatcaaagctgaataatacctatcaaaaagtgataccctgacttttttctcttaatcacctgtactggaccatagggaggaccaaataggctttcttggggactacagaaagagcaaagcgtaatactctttaatcatagcatgtttgttgttgctgtttcggtggtggtggtggtggtggtggtggttgtgtacttaccttgaatagtgtgaagtatcctaaaattatgttgtgtgggctgggagcaggaaggaaactgattattcgtctaacaaaggtttggcataattttattgtaaaatttcaactgtttatgacatgaaaatttctaattaattataagaacaaagtcactgtggtggcaatagttgtacaagatgtttgacattatttctatgtcagtttgatagtctgtgttataaattgtcttattaggacccttcttcaccctcttctttattattctgattatcagtaaatccagtttgtactgttagacatttgagtttgtcttttaaatattgaagactattttaaaaagaaaaaccataacatctttctgtttattacattaacatgtgatctctcacctgacgatgtgtttaaaatgaattaatagataaaatataatactccgttatatactgaaaaaaattttcaaactttgtctatatattcagatattgctagcagttcatattaaatatgactattttgtttaatgagaaaataggaatttttccttatctctgagacttactgcttctctttgccattcacatctggttgaaggtggatggttttgaacctcgtaacgtcacttcactcgtcagtttctgagtgtgccaacctccttctgacggtttaattttcagtaacaatcaaaccatttattcctcaggggttggtcctcctagtgattcctgtccttaacccccattagtgttgatggaagtaatccataagcaccaataggagaaaaggcccataaaggatcagtatcccagaaccctgaaataggacggccgcttcagtacccaaatgtcattgcaattctaatggagtagaagccagcttcttggaagtgaagatttgagatcattatgtcatattctctccttttggtgtcctcccttctccctctagcttgcacattctttttattttaaattttacaggaagccttcttttaaaaacctggtttttaaaatttcacatgttgctgtaaccaggtgatttcaaaacccagaaaactgaagtacataccatacagtcataagaagtttgggggcttttttggtttttatgtttttggtgttttttttttttttttttttttttttttttgtagtgtggggagtggggaggaggaaaagggagaaatcgtgcttgttttggttttgggaagtctttttggataaatattgagaatatttatagtattctgtaattatgtgacatttgttgtgtgaggggagaccagagtagctgttgcacatacatcgactctcttaatattgaagcatatttaaacagttgtttgaagcagagctagaaattaatggtgatacttctaacagcattttgatgttataaatattactttaagtttatcaagagaaaaattccagtagtagcttgcgttataaaattaattgatttattatgtttctgtataattttattgaaattgcttttttgtggtgaatataatatagtggcaacgattttgaggaatctttaaagctgtttggaagagatggccagcctttggctagatttttactagaattttgaaataagaaagtgtataaatatgttttcagttaaattagccttgaggaagaatagttattatatgagttttaagggtcttgataaatgttgggacctactctaaaactcatgaggttcctcactgatcaatactcttgcattgtattttatttctcaaaataatgaaatttttatggaaaagctcaattagtggaatcttttattcaatattcccttactcttctttcttccttccttctttctttcctttcttccttccctccctccttccttcctagttctttcattttttcaggcaagaagcttccttaataatatagtttctacagagctttcttacttatttttctaataatggatataacagtgtgataaagtttaaatgctccgtgagcaaaactcttatcaaacaactgaagaaatacactgctgattaaccttttccttggtcttgaattgtctccagcatatttgctagtgactaaaccattaatggatcttattagtataaacacatgtctgtgtggttatcaacagtgttgtattattgtcacatttatttacatttttggtcaaaaatataaacatgcgtgtgtgaagcagtctgttttatagagtgagcatatatgtaatcgttttcatataattgaaaatgtgctgtgtgttgcattttattctcatgtcgacttttctactatgtatacaccgattgtctcggtgcctttttccttttgtataattgtattacatacagaaattgctgacctctgtgaaaacagtgtaaaaaaagttaaaattattattccgatgagattttaatggcagtttaattttccagagaataaattttgtgtgggttaaaagttatttttcttcacctttatgtaaaaaatctgtttacgttttagtactcacatggaatgggtaaacatctgacttcattgatgatgatacataaacatcagtcctaattcttgtcattgacaaataaatgttaatatgactgttacacaaaataaaataatgtcaattacataaggaaatatcaaatggatatatgtacatgttatttagatcttgggtttgaaaggaatctcatctaaatgtgctataaaatattactctcaaaaggtttgggtcatattattttctttaattgtaagtcaaatctggcttccaaagaaaatagacttacaaatgcaaacatttaaaaatattctcctttaaagttcatataaatcacaaattaaactaaatagctttaaaatgatctcagtatcttcagctggaatatgaactgttacctagtttgttctttcacttaatgtgaatttgttgtcattcatatcagtattgctatcctgtttaacaaaataattttctctttgccaatagtagtttgttgatttttaattctttttcattagctagttgtattgtttccctaagacctggagtttagatatttttcatatttcattaccttgtccattttacttccagcaacaaagatttataacaacagacttaacaagtactattttgcatatgaaaaagaatttaaacgtttggtgctctaaaactgaaagaaattaaagttgctgcatcatctaa

SEQ ID NO: 21111 - DNA, 5094 bp, Homo sapiens
  misc_feature 1..5094: note = ENST00000367015
  source 1..5094: mol_type = unassigned DNA
gtggagtacatgaacttatctgtattagaaaagaatctggaatctgagtgcatgctgatctcccattgacttctgttctattactgtaccccatcagagagatgtgaggagttggttgaaattcaaatcgggaacatatccaaagaccacaacatcctttgacaccaacaactgtctatgcttccttagaaggagccacctgacaactgggtggttcaacaaagtggccccaggaaagtatctccagaggcagttggatttttgtcagctgttggggtgtttattatcttgatgctgctcctttttctctatattaataagaagttctgttttgaaaatgttggcgggtttccagatcttggttcagaatacagtacaaggaagaattcacaagataaaatttataattcctacatggacaaagatgagcatggttcatcctctgaaagtgaagatgaagcgctgggtaaatatcatgaggccttatccagaacacacaattccagactaccactggcagattctagacaaaggaactatgcttgggaaacaaggcagaaatacagtcctctatcggcagagtatgatggatacagtagtgaagcatcaatagatgaaggaaactgcattcagagaatgagaagaacacccccgctggatgaattgcagccaccaccatatcaggatgacagtggttctccccatctgtcatgtacaccctcagaaattggggacagtaaatgtgaattttcccactgcagcaacagtccaagatgctcatataacaagtgcccaagtgaaggaagcacaggtcatgaaatagaaagttttcataataaaggatatgaagaagatgttccaagtgacagcactgcagtcctgagccctgaagatatgtcagctcaaggatcatcttcgcagcttcctaaaccttttgatcctgagccagaagctaaatatggcacactggatgtgacttttgactatgactcacaagaacagaagcttctggtaacagtgacagctgtcacagacatcccaacatataacaggacaggtggcaactcatggcaagtacaccttgttcttctacctataaagaaacagagagcaaaaaccagcatccagagaggaccatgccctgtcttcacagaaacatttaaatttaatcatgttgaatctgagatgattggaaattatgcagttcggtttagactgtatggtgtacatcgcatgaaaaaagaaaagattgtgggggaaaagattttttatttaacaaaattgaatcttcaagggaaaatgtcattgcctgtgatattggaaccttcttacaatcattctggctgtgactcccaaatgagcgtgtcagaaatgtcgtgtagtgaaagtacatcctcatgtcagtctcttgaacatggctcagttccagaaattcttattggcctgctttataatgccacaactggaagactatcagcagaagtgataaaaggcagccacttcaaaaatttggcagcaaacagaccacccaatacatatgttaagttaactctactgaattccatgggtcaagagatgtccaaatgcaagacatccatccgcagagggcagccaaatccagtatataaggaaacttttgtctttcaagtggccctatttcagctttctgatgtgacactcatactgtctgtgtataacaaacgcagcatgaaaagaaaagagatgataggctggatttctttaggtctcaacagctctggagaagaagaactcaatcactggactgaaatgaaagagtcaaaaggacagcaagtatgtagatggcatgcgttgctagagtcatgatgaatagaataagcaagcagttaccatcaaaggcagcatatttccaattccaacattactgtttctaccaagtcccattagaagagctgttctttgaagaatcatattcaaccttctaccaaaatgctttaagttctatggaaagaacgtctcatactgacataaatgaagaaaatatgtgtatctagtagagcttgtttaggaaactgagaaacgtacactatcattgctaaactaacagtcctccagaaatttaataagatgtttttgatttgaagttaattttaatttagcaaaagagccagtcattttatgaaaaatcaaaattataagtgattttaaaaaccagaattttagttgcaatacaattttaatatcaccctacatattatttataaaacatagtttgactggccagtccctggtgtttgtaatgttctttaatatgaaaaagtagttctccaactctatcataagtcatatctaatggtgaagggtttcagtcacattgaaaattgttttatttcaggcatgttccctttgtgcacttaggttcattgtgcctcagttcctctcaaaagcactaaatctaagtgcaaacaagtattcattttcatacaggaatttttttaatatgttatttttttaaaagttcatttttcatttgcctccgctttcgcctgatccaaagagaccaagtcactgtactggtcccttgcaagtcttctagacaggttgtactgtagaactacgtaactttctgttgaaagcacttcctgtattcttgtattccaatgtaggaagctaatagagcaggactttactttcaaatttctttcagtgattgactcttcaaaattgcagtagtgtgaaaatacattttttacaaactgaaaatacagtagataagctgtcgaaaatggaaaacaattcaattttaattttctgctctgagtatttagtaaccaacactgcgtaaagcaggtagcattcaaaataagaaactgttctctctctaaatcttcactcttacttcaatttatatttgtgatatgaagactatccagttctcagtttgaattggaacatcatgttaaaaacagttatgagattccttatgaagtttctagtaacttgtaactagactttatgaaattaacagataaagttcttcaacgtgatgtcatcttgtgcctttcatgtaagttaaatttgctcatacagcttgaacgttgtatttgcaaaattaagccttcgatttttataaatgtaaagattcctcagaacagtgtcgcaagatctttatttcctctgaagtatgtaaaagttgtataatgtgctaactttttaatggcaaggcactttcatttgtttttatatttaggaactctaatcaggaatattataagctgttttctttttaattttgcttcttacctaatatatcattttatgcatatactttatcagagtatgttttatatatattaaaaatagtttcttttttctccttctcatttctagttaaaatagacaaaaacatactatttaccagttactaaaaagcagtatatcattgcttctagtcccaactaagtactatatattattgtaaactagaacttgttattaccataataacaaaacaatgcgtagatattacttcagcttggctgtactgaaaggccttaaaagaaacccaaaaagaccgtgaacttctgtatttttttagtttaaaaaatggcagctctatgcattcatacacatgaattataagaaaaaatacaaatgctatattggatgacatgaggtttgagaatgtgtgttacagggctgcattaaagggaaaaatccatcttttattgttacatcaatgagctttttccaggatttttcaaataaacaagtaagagttagaacctgaatcaaatggcaaaatatctcatttaagtgttttcagcaacagtatgaaaaaagacttgaagaggggatgtagattttactgagaaattggacttaggcatttgaagctataatgaactttttagactttgaaacaactgactgcattgctaacaactgttatcttcctaataaaaagagttatcagtcttatctgtaactgtaacagagcttagtgaaacacattagtaagaccagcttggtgctttcactcttagtgagaaaaagacctaactaattgttatttgttaaatctaccttttttcagactattcccagaattgtgtgtgtgatttgatacatccctagggatttatctggcataagtatcaaatccttcatggcttaaaaattaataaacagttttttaatatttctggaaagaccctacctccaccccagctgccaagtcctcaaagattataaattatctatatgagtgtatgtatctgtatacacacatgcaccattacacatacaacataaatatgtatatgtatattcatttgtaaaggcaaaggtgccctggctttttcagataactgaatagaaaaacatttcatacatttaggattatttttctcctctatgtatttactagatattatatttggtttgggttgctttctgctgctgttctccttcacacacagcaaaatatacatttgtttctgtagattgacacaacttataataattactcccaaaaagttgtctgttcttttagaaaaggattaaataaggctcaggggacccacttcactctactgaatctaatgtacgagacagtactactgcttctttgtgtgcttgaatttgcatgaaagcttaatagcaaaatcttctatctcagtaattatagcaaatagggacctactggtagggagcaggtgttggctcagaaacctgaaaaagacaacccactttcatacagttctattaaaatcccctaagttttctaataaaatgatatagtccaaatatggcaatcgactggcatttatgggagcctctaaacctggaattatggggtttatttttctcccaaatgagctgcaaaagataattattgctgcccagtaaacaaaatgtatgtcaaatcagtaaagaatttgtttagcataatattgccttatctttcagaagctttcttctatattcttgtgtcttcagtacaatccacttttgtttgaaatccatttgcatattatcttactgtgcatttagtgaattctcaataatgttgtatttgctgacaagaataataaattggaccacaattaaaaa

SEQ ID NO: 21112 - DNA, 3438 bp, Homo sapiens
  misc_feature 1..3438: note = ENST00000534859
  source 1..3438: mol_type = unassigned DNA
ctacatggacaaagatgagcatggttcatcctctgaaagtgaagatgaagcgctgggtaaatatcatgaggccttatccagaacacacaattccagactaccactggcagattctagacaaaggaactatgcttgggaaacaaggcagaaatacagtcctctatcggcagagtatgatggatacagtagtgaagcatcaatagatgaaggaaactgcattcagagaatgagaagaacacccccgctggatgaattgcagccaccaccatatcaggatgacagtggttctccccatctgtcatgtacaccctcagaaattggggacagtaaatgtgaattttcccactgcagcaacagtccaagatgctcatataacaagtgcccaagtgaaggaagcacaggtcatgaaatagaaagttttcataataaaggatatgaagaagatgttccaagtgacagcactgcagtcctgagccctgaagatatgtcagctcaaggatcatcttcgcagcttcctaaaccttttgatcctgagccagaagctaaatatggcacactggatgtgacttttgactatgactcacaagaacagaagcttctggtaacagtgacagctgtcacagacatcccaacatataacaggacaggtggcaactcatggcaagtacaccttgttcttctacctataaagaaacagagagcaaaaaccagcatccagagaggaccatgccctgtcttcacagaaacatttaaatttaatcatgttgaatctgagatgattggaaattatgcagttcggtttagactgtatggtgtacatcgcatgaaaaaagaaaagattgtgggggaaaagattttttatttaacaaaattgaatcttcaagggaaaatgtcattgcctgtgatattggaaccttcttacaatcattctggctgtgactcccaaatgagcgtgtcagaaatgtcgtgtagtgaaagtacatcctcatgtcagtctcttgaacatggctcagttccagaaattcttattggcctgctttataatgccacaactggaagactatcagcagaagtgataaaaggcagccacttcaaaaatttggcagcaaacagaccacccactttccaccccctgttgtcagatggactgttctgttgtctaaaacacttgataggtggacaggtttatataatccgagatacatatgttaagttaactctactgaattccatgggtcaagagatgtccaaatgcaagacatccatccgcagagggcagccaaatccagtatataaggaaacttttgtctttcaagtggccctatttcagctttctgatgtgacactcatactgtctgtgtataacaaacgcagcatgaaaagaaaagagatgataggctggatttctttaggtctcaacagctctggagaagaagaactcaatcactggactgaaatgaaagagtcaaaaggacagcaagtatgtagatggcatgcgttgctagagtcatgatgaatagaataagcaagcagttaccatcaaaggcagcatatttccaattccaacattactgtttctaccaagtcccattagaagagctgttctttgaagaatcatattcaaccttctaccaaaatgctttaagttctatggaaagaacgtctcatactgacataaatgaagaaaatatgtgtatctagtagagcttgtttaggaaactgagaaacgtacactatcattgctaaactaacagtcctccagaaatttaataagatgtttttgatttgaagttaattttaatttagcaaaagagccagtcattttatgaaaaatcaaaattataagtgattttaaaaaccagaattttagttgcaatacaattttaatatcaccctacatattatttataaaacatagtttgactggccagtccctggtgtttgtaatgttctttaatatgaaaaagtagttctccaactctatcataagtcatatctaatggtgaagggtttcagtcacattgaaaattgttttatttcaggcatgttccctttgtgcacttaggttcattgtgcctcagttcctctcaaaagcactaaatctaagtgcaaacaagtattcattttcatacaggaatttttttaatatgttatttttttaaaagttcatttttcatttgcctccgctttcgcctgatccaaagagaccaagtcactgtactggtcccttgcaagtcttctagacaggttgtactgtagaactacgtaactttctgttgaaagcacttcctgtattcttgtattccaatgtaggaagctaatagagcaggactttactttcaaatttctttcagtgattgactcttcaaaattgcagtagtgtgaaaatacattttttacaaactgaaaatacagtagataagctgtcgaaaatggaaaacaattcaattttaattttctgctctgagtatttagtaaccaacactgcgtaaagcaggtagcattcaaaataagaaactgttctctctctaaatcttcactcttacttcaatttatatttgtgatatgaagactatccagttctcagtttgaattggaacatcatgttaaaaacagttatgagattccttatgaagtttctagtaacttgtaactagactttatgaaattaacagataaagttcttcaacgtgatgtcatcttgtgcctttcatgtaagttaaatttgctcatacagcttgaacgttgtatttgcaaaattaagccttcgatttttataaatgtaaagattcctcagaacagtgtcgcaagatctttatttcctctgaagtatgtaaaagttgtataatgtgctaactttttaatggcaaggcactttcatttgtttttatatttaggaactctaatcaggaatattataagctgttttctttttaattttgcttcttacctaatatatcattttatgcatatactttatcagagtatgttttatatatattaaaaatagtttcttttttctccttctcatttctagttaaaatagacaaaaacatactatttaccagttactaaaaagcagtatatcattgcttctagtcccaactaagtactatatattattgtaaactagaacttgttattaccataataacaaaacaatgcgtagatattacttcagcttggctgtactgaaaggccttaaaagaaacccaaaaagaccgtgaacttctgtatttttttagtttaaaaaatggcagctctatgcattcatacacatgaattataagaaaaaatacaaatgctatattggatgacatgaggtttgagaatgtgtgttacagggctgcattaaagggaaaaatccatcttttattgttacatcaatgagctttttccaggatttttcaaataaacaagtaagagttagaacctgaa

SEQ ID NO: 21113 - DNA, 1860 bp, Homo sapiens
  misc_feature 1..1860: note = ENST00000629778
  source 1..1860: mol_type = unassigned DNA
atggcgagcgcatcatggcgattgaaggtggagagagaacctgtggagtacatgaacttatctgtattagaaaagatagggtatttctctgtggccaggctggagtacagtggcaccatcttggctcactgcaacttccgcctcctgggttcaaacgattcttctgcctcagcatcccaagtaactgggactacagtatctccagaggcagttggatttttgtcagctgttggggtgtttattatcttgatgctgctcctttttctctatattaataagaagttctgttttgaaaatgttggcgggtttccagatcttggttcagaatacagtacaaggaagaattcacaagataaaatttataattcctacatggacaaagatgagcatggttcatcctctgaaagtgaagatgaagcgctgggtaaatatcatgaggccttatccagaacacacaattccagactaccactggcagattctagacaaaggaactatgcttgggaaacaaggcagaaatacagtcctctatcggcagagtatgatggatacagtagtgaagcatcaatagatgaaggaaactgcattcagagaatgagaagaacacccccgctggatgaattgcagccaccaccatatcaggatgacagtggttctccccatctgtcatgtacaccctcagaaattggggacagtaaatgtgaattttcccactgcagcaacagtccaagatgctcatataacaagtgcccaagtgaaggaagcacaggtcatgaaatagaaagttttcataataaaggatatgaagaagatgttccaagtgacagcactgcagtcctgagccctgaagatatgtcagctcaaggatcatcttcgcagcttcctaaaccttttgatcctgagccagaagctaaatatggcacactggatgtgacttttgactatgactcacaagaacagaagcttctggtaacagtgacagctgtcacagacatcccaacatataacaggacaggtggcaactcatggcaagtacaccttgttcttctacctataaagaaacagagagcaaaaaccagcatccagagaggaccatgccctgtcttcacagaaacatttaaatttaatcatgttgaatctgagatgattggaaattatgcagttcggtttagactgtatggtgtacatcgcatgaaaaaagaaaagattgtgggggaaaagattttttatttaacaaaattgaatcttcaagggaaaatgtcattgcctgtgatattggaaccttcttacaatcattctggctgtgactcccaaatgagcgtgtcagaaatgtcgtgtagtgaaagtacatcctcatgtcagtctcttgaacatggctcagttccagaaattcttattggcctgctttataatgccacaactggaagactatcagcagaagtgataaaaggcagccacttcaaaaatttggcagcaaacagaccacccaatggactgttctgttgtctaaaacacttgataggtggacaggtttatataatccgagatacatatgttaagttaactctactgaattccatgggtcaagagatgtccaaatgcaagacatccatccgcagagggcagccaaatccagtatataaggaaacttttgtctttcaagtggccctatttcagctttctgatgtgacactcatactgtctgtgtataacaaacgcagcatgaaaagaaaagagatgataggctggatttctttaggtctcaacagctctggagaagaagaactcaatcactggactgaaatgaaagagtcaaaaggacagcaagtatgtagatggcatgcgttgctagagtcatga

SEQ ID NO: 21114 - DNA, 5208 bp, Homo sapiens
  misc_feature 1..5208: note = ENST00000537238
  source 1..5208: mol_type = unassigned DNA
ccctctcgctggcggactcagcgcgtcctccgccagccctcgcgtctgctgcccccgccatccagttggtgcggtccatggcgagcgcatcatggcgattgaaggtggagagagaacctgtggagtacatgaacttatctgtattagaaaagaatctggaatctgagtgcatgctgatctcccattgacttctgttctattactgtaccccatcagagagatgtgaggagttggttgaaattcaaatcgggaacatatccaaagaccacaacatcctttgacaccaacaactgtctatgcttccttagaaggagccacctgacaactgggtggttcaacaaagtggccccaggaaagtatctccagaggcagttggatttttgtcagctgttggggtgtttattatcttgatgctgctcctttttctctatattaataagaagttctgttttgaaaatgttggcgggtttccagatcttggttcagaatacagtacaaggaagaattcacaagataaaatttataattcctacatggacaaagatgagcatggttcatcctctgaaagtgaagatgaagcgctgggtaaatatcatgaggccttatccagaacacacaattccagactaccactggcagattctagacaaaggaactatgcttgggaaacaaggcagaaatacagtcctctatcggcagagtatgatggatacagtagtgaagcatcaatagatgaaggaaactgcattcagagaatgagaagaacacccccgctggatgaattgcagccaccaccatatcaggatgacagtggttctccccatctgtcatgtacaccctcagaaattggggacagtaaatgtgaattttcccactgcagcaacagtccaagatgctcatataacaagtgcccaagtgaaggaagcacaggtcatgaaatagaaagttttcataataaaggatatgaagaagatgttccaagtgacagcactgcagtcctgagccctgaagatatgtcagctcaaggatcatcttcgcagcttcctaaaccttttgatcctgagccagaagctaaatatggcacactggatgtgacttttgactatgactcacaagaacagaagcttctggtaacagtgacagctgtcacagacatcccaacatataacaggacaggtggcaactcatggcaagtacaccttgttcttctacctataaagaaacagagagcaaaaaccagcatccagagaggaccatgccctgtcttcacagaaacatttaaatttaatcatgttgaatctgagatgattggaaattatgcagttcggtttagactgtatggtgtacatcgcatgaaaaaagaaaagattgtgggggaaaagattttttatttaacaaaattgaatcttcaagggaaaatgtcattgcctgtgatattggaaccttcttacaatcattctggctgtgactcccaaatgagcgtgtcagaaatgtcgtgtagtgaaagtacatcctcatgtcagtctcttgaacatggctcagttccagaaattcttattggcctgctttataatgccacaactggaagactatcagcagaagtgataaaaggcagccacttcaaaaatttggcagcaaacagaccacccaatacatatgttaagttaactctactgaattccatgggtcaagagatgtccaaatgcaagacatccatccgcagagggcagccaaatccagtatataaggaaacttttgtctttcaagtggccctatttcagctttctgatgtgacactcatactgtctgtgtataacaaacgcagcatgaaaagaaaagagatgataggctggatttctttaggtctcaacagctctggagaagaagaactcaatcactggactgaaatgaaagagtcaaaaggacagcaagtatgtagatggcatgcgttgctagagtcatgatgaatagaataagcaagcagttaccatcaaaggcagcatatttccaattccaacattactgtttctaccaagtcccattagaagagctgttctttgaagaatcatattcaaccttctaccaaaatgctttaagttctatggaaagaacgtctcatactgacataaatgaagaaaatatgtgtatctagtagagcttgtttaggaaactgagaaacgtacactatcattgctaaactaacagtcctccagaaatttaataagatgtttttgatttgaagttaattttaatttagcaaaagagccagtcattttatgaaaaatcaaaattataagtgattttaaaaaccagaattttagttgcaatacaattttaatatcaccctacatattatttataaaacatagtttgactggccagtccctggtgtttgtaatgttctttaatatgaaaaagtagttctccaactctatcataagtcatatctaatggtgaagggtttcagtcacattgaaaattgttttatttcaggcatgttccctttgtgcacttaggttcattgtgcctcagttcctctcaaaagcactaaatctaagtgcaaacaagtattcattttcatacaggaatttttttaatatgttatttttttaaaagttcatttttcatttgcctccgctttcgcctgatccaaagagaccaagtcactgtactggtcccttgcaagtcttctagacaggttgtactgtagaactacgtaactttctgttgaaagcacttcctgtattcttgtattccaatgtaggaagctaatagagcaggactttactttcaaatttctttcagtgattgactcttcaaaattgcagtagtgtgaaaatacattttttacaaactgaaaatacagtagataagctgtcgaaaatggaaaacaattcaattttaattttctgctctgagtatttagtaaccaacactgcgtaaagcaggtagcattcaaaataagaaactgttctctctctaaatcttcactcttacttcaatttatatttgtgatatgaagactatccagttctcagtttgaattggaacatcatgttaaaaacagttatgagattccttatgaagtttctagtaacttgtaactagactttatgaaattaacagataaagttcttcaacgtgatgtcatcttgtgcctttcatgtaagttaaatttgctcatacagcttgaacgttgtatttgcaaaattaagccttcgatttttataaatgtaaagattcctcagaacagtgtcgcaagatctttatttcctctgaagtatgtaaaagttgtataatgtgctaactttttaatggcaaggcactttcatttgtttttatatttaggaactctaatcaggaatattataagctgttttctttttaattttgcttcttacctaatatatcattttatgcatatactttatcagagtatgttttatatatattaaaaatagtttcttttttctccttctcatttctagttaaaatagacaaaaacatactatttaccagttactaaaaagcagtatatcattgcttctagtcccaactaagtactatatattattgtaaactagaacttgttattaccataataacaaaacaatgcgtagatattacttcagcttggctgtactgaaaggccttaaaagaaacccaaaaagaccgtgaacttctgtatttttttagtttaaaaaatggcagctctatgcattcatacacatgaattataagaaaaaatacaaatgctatattggatgacatgaggtttgagaatgtgtgttacagggctgcattaaagggaaaaatccatcttttattgttacatcaatgagctttttccaggatttttcaaataaacaagtaagagttagaacctgaatcaaatggcaaaatatctcatttaagtgttttcagcaacagtatgaaaaaagacttgaagaggggatgtagattttactgagaaattggacttaggcatttgaagctataatgaactttttagactttgaaacaactgactgcattgctaacaactgttatcttcctaataaaaagagttatcagtcttatctgtaactgtaacagagcttagtgaaacacattagtaagaccagcttggtgctttcactcttagtgagaaaaagacctaactaattgttatttgttaaatctaccttttttcagactattcccagaattgtgtgtgtgatttgatacatccctagggatttatctggcataagtatcaaatccttcatggcttaaaaattaataaacagttttttaatatttctggaaagaccctacctccaccccagctgccaagtcctcaaagattataaattatctatatgagtgtatgtatctgtatacacacatgcaccattacacatacaacataaatatgtatatgtatattcatttgtaaaggcaaaggtgccctggctttttcagataactgaatagaaaaacatttcatacatttaggattatttttctcctctatgtatttactagatattatatttggtttgggttgctttctgctgctgttctccttcacacacagcaaaatatacatttgtttctgtagattgacacaacttataataattactcccaaaaagttgtctgttcttttagaaaaggattaaataaggctcaggggacccacttcactctactgaatctaatgtacgagacagtactactgcttctttgtgtgcttgaatttgcatgaaagcttaatagcaaaatcttctatctcagtaattatagcaaatagggacctactggtagggagcaggtgttggctcagaaacctgaaaaagacaacccactttcatacagttctattaaaatcccctaagttttctaataaaatgatatagtccaaatatggcaatcgactggcatttatgggagcctctaaacctggaattatggggtttatttttctcccaaatgagctgcaaaagataattattgctgcccagtaaacaaaatgtatgtcaaatcagtaaagaatttgtttagcataatattgccttatctttcagaagctttcttctatattcttgtgtcttcagtacaatccacttttgtttgaaatccatttgcatattatcttactgtgcatttagtgaattctcaataatgttgtatttgctgacaagaataataaattggaccacaatt

SEQ ID NO: 21115 - DNA, 580 bp, Homo sapiens
  misc_feature 1..580: note = ENST00000554138
  source 1..580: mol_type = unassigned DNA
gatcatgtatcagttgctcatccagtggacgtccaatcagttagttggccattcattcattcattcatgcaggcatccagttataaagacatccattcacccactcaacagaaatctgctgagagcctactacgtgctgggaactattttcacatcggagacaaaacagagggtgacatgaagagcacggcccacttggagcctacggagatggcgttgagcggtttcgcaggagagctcctgccccggaggattaatgcccagcacctggctcatcctccccacacccctagctcttctcccgctttgctccttccagctggggctgagcatggggtcccaaccccgctggtgagaagctcgaggtagggatgaagcggagaatggaaaagtcactcctgaagccattggcttcttgtctgctgttggggtctttattgttcttctggccgtcctcttcctcttcatcaacaagaagctgtgttttgaaacgataggaggccttcctttcctggagcatcgagggaaaagaaagcattctaaagacaagactgggattcacaaggggctgggtaagcat

SEQ ID NO: 21116 - DNA, 870 bp, Homo sapiens
  misc_feature 1..870: note = ENST00000636344
  source 1..870: mol_type = unassigned DNA
cgcaccgggcctgccgaggagcgcgcgcccggccgggctcggcgccggtttcccgaacctgggcggccgtcgggcagccccctcgtccgaccatggcgactgacatcactcctgaagccattggcttcttgtctgctgttggggtctttattgttcttctggccgtcctcttcctcttcatcaacaagaagctgtgttttgaaacgataggaggccttcctttcctggagcatcgagggaaaagaaagcattctaaagacaagactgggattcacaaggggctggctggaagttttgagagtgaaatattcacagccattaagagacctccaaattaatttctcaacatgcttattctatagttcacattcaatccagagcactgaaggaactgaacaactggacactgtagacatcagatagctggccatggtgttggccatggcgtctcaggatgttcagaacttcttccagcctttctcttcctggatatctcgggtttatgaagctctccagcaagcaggagatatgttatctgcttcgctggttaacataagcaaacaagactctaaattgagtgacaaactagatcaggacttagataatattcagattcaggaaacgtactttgaagatgaagaacaagacaatgattggagtcaagaggatgcaaattccttgtttcttgaagtggatcatttctcatgttgtaatagtgatttgcaggactctgcccaaaattcaagcccaagccttagccaacatgcaaaggactcatgttccacaatgtcccagtggcccaattgggccagtgatgaccgcaagttaccacatgtgctttcttctattgcggaggaagagcatcacctt

SEQ ID NO: 21117 - DNA, 740 bp, Homo sapiens
  misc_feature 1..740: note = ENST00000636133
  source 1..740: mol_type = unassigned DNA
gaggagcgcgcgcccggccgggctcggcgccggtttcccgaacctgggcggccgtcgggcagccccctcgtccgaccatggcgactgacatcactcctgaagccattggcttcttgtctgctgttggggtctttattgttcttctggccgtcctcttcctcttcatcaacaagaagctgtgttttgaaacgataggaggccttcctttcctggagcatcgagggaaaagaaagcattctaaagacaagactgggattcacaaggggctggtcaacagctttggggatgacgaagagctgtccacatcttctgacagtgacgaggaggtgatcaaacaatttgagatttccgtgtcccggtcccagagtttccgttcagtgacatctgagaaaggaaagcagacaggattggagcagaaaccaaaattcagccgttcgttgttgacacacggagaagatggcacagaagtatctgcctgcgaagatttggatggagccagccaacggcgttattctgagaatctctcctacggtgaagatgaccacatccctgctcactcacagtccccatgtgaaagaggggatgccaaacaccacggcacatctcaccaagagtccagtgtggtccaaagcctcaggcgccaatccacagagggcagcttggagatggagacagcttttaatagccggggatttgaagattcctatgccactgacagctcctccatgtggagtccagag

SEQ ID NO: 21118 - DNA, 664 bp, Homo sapiens
  misc_feature 1..664: note = ENST00000554436
  source 1..664: mol_type = unassigned DNA
agtgaccaactgcgcggatggcgggatgctccgtgtcttaaccggggtcctgggctgcctgcaggccttgaaagtgctgaaaattgctgcgagtctgggcccctcttacagtggcagcctgttgctctttgatgccctgagagggcatttctgctgtattcggctgcggagctgcaggctcgactgtgcagcttgcgggaaatggcccactgtgactcatctgctggactatgaagccttctgtggctcctcagccaccgataaatgccgctccctgcagttactgggcccagaggatcgtgtttctgtcactgactataagcgacttctggattctggggcaccccatctgttgctggacatcaggcctaagatggagaaaaatttgctgacccctggtctagaacgtggaagcagcatgaaatgaagaggaatttaaggagacagcattgtttttagaattttctttacgttgtctacagtcactcctgaagccattggcttcttgtctgctgttggggtctttattgttcttctggccgtcctcttcctcttcatcaacaagaagctgtgttttgaaacgataggaggccttcctttcctggagcatcgagggaaaagaaagcattctaaagacaagactgggattcacaaggggctgggt

SEQ ID NO: 21119 - DNA, 13978 bp, Homo sapiens
  misc_feature 1..13978: note = ENST00000568344
  source 1..13978: mol_type = unassigned DNA
gggtctgaggttgtaactttaacaggtgtaagtatttctttcctctgtttcagctggaagttttgagagtgaaatattcacagccattaagagacctccaaattaatttctcaacatgcttattctatagttcacattcaatccagagcactgaaggaactgaacaactggacactgtagacatcagatagctggccatggtgttggccatggcgtctcaggatgttcagaacttcttccagcctttctcttcctggatatctcgggtttatgaagctctccagcaagcaggagatatgttatctgcttcgctggttaacataagcaaacaagactctaaattgagtgacaaactagatcaggacttagataatattcagattcaggaaacgtactttgaagatgaagaacaagacaatgattggagtcaagaggatgcaaattccttgtttcttgaagtggatcatttctcatgttgtaatagtgatttgcaggactctgcccaaaattcaagcccaagccttagccaacatgcaaaggactcatgttccacaatgtcccagtggcccaattgggccagtgatgaccgcaagttaccacatgtgctttcttctattgcggaggaagagcatcaccttgaaaagcaaagaagtggccttcaacatggctttgacagccagctccctggtactttagaaactgttaatggaaaaaagcaagtcaacagctttggggatgacgaagagctgtccacatcttctgacagtgacgaggaggtgatcaaacaatttgagatttccgtgtcccggtcccagagtttccgttcagtgacatctgagaaaggaaagcagacaggattggagcagaaaccaaaattcagccgttcgttgttgacacacggagaagatggcacagaagtatctgcctgcgaagatttggatggagccagccaacggcgttattctgagaatctctcctacggtgaagatgaccacatccctgctcactcacagtccccatgtgaaagaggggatgccaaacaccacggcacatctcaccaagagtccagtgtggtccaaagcctcaggcgccaatccacagagggcagcttggagatggagacagcttttaatagccggggatttgaagattcctatgccactgacagctcctccatgtggagtccagaggaacaggacaggaccaatttgcaggtgccatccggggtctcagagcccatctcaaagtgtggtgacctagatgtcatctttgaatatagagccgccagccagaagctcacagtgaccattgtgagggcacagggcctcccagataaggaccgaagtggtgtcaactcctggcaagttcatgtagtgctgctgcctggtaagaaacacaggggcaggacgaacatacagagagggcccaaccccgtcttcagggagaaggtcacctttgccaagctggagcccagagatgtggctgcctgtgctgtccgcttccgcctgtacgctgcccggaagatgacccgagagagaatgatgggagagaaactattctatctcagccacctgcacccagaaggggaaatgaaagtgactctggttctggagccaagaagtaatataagcagtggagggtctccgctcagcccatctgcggtttctcacagtgatagtacttcatccacgcagtcgctgtctcatggaggggcgccagagctgttggtggggctctcgtacaatgccacaacggggcgattatctgtggaaatgatcaaaggcagccatttccgaaacctcgctgttaaccgagcacctgatacatatggaaaactctttctcctcaattctgtgggtcaagagatgtcccgttgcaagacgtccattcggcgtggtcagcccaatcctgtctataaggagacctttgttttccaggtggccctctttcagctgtctgatgtcacgttgatgatttccgtttataacaggcgtactatgaagcgtaaagagatgattggctggattgccctgggccagaacagcagtggagaggaggaacaagatcactgggaggagatgaaggaaaccaaaggccagcagatctgcagatggcacactttgctggaatcctaggtttgctaacctgcatttgtgtgctgtgtccaccttggttacctgtgttgctgtctactgacactaagtgtcctggcaagggtttcagggtttcaaaaacagattccactaacccctaggacattgtgagtgggagttttgggtttctcaatggtctgatttggatttaaatattgtaattttaaaaacacacatacacagtgaagtgtccgtatggaaaatattataccacaattaagaccactgatgagttaatttgtgccaatagatcattgagttttagttcagggtatggggtgaagcttcttctgctgtctctgtttgcttgaagagtaacctgagattgcaagggagctgttaattgttactatttgcaaccatttaggtggatgaatcagaattttcttaatatggtacaaaaaactccaaaatatagatatgaatcagatgctgagcctcataaaagaatcaaactctaatccataaactcttatttcacatttttctctttatcaaagaaacctatttacctaacgagtaaatattataaacttgcacttttaaaataaatttgtattaattaaatacctcttttatcttatattttgtggtttctatgagatttggttagatgaatcattttgaagcaagaaaagagttcagaaactactgttttaagacaacttgtctccttttgaatatgtaagatttcaaacttgtgactttcaaggtttttatgctgtctttctcacccaataagttcttacagaataagaaaacaaaaaacaagactactgcagtcatagatttattgattttttctgcttctggtgttcttttggattatcctttttctatgttcaattatatatactcatatatgaatattttgaatgtactgcatgtaaaccatgctctttttaaactgagtattttccatcactagagcatagtaaattgtacacagtgagtccttaataaatattgatttgattgactcttcaaagtgaacatgttataacacctgtgaatggagaaatattttcagcttgtgtggaatgacattaagtttttctttgagcatttgaagtgcctataactgtcatttttttatggcatttgcagcaacatatattagtcactacttgcaatctgggcatgtgccattcagaatactgatcttgtatggttatgagcatgggattttacttatgacttaattttacatatttatgcagtgcatgtttactttccttattcataggtctgggcccttaatttcaattactttaaattggcattaataaaaaaatagggaaagaatgtatgtacatttaatccctgcgctcaatgtgcagctcttctgagcaattgctcagtcacctatttttagtttctatgtttcattgtggactttttcctgtctgtgggaagagtgatagctagtgatggctgtatacagttaaaaacacataactcctcctcagctccacgttttgacagattgtaagcgtaggctgtaacacttgaagaacatatttattccttacagtgtgtaatggttatcctgacaagaccagactagggcacaggataactctactatgctttcagggttcagtctttgaatgaaatgatttcatatggaagaatgagaatttgccaaataaattaataccttaattacttttcaggtcatgggagtttcatatatatggctgctcagttattaggaatatgtaataaaaccatgttcctctgggtttttaccctacctttctttgggagatctcagagtgcttttccagcattatatccattaactgctgagtggtctttgcagcgtggctaagtcattgagtagaactgagtgcgattgattaagtagcagcacaaagaagtggcttttcacatctcttactctttatgccttgtgtttaaagggaagtagaacagcctcgctatgctttcctttatgcagtaacataatagcagcattcattttaaaatttacatttgaaaaaaatctgtatatattgtacagacagccctgaatttttccctctcatattttcctgctgctgcatccttgtttcttggtacccaataatcacctatacttcattttctgttcccaagacccacccatttttaaggttttcggctggtgtagtgaagatatttgtgtgcttgatctgccttccaatggtctgtttatgatacagtttacaggaatgcgcaccattttaagggaaggaatgcctgaaaacattttttatttttataattttactatgttggtgctactcaccaaataggatgcatgtacatcttgaatatacagcaacattcaccctcagctgattgtatacatttaagtgctgaagacaagatatataacaatatgtggctgattttttttacctttatttgaaattctagtttagtaagatcttttgattttgtgcacttaaactcccttattttcttggcaaagtctagacacaaatgcatttaacatgtttttcacttgagcttttacatttggttttcaaaagagttatgaaagataattagttggttctgcagtaaaaaactgcttttgcctatttcttccagctaatgattaatatctcatagggagatttgacattgaagcagcactggtttttgttgcttgagtaggtctttcagcgattttgcctgaagagcatgcttttaaaataatatcgttaagagtaaatgatgcgctgggtttatggaaatctgctttatagtgtgccttcttttagggtgtgagtttacactgaattgagaaatcctgatttcaccaattacggtggtggctgttgtactctctactcccctctgactattgttgaatttttaaatggaccattcaccaggcagccgaacacctgctctccgttccctctccttcactggctcccagtgtgatgcacagttgttttggactctgtttttgctgatgctgcataactgttggaggtgggggtgtcttgccttccctaacataagaagaatttgtaatgtctttggatgtggcattccacctgcatgaaatcaggaaaagaatcatcaccatgtttgtgagagggaaaagagtatggcattgcatagtcattcgctttaggcactattaattctgacatccttcattgaaaattaactgacatcaaatgtcaatattctccatagtcctaggtgccagtgagcctgaaacacagcttctgccttttcaatgtgtagatttcatgatattttacaaattattgttacctcttgtgcagttactgtgctttagatgaccttatctgagaaccaaaattcttttctttccagatgaagtactatttaagtagaaactagcattaggttaaatcaaagtgcttctctgatagccaccaatttgatttaattgatgattcggtgtggacaccactgtgggtttccaaaaaaactggttatccttttgcagcagaggacttagtattttaaaaacagaaaagtaagtaggaaagtattatttgtaaatgtcataaaaccagatggaggcatattctttactgataaagaaacaggactagaacacgcatgtggtatctccttttacttttgaggaaactgtggttaaagaacattctattctatttgatctaagagcaaagcaaatgatggataatcctgaaatggtaaaagtatttttgtcttaaaaattattcatttgggcaaagtcatttacaacaaaataaaaagtcatacagcacacctatggaagaattaaagaatacataaatgtgctggatacatttagcatcctccagtgagttgtatgtaaggagagtaaactaataaaccaaaatacatatcagatcaactagctatcacttttctaaaacttgtagaattctgaaaaatatttaaagatgggagaaacgaaactgtgctaagacaatgagattggcatagcacagtgaagttggcacaaactgtgatcctggcctgggtttacatgaaactctgctgtgtggccttaagaaaattacttagccagcctgtatcctggtttcttcaactggaaaatggaaataatacctacctcattaggtgtcttaaaagatatcagtgaaatcacagatgtaatgtgcctagcatagagccgggcatgtagttagcattccgtagttcctccttacagtcatgcctgaaaaagaaaatatttaagatgtgtcttctttttctagcaaatgttattataacactagagaaaaacaaaaaccaacgttcagatactgtaacaaggataggctcatgaagccaggctggattcgtaaataaaggaggcttcatcaggacagcctaatcagagataagcctggtatgtggaggaaattgagccttaatagagtccaactgtggtagaaccaagtctttgcatttatccccttagtttggagggagtacaaatccttgatggtttgtgtgtacctcttgatcgatcacaaacaaggcctctccttgtctccagttctcttattcataaatggacaaggcatcttgtcgcctttatcaaaagagttggtgacaatggcagtttgactacatatttcaactgtgatccaaaaaagtaaaataaatgatgtgatactatactgagactgttttaaaaatggataacactttctttaaaacctgcattatatatccattttatatcctgatagccaaacattttaaaatactctaataacacagctctcaaaacgtatctgtttgactggaatgtcctgctcagaacaaattatcactgtttcccttatgagatcctaatgaaagaaattcagttgatactactttttaaaatgggttttaagagtggcttgttgatataatagcgcatccacttgttctcaagtgattcaaaccttgagtaaaaaggagagtttctggagaatttagaagaatctttgttgacatttaatctagagaagtcttcaggagcaaaccacttcaagttcagtgtaaccaggtgccatgagtcagtcatgtgctacttgtggttttaaacgaaacatgattctgggatgagaagtgcgaggctacactcctaatataatcaaattgccaaagcactgttttgagtcctcggtatcccaattaaggagaaacatgaagacattggagaatcacttagcttagggcttttagtagggaataattaaacatgtagggaaggtgaaggagttagatgggaggtaagaaggctgaggagatttctagtaacaatgatccaaaagttctaaccagggggatggtgcacactttctcttcttgaccacatggatagatttcagagcatccctctaaatcaagtctggagaattatgtgaaggttgtttctcattaattcaaaatgtattcattgtctagtactatgctatctgggctggcacagaacttaaaatctctttggagtgctatgagtgcacattgaagcagttggtcatcattatacaatgatgcttaccaatatacaactgttaagttagtctaactatgtgccataaacagtagagttccttgttactagtattggaaggtgaaacattggctgaatttattggggcaagtgtctaggaagccttggactggcagtgagtcttggttgcattatatgggaaattggtggggatgggggtgtcatagaatcatcatctttggaagttttttaaaatagaaaaatgtacttgaagtcttggttctgctaaagaagaatgagaggacacccatgaatataccctttataaagttccttctaatatttaggtgtaacgttaaaaaagaatcaacaataacactccaggcctgtcttcttccactttggacattttttccacattgatttttctctgcatcatagaaagttttctctgaagagttcctatttgggttttgtttagggctttggggatgcctgcaggctcagggggagtttcctctcctatggtgctttgactgtttttgtttcccttgggtcacaaaaccatatcctagacacacagacaataatcaccttatttatatccactgtggaacctgtgaaacagctcgaggctttacagaacaagctcataggcagtcatggagatctgaggcctttcttggaatgaagccgctaacttgctaactgctttccattgctcactaatgctgccttaaggtttcttcatgggaatttttacttcatgcctttgagtgacagtgttaccagttttaccttgaggatgatgagaaggctgacttcctattgtattgccatatttatgcattatttttgtttacgtcatttcccccttgaagtatctagttgctggggttttgtttgttttatacaaaatttattcattcaaaaagatctttataggttgggcatggtggctcacacctgtaatcccagaactttgggaggccgaggtgggagaacagcttgcgtccaggatttctagtccagcctgggcaacatagtgagatcttgtctctacaaaataccaaacattcgctgggtatggtggtgtgcgcctatagtcccagctcctcaggaagctgaggtgggaggattgcttgaacctgtgaggtcaaggctgcagtgagccgggatcatgccactgcattcagcctgggtagcagagtgagactctgtctcaaaaaaaccaaaaaacaagacctttttaagtgtaaatgttccagactcagggttaggggttggagaatggcagatggataaaatagtttaagttcaacaatatttttttgttgtttctaaatattctttttaaaaactagagtctgataagaaatctaggtaaataataagatcttttattaaccttgaatttttggcttaatgtatttctgtaattgtctctttccccctttgaaaggcagaagatttagggaaggtgaaagttattaccctgtatctaattaagaaataggtacacttgtttgtcagtctatgctttcattcaaaataaatggatatgttttgtatctgggggaggaaatgcatcattccattccagcagtgaaaagaattatagcatcaaataggatatttagtattcttgacttttataattaaatactgaatgccctttgcaagacagtaagttagatcctggaatgctaggtctgtacaaacttgacacatttcttacaagctctgtgttttaatagtcaaaggcattgctaccctttgctttttgaaagagtgaactggtaacagtagccgccagagaaagaggtgacaatctaaacaaagagccctgcttacctttctgtgactaaaactagtcttaaaaactgaatacatttggggcatccttatgaaataggtaaaggtcaacattgggagtgtccctaccttggcagatagaccaatacttttttcctagactcaacccatttttaaagcaggagtttttccaatggatttattgtttataattctactaaacatgtcttagtccacgcaaattaactcaaaatctttggtggcctgaaaattctgactgaaagcaagtttttcgtgttgcccagttgatagtccataataaaaaatgtacatatcttgtttaaaaaagaccttgatgtttgagaagaaatatcggaagtctgccagtaaaaactctgattaagtgaggaacatgtacattaaaagatattttcatgtaagttattttaagatagttgcattctaggaccatgtttcttttttgagagtgtttctttgtcaagttccttatagccaatgccttgaccaaagcttactaattttgccacatttccttgtgggttatgataatctttattaattcacaactctaccaaattataatacagtcttttattatgccaccatatgaatgcagctgcaaattcaattttgtgaaatacaaagtcctttccagaattttaaaacttaatttcagtatagattttaagtttgtgaataagaaattagtatttgtataccttattatgacagaggtttctgttacaatattttctcttatagtgttgggataggatttgacctgtattttcaggttaaagctggtctttgagatctactttttaagaaattaataaattttattttttagagttttaggttcacagcaaaattgatcctaaaatatagagttctcatatactccaaacacaaccttcttccccgtgaacattttgaacaccacagtgctatatttgttacaactgatgaaccttcattgacataacattatcacccaaagtgcatagttcatattaaggttcactcttggtgttgtgtattttatgggttttgaccaatgcacaatgacgtgtgtccactattgtagtatcatacagaagattttcactgccctaaaaatcctctgtgctctgcctattcattcctccctcccacctaagccctggcatccactggtccttgtactgtccccagagttttgccttttccagaatgtcatacagtatgtagccttttcagattggcttttttttttttcacttagggatagtcatgtaagttttcatgtctttttatggcttgatagttcatttattttaagtgctgaataatatttcattgtctggttgtatcaccatttatgacctatttgctcttatttctagttccagttgctatggcaaattttattaaagtgcgtgctctcaggaaaagctgcatatattttatatgatccatcaaataaaatgtagcaacttccagtctagaataaatttcacctatatgatattgagcttgttttacattgggggaggagatttatgaaaaaatataataatttcataatttatattaccctatctatgagtttttccctccattggaatctaaacagaaagttctgaaggttatgaagacgtgatcccaaatttagtgactctgtagtgtcttttgttgagcaatgagttaaatacctgtcgataaaaagtgttaattatgttattactgattcatgatagaaaatcaccttctgtcgctagtttatatgactttacatttaccactcctgccaagagaaaggaagctttgtgattgtgccccgtcatagttaattgtacaaatcaattaaaaatggtatgtaagcatctggctcacacagcagctctgaattctgaatgaaaagataacccatgctaatgtatatgttgcatgaacaagtagatgggtgttggaaagaaaacactgatagtcactctgggtgaagggggaggcctggccaatgatttgtatctgagaaacattttgagattatttatatgtcttctgactgccctttgctttgtagctacagcaacttgcagaacctggcattattgcagagatgaaggtatagttgtataaagaatattggattaaagttgatgaggcctgtgttctgatatcaaatcttccactaatgagctctaaaatgaatatcaagtcacaattttttcaagccttcattgttgcatctatcagatgggaatagtaatactcattttacctatttttaccaggtggttgtaggaacaggattcattcattccttcattaatataatgaacactttgagaccccactatataacagggccatacatatgacaaggtgatagatggaaagacgttttgcagaatttttgaagacttgcaatgtttttgaagactacaggatagtttgtgatttttatattaaggtcgtatcaactctttatgtcaatatatcaaagtaattgacacttttagagctctgccaatcagtgggccatattcatagaatgtcagtaatctgtctgaatacaagttatagttggtctttagctgttctgtctctgaggagctagaaataaaatattaggttctaatttttttttgttcaaacactgatcatgtaacaaactgcaaatccatgttttcagcaggttcgccaacctttgagttgaatgcagacctttctttagaacaacctaactttgagtacaggcaaagtattaaatggaatagcttttcctcccctacaaagtggatttgaatacagtccttagaaaaattcttcccctgccaaaaaaggtccttcaatctcctttattatttttcttttgaagaatcaaacttgtccatctctcccctcccaagtgactttcctcactcatgtaatcattttcttcataaatgcccttttactatcccacagaaaaagtaaagatttaaaaaatcatttttaaggtacatccaagatttcatagcaatattttatttgtgttcacagtgcaagataaatctgactttctcaatatttttggtcttcatatggcatctgaaacagttgttcacattcacacatttatgtttcaccatatgcatactgtgtacagctctgttgttctaaaatattttattggttttcctttatatctcaacttttgatgggtgtccttgaagaactttcatgaaaaaaatgtaaatgtgaatgattcattcattttgaacatatgtaactattttaggagattttcaggagattttaccctacatggagtacactgttcttagcagggaatgtgctttatattactattctactcacagctggatgctgcagatgtattaacattgtaaacatgtactttttctattctatgcttactttaatacattatttatatgtgctagactgtgctgagttttggtggttgtcaaaggcagtcagtaattttataaatttcacttttgtggatagttaagtataacatggtttagtataaaatctggtcttcctctagatttctaagtcactagaagaatttcttggcaaattgattgttcaaggccagttttgttagttgtaaggtggaagccaccccaatcctctcccagtgtttcataggcattttcagacctggatgctattatagttcctcctctagttttccagtagagaattcgtatgtggtccagaggttcaagagagagagagaaaaaatttctcctcaaaagaattgaacccttactttagaaacttctgacaatcttcagaacattccatgtgggtgtccttgtgtttctcatagtatgacttattgattcatggtgtctcttattaaagaagcatgaatgtatcactagctgttaccagaacaaacagctgtagaatgtaatgacccatcctatttctaaatttacttctatcagtggataatttgtgtataggaaaaggtgtggaaattttttaattgttaaaaactggaatacctttctaccttttgtagtctttaagatttcataatgatggttttaatgtattactatcttactattatgtattgtgtttaaacaagaccaatcagtgaaatattgaatgtcaatactttttgttagaaatgccctctgaaaatgttagaaaatgtaaaactttacctgtgacaaggaataaattcatgattagaagaattatactgtttttcttgtgcaaataatacttaaggcagatgttcagtctcacagtgatgttggaaagcatattttatgcagtctaaacactatttctgtattagatatttaaatgcatgaggataaattctaattgctttttgtttaaaacagaaacatagaagaagcattagccccagtttgtataaaatgtctgctgcaactgaattcatgatagttcatgaaaactgaaaatcattccaattttgtaaaactgctgctactggttttatcaataaagttttagcagatggcttata

SEQ ID NO: 21120 - DNA, 3219 bp, Homo sapiens
  misc_feature 1..3219: note = ENST00000555409
  source 1..3219: mol_type = unassigned DNA
tgtaactttaacaggtgtaagtatttctttcctctgtttcagctggaagttttgagagtgaaatattcacagccattaagagacctccaaattaatttctcaacatgcttattctatagttcacattcaatccagagcactgaaggaactgaacaactggacactgtagacatcagatagctggccatggtgttggccatggcgtctcaggatgttcagaacttcttccagcctttctcttcctggatatctcgggtttatgaagctctccagcaagcaggagatatgttatctgcttcgctggttaacataagcaaacaagactctaaattgagtgacaaactagatcaggacttagataatattcagattcaggaaacgtactttgaagatgaagaacaagacaatgattggagtcaagaggatgcaaattccttgtttcttgaagtggatcatttctcatgttgtaatagtgatttgcaggactctgcccaaaattcaagcccaagccttagccaacatgcaaaggactcatgttccacaatgtcccagtggcccaattgggccagtgatgaccgcaagttaccacatgtgctttcttctattgcggaggaagagcatcaccttgaaaagcaaagaagtggccttcaacatggctttgacagccagctccctggtactttagaaactgttaatggaaaaaagcaagtcaacagctttggggatgacgaagagctgtccacatcttctgacagtgacgaggaggtgatcaaacaatttgagatttccgtgtcccggtcccagagtttccgttcagtgacatctgagaaaggaaagcagacaggattggagcagaaaccaaaattcagccgttcgttgttgacacacggagaagatggcacagaagtatctgcctgcgaagatttggatggagccagccaacggcgttattctgagaatctctcctacggtgaagatgaccacatccctgctcactcacagtccccatgtgaaagaggggatgccaaacaccacggcacatctcaccaagagtccagtgtggtccaaagcctcaggcgccaatccacagagggcagcttggagatggagacagcttttaatagccggggatttgaagattcctatgccactgacagctcctccatgtggagtccagaggctaatttgaatcttaaaagaaaaggatatttattagatgtctactgtctgtcaagtcctctactttttacaacatccctacacagaaggaacaggacaggaccaatttgcaggtgccatccggggtctcagagcccatctcaaagtgtggtgacctagatgtcatctttgaatatagagccgccagccagaagctcacagtgaccattgtgagggcacagggcctcccagataaggaccgaagtggtgtcaactcctggcaagttcatgtagtgctgctgcctggtaagaaacacaggggcaggacgaacatacagagagggcccaaccccgtcttcagggagaaggtcacctttgccaagctggagcccagagatgtggctgcctgtgctgtccgcttccgcctgtacgctgcccggaagatgacccgagagagaatgatgggagagaaactattctatctcagccacctgcacccagaaggggaaatgaaagtgactctggttctggagccaagaagtaatataagcagtggagggtctccgctcagcccatctgcggtttctcacagtgatagtacttcatccacgcagtcgctgtctcatggaggggcgccagagctgttggtggggctctcgtacaatgccacaacggggcgattatctgtggaaatgatcaaaggcagccatttccgaaacctcgctgttaaccgagcacctgatacatatggaaaactctttctcctcaattctgtgggtcaagagatgtcccgttgcaagacgtccattcggcgtggtcagcccaatcctgtctataaggagacctttgttttccaggtggccctctttcagctgtctgatgtcacgttgatgatttccgtttataacaggcgtactatgaagcgtaaagagatgattggctggattgccctgggccagaacagcagtggagaggaggaacaagatcactgggaggagatgaaggaaaccaaaggccagcagatctgcagatggcacactttgctggaatcctaggtttgctaacctgcatttgtgtgctgtgtccaccttggttacctgtgttgctgtctactgacactaagtgtcctggcaagggtttcagggtttcaaaaacagattccactaacccctaggacattgtgagtgggagttttgggtttctcaatggtctgatttggatttaaatattgtaattttaaaaacacacatacacagtgaagtgtccgtatggaaaatattataccacaattaagaccactgatgagttaatttgtgccaatagatcattgagttttagttcagggtatggggtgaagcttcttctgctgtctctgtttgcttgaagagtaacctgagattgcaagggagctgttaattgttactatttgcaaccatttaggtggatgaatcagaattttcttaatatggtacaaaaaactccaaaatatagatatgaatcagatgctgagcctcataaaagaatcaaactctaatccataaactcttatttcacatttttctctttatcaaagaaacctatttacctaacgagtaaatattataaacttgcacttttaaaataaatttgtattaattaaatacctcttttatcttatattttgtggtttctatgagatttggttagatgaatcattttgaagcaagaaaagagttcagaaactactgttttaagacaacttgtctccttttgaatatgtaagatttcaaacttgtgactttcaaggtttttatgctgtctttctcacccaataagttcttacagaataagaaaacaaaaaacaagactactgcagtcatagatttattgattttttctgcttctggtgttcttttggattatcctttttctatgttcaattatatatactcatatatgaatattttgaatgtactgcatgtaaaccatgctctttttaaactgagtattttccatcactagagcatagtaaattgtacacagtgagtccttaataaatattgatttgattgactcttcaaa

SEQ ID NO: 21121 - DNA, 2029 bp, Homo sapiens
  misc_feature 1..2029: note = ENST00000430451
  source 1..2029: mol_type = unassigned DNA
tgaatcttaaaagaaaaggatatttattagatgtctactgtctgtcaagtcctctactttttacaacatccctacacagaaggaacaggacaggaccaatttgcaggtgccatccggggtctcagagcccatctcaaagtgtggtgacctagatgtcatctttgaatatagagccgccagccagaagctcacagtgaccattgtgagggcacagggcctcccagataaggaccgaagtggtgtcaactcctggcaagttcatgtagtgctgctgcctggtaagaaacacaggggcaggacgaacatacagagagggcccaaccccgtcttcagggagaaggtcacctttgccaagctggagcccagagatgtggctgcctgtgctgtccgcttccgcctgtacgctgcccggaagatgacccgagagagaatgatgggagagaaactattctatctcagccacctgcacccagaaggggaaatgaaagtgactctggttctggagccaagaagtaatataagcagtggagggtctccgctcagcccatctgcggtttctcacagtgatagtacttcatccacgcagtcgctgtctcatggaggggcgccagagctgttggtggggctctcgtacaatgccacaacggggcgattatctgtggaaatgatcaaaggcagccatttccgaaacctcgctgttaaccgagcacctgatacatatggaaaactctttctcctcaattctgtgggtcaagagatgtcccgttgcaagacgtccattcggcgtggtcagcccaatcctgtctataaggagacctttgttttccaggtggccctctttcagctgtctgatgtcacgttgatgatttccgtttataacaggcgtactatgaagcgtaaagagatgattggctggattgccctgggccagaacagcagtggagaggaggaacaagatcactgggaggagatgaaggaaaccaaaggccagcagatctgcagatggcacactttgctggaatcctaggtttgctaacctgcatttgtgtgctgtgtccaccttggttacctgtgttgctgtctactgacactaagtgtcctggcaagggtttcagggtttcaaaaacagattccactaacccctaggacattgtgagtgggagttttgggtttctcaatggtctgatttggatttaaatattgtaattttaaaaacacacatacacagtgaagtgtccgtatggaaaatattataccacaattaagaccactgatgagttaatttgtgccaatagatcattgagttttagttcagggtatggggtgaagcttcttctgctgtctctgtttgcttgaagagtaacctgagattgcaagggagctgttaattgttactatttgcaaccatttaggtggatgaatcagaattttcttaatatggtacaaaaaactccaaaatatagatatgaatcagatgctgagcctcataaaagaatcaaactctaatccataaactcttatttcacatttttctctttatcaaagaaacctatttacctaacgagtaaatattataaacttgcacttttaaaataaatttgtattaattaaatacctcttttatcttatattttgtggtttctatgagatttggttagatgaatcattttgaagcaagaaaagagttcagaaactactgttttaagacaacttgtctccttttgaatatgtaagatttcaaacttgtgactttcaaggtttttatgctgtctttctcacccaataagttcttacagaataagaaaacaaaaaacaagactactgcagtcatagatttattgattttttctgcttctggtgttcttttggattatcctttttctatgttcaattatatatactcatatatgaatattttgaatgtactgcatgtaaaccatgctctttttaaactgagtattttccatcactagagcatagtaaattgtacacagtgagtccttaataaatattgatttgattgactctt

SEQ ID NO: 21122 - DNA, 580 bp, Homo sapiens
  misc_feature 1..580: note = ENST00000570264
  source 1..580: mol_type = unassigned DNA
ctctgcaagcctcaccgcaaccgtgctaggcgcgtcgggtggggcgggaataaagtttttccaacccagtttggggagagggctggatgggaaggaccctccctgctgcagacttcatggcaggctgcactgtgtcccctcggctccacggctgccccgggggcgctgctttcgttggaaccattaaacgagggttttctttctagaatctctggtctgctgctgtgcagatggacctgccggcactgctgtcagaagtgctacgagtccagctgttgccagtcaagtgaggatgaagttgaaattctgggacctttccctgctcagacccctccctggctgatggccagccggagcagtgacaaggatggtgactctgtccacacggccagcgaagtcccgctgaccccacggaccaattccccggatggaagacgctcgtcctcagacacatccaagtctacatacagcctgacgcggaggatttcgagtcttgagtcaagacgtcccagctctccactcatcgatattaaacccatcgagtttggcgttctcagcgccaagaaggagcccatccaac

SEQ ID NO: 21123 - DNA, 551 bp, Homo sapiens
  misc_feature 1..551: note = ENST00000566261
  source 1..551: mol_type = unassigned DNA
agtttttccaacccagtttggggagagggctggatgggaaggaccctccctgctgcagacttcatggcaggctgcactgtgtcccctcggctccacggctgccccgggggcgctgctttcgggttttctttctagaatctctggtctgctgctgtgcagatggacctgccggcactgctgtcagaagtgctacgagtccagctgttgccagtcaagtgaggatgaagttgaaattctgggacctttccctgctcagacccctccctggctgatggccagccggagcagtgacaaggatggtgactctgtccacacggccagcgaagtcccgctgaccccacggaccaattccccggatggaagacgctcgtcctcagacacatccaagtctacatacagcctgacgcggaggatttcgagtcttgagtcaagacgtcccagctctccactcatcgatattaaacccatcgagtttggcgttctcagcgccaagaaggagcccatccaaccttcggtgctcagacggacctataaccccgacgactatttca

SEQ ID NO: 21124 - DNA, 3081 bp, Homo sapiens
  misc_feature 1..3081: note = ENST00000355377
  source 1..3081: mol_type = unassigned DNA
ccccggcgtctccggccccgcctgcgctggggtcgctgcagtccccgcagctgccccgggctgcttgcccaggcgccccggccttattccagcctggggagcgcctcggtggggagcacgggacagcgagggaggccgaggcgggggccctgggcgcccgatatctccgaaccggggaggcggccccgattccgagagccggaacgcagggaaaggcaaggacggggcggccggcggaggggcgggcgccgctcatcagccacgccagtcacgtctggggccaccggctgcctttttcttcctttccccctttgctttcttccccctccgctgttggcgagggcaaagtggccgtggcggcgccatgcccgggccggagtgagtgcgcgcgggcgaaaatggcgtacatccagttggaaccattaaacgagggttttctttctagaatctctggtctgctgctgtgcagatggacctgccggcactgctgtcagaagtgctacgagtccagctgttgccagtcaagtgaggatgaagttgaaattctgggacctttccctgctcagacccctccctggctgatggccagccggagcagtgacaaggatggtgactctgtccacacggccagcgaagtcccgctgaccccacggaccaattccccggatggaagacgctcgtcctcagacacatccaagtctacatacagcctgacgcggaggatttcgagtcttgagtcaagacgtcccagctctccactcatcgatattaaacccatcgagtttggcgttctcagcgccaagaaggagcccatccaaccttcggtgctcagacggacctataaccccgacgactatttcaggaagttcgaaccccacctgtactccctcgactccaacagcgacgatgtggactctctgacagacgaggagatcctgtccaagtaccagctgggcatgctgcacttcagcactcagtacgacctgctgcacaaccacctcaccgtgcgcgtgatcgaggccagggacctgccacctcccatctcccacgatggctcgcgccaggacatggcgcactccaacccctacgtcaagatctgtctcctgccagaccagaagaactcaaagcagaccggggtcaaacgcaagacccagaagcccgtgtttgaggagcgctacaccttcgagatccccttcctggaggcccagaggaggaccctgctcctgaccgtggtggattttgataagttctcccgccactgtgtcattgggaaagtttctgtgcctttgtgtgaagttgacctggtcaagggcgggcactggtggaaggcgctgattcccagttctcagaatgaagtggagctgggggagctgcttctgtcactgaattatctcccaagtgctggcagactgaatgttgatgtcattcgagccaagcaacttcttcagacagatgtgagccaaggttcagacccctttgtgaaaatccagctggtgcatggactcaaacttgtgaaaaccaagaagacgtccttcttaaggggcacaattgatcctttctacaatgaatccttcagcttcaaagttccccaagaagaactggaaaatgccagcctagtgtttacagttttcggccacaacatgaagagcagcaatgacttcatcgggaggatcgtcattggccagtactcttcaggcccctctgagaccaaccactggaggcgcatgctcaacacgcaccgcacagccgtggagcagtggcatagcctgaggtcccgagctgagtgtgaccgcgtgtctcctgcctccctggaggtgacctgagggctgcagggaaggcagctttcatttgtttaaaaaaaaaaaaaaaagacggaaaaaaatgtgtcacatactattacatccacacctgcatacacactcgcaacatgtctacacacgtccacacacacagacacacagataccccaaatcctctcagaactgagaggaagctgactattgatcacaaaatggccgccctcagttgagtgaggcctaggaactttccggaagccccatccatagatcacaagctcagtgggctctgccgtgggacttattggcagtgcctgctcttgtcaatactcctgccccaaaatgcactttcaaccctcaggccagagaaaggacctcccaaagggtgccaagctccatcaagactaaatttaccaagagtttggccagtgtgtgggagacttgaacaccccccacttccgaaacacacacctactgggtaacttctgaacaggctgctgttccctggggttcttcaaacctgatacctttctccaaaggtgtaagtatctttgtcttctccgtagtaaatgtgataactagattatgggccatttggagaaaccaaatggcaaccaaaactattccagtgtcagaagcctttcctggcttaacagaattgttcttgtgttagctcatcccagggaacgccctgtgggtatgtatgtgtatgtcctcgtgcatgtgccctcacaggcgaacacgtgtgtgcctatgtgtcctcttggagagcatggcgatgggccaggacctcagccctgagcactgccttctctctgcctctcctgtccagtgagagtccaaccagtgtcctcctgtctgtcagagatcccactttggataaaagtagtgtgtgtgtgtgtgtgtgtgtgtgtgtgtgtgtgtaaagtaaataggatatgatagagcaaaagtaacattttttgaccgaatcatggtgattgtgacccacgaaagacatacaaagacttgatatatggattaaaatggctatcacaccccatccatgatgatcttcttccttaatcatactctgaggatctttctgtgtttttctgtgaacgaatgtcacgtctctcgtgctaaggaattagtgtagttagaatagatctctctctctctctctttctctctctctctttcctctctctctgttggatgcttctgtatctttttccacagcataatgtctggtgtgatggggagctatttattgaaattaaagattatttatttgtgccatgca

SEQ ID NO: 21125 - DNA, 1721 bp, Homo sapiens
  misc_feature 1..1721: note = ENST00000568115
  source 1..1721: mol_type = unassigned DNA
ccggccccgcctgcgctggggtcgctgcagtccccgcagctgccccgggctgcttgcccaggcgccccggccttattccagcctggggagcgcctcggtggggagcacgggacagcgagggaggccgaggcgggggccctgggcgcccgatatctccgaaccggggaggcggccccgattccgagagccggaacgcagggaaaggcaaggacggggcggccggcggaggggcgggcgccgctcatcagccacgccagtcacgtctggggccaccggctgcctttttcttcctttccccctttgctttcttccccctccgctgttggcgagggcaaagtggccgtggcggcgccatgcccgggccggagtgagtgcgcgcgggcgaaaatggcgtacatccagaatctctggtctgctgctgtgcagatggacctgccggcactgctgtcagaagtgctacgagtccagctgttgccagtcaagtgaggatgaagttgaaattctgggacctttccctgctcagacccctccctggctgatggccagccggagcagtgacaaggatggtgactctgtccacacggccagcgaagtcccgctgaccccacggaccaattccccggatggaagacgctcgtcctcagacacatccaagtctacatacagcctgacgcggaggatttcgagtcttgagtcaagacgtcccagctctccactcatcgatattaaacccatcgagtttggcgttctcagcgccaagaaggagcccatccaaccttcggtgctcagacggacctataaccccgacgactatttcaggaagttcgaaccccacctgtactccctcgactccaacagcgacgatgtggactctctgacagacgaggagatcctgtccaagtaccagctgggcatgctgcacttcagcactcagtacgacctgctgcacaaccacctcaccgtgcgcgtgatcgaggccagggacctgccacctcccatctcccacgatggctcgcgccaggacatggcgcactccaacccctacgtcaagatctgtctcctgccagaccagaagaactcaaagcagaccggggtcaaacgcaagacccagaagcccgtgtttgaggagcgctacaccttcgagatccccttcctggaggcccagaggaggaccctgctcctgaccgtggtggattttgataagttctcccgccactgtgtcattgggaaagtttctgtgcctttgtgtgaagttgacctggtcaagggcgggcactggtggaaggcgctgattcccagttctcagaatgaagtggagctgggggagctgcttctgtcactgaattatctcccaagtgctggcagactgaatgttgatgtcattcgagccaagcaacttcttcagacagatgtgagccaaggttcagacccctttgtgaaaatccagctggtgcatggactcaaacttgtgaaaaccaagaagacgtccttcttaaggggcacaattgatcctttctacaatgaatccttcagcttcaaagttccccaagaagaactggaaaatgccagcctagtgtttacaggatccaacagccccataccagcctgcgaactgagtagtcacccagctcatggtatcagtccttggataccctcacctggaaatgaacatttccatggcataaagaagcaagtaaaggcaataaaagtagaatgattga

SEQ ID NO: 21126 - DNA, 5092 bp, Homo sapiens
  misc_feature 1..5092: note = ENST00000562034
  source 1..5092: mol_type = unassigned DNA
ggggctattgagtagtcgcccaacaaacacttgggcgaccgcctactaagtgctggcactggggatacagtgatgaaaacagcacagttcctgcccctctgggtgcgcaatttagtgagaaatgaacatgattaccggctcctggagttcttaatggccgccttcagcacagagaaattaagtgacttgcccaaggccacatagctgcttaggggtcaaggtgggatctcaagaggggactgtggtagatatgttaagcatctcatatggcgatgacccagtgatgttggttttccttctagaacaaggtgttaaactttgttgtcctgtaaagtgccagatactattttttttctcttggaggctcacatggtctctgtcacaactattccactctgactatagcaccaaaactgctatggacagtagtaaatgagtgggcgtggctgtgttccaataaaactttatttgcaggcaccaaaatttgaattttgtatactttgcacgagtcaagaggcattcatcttttttttttttcaaccttttaaaaactcacaaattattcttagctcaagggctgtagcaaaacaggctgcggggctggttttgatctgcgagccttagtttgccaacctctgtttagaatgcatgggttgtctttcttcctctttctttctggtgtgaattggttctcttccatcggtgtcaaacacgtgagcccaggagacccaatgccagaaagactcagcatgcctgggaatgtcagggcaccctctttcatcttctttgctttctctctgctccttgacactcatcttgcacctgggctttgagaaagttggggaggctgtttttcagcagggccatgaggtgaccttgtctctgttcactttggtttcataaatggcctcttttgaccaccacatgtctaggaaatgcttccctgtattcagaaaatggtcatagattattatgaaaaagtatcactttatcctaacattctaaagcactttttcatgcaagccctatgagggtataatattttgctgttttgtgccctgctgtacctgccgggacaatacccagtgcctactgggttccactaggtcttgacaatcacctaattctcatcacagaaagggtgcattttatttttcagctggaccgcacgcaagtatttgcatagtcagtgtcctgtcccacctcaacagcacgcctttgaggtatagagtagcctttccactaaagaagaggtaaccgaggctcagagaggccccctgtcttgcccaagtcacatgatcagtcgatggtgagactaggactctagtacttcctggctcagcttgttgcgtggcccctcagcacctttgggtcttgttctgtgtatggtttgagttttggctttagagagtttgtgataagtgcctttgactatttcccaagctgttgctattcccttaccacttcgaggatttcaattttttcacaagccacgtaccacctatactatgatgatgatgatgatgatgatgatgatgatgatgattatgattattattttagacagggtctcactctgtcgcccaggctggagtgcagtggtgcgatctcggctcactgcaacctctgcttcccaggttcaagtgattctcctgcctcagcctccccagcagctgggattacaggcgcctgccaccacgcctggctaattttttgtatttttagaaaagagggggtttcaccatgttggccaggctggtctcaaactcctgacctcaggtgatccacccgccttggcctcccaaagtactgtgattataggcatcagccaccacgcccagccctacctatgctattattaacttaattttttttctataaatgggctcatttttatttttactttaaaaaaatcatatgaaaaggaaacattatgtcactaatatcataggaaaccaagatcatgtgacatcgcagaaggcaactagaagaataaacccaatgggaataatgccacattactgaattctaggtggacgtggctgtctccaagcctctggacaagatctactttctttgtttaaaagaaaggggatgggggagggtggaaattggtaagtggtaaaagatgttaacatgtagtggtaccaaattgagactttctcctccttaaaggagaatcggaaaaaagataataactttctccctcttgattcaaagttctgagtttgagtcccacctcagttcacctctgggacatgcccgaggttgggatgcagtacttctaacctatctagcctacttggcccatttggaaaaccaccttaaagagaaggagggagtctgtgccttgagaacccaggagacgaagatggggaggcggggtggggccacaacaggaagggaggacctccttcctcaagaggaccagattagggcttcctttttagttccctctatttgtgggtggtgataggaaacaccccaccatcaccattggagcagaattggaaggtagggcctccgggagggcgggggagccaagtaacatccactgtgtgcctgcctgcatgttagctaatcatgtccttttgggttggctacatggctatttctgtataggaaggtttgctcttctcctgaagtgtggctgcattggatagcatgactatctatccgcccgctctgattcataacagcatacggtgcaaatcaaatcgaaatgctaaagtttcccatttatttggtgttggttaaccaggaggctaccagcagccctgaaaatagcaacaccttgttaggatgttaggaagtcagctcccttcccaggatggtaagtggaaatatgcagggcttttttttttttttgtaaaatttttttgagttgctggaatattgctaaactggtcttgtctctctttctttaaccccttcgttcccttacgcccttggcttcatcgtggatcttaaaagggcagttggaaccattaaacgaggtgggttcatttgatgatttgtttggtctggtttctaatcaagaaatgcctgactttcattttggagtcttatgtggggctgtggggatattgaatattcaacaataacctggtgttaataacggcacagtttccattcctttctaccgaaaggagatcccggttttgaaaagacaccagttgacaagacaagtttccctctccacccctacttattccgtttgattatctctgtctgtttcatgtcaccgagattttttaaaaatattttttcccctgctttcaagaagacacagtaatattcattgtgtttcgaacatatcgtatagcccttatgatgttgtataaaccacccacatgtcaagaaagacgttcacataaactacaaaagaaaatacctgcaaatgttttgcttgctactaacggctccagcgagttgatgtttgctatctttgtgcctgcagttggtaaatagaaatggaaaacattttgttctaagtgctgagcagcagagccagaactcctgaatgtctatttctcatccgagatcggctgcttgtaattttgggtgttgtttctcctcttcctcttccccaccctgcccacctcccctctcccccatccccccgcccacctcccccaatggcctcagggttttctttctagaatctctggtctgctgctgtgcagatggacctgccggcactgctgtcagaagtgctacgagtccagctgttgccagtcaagtgaggatgaagttgaaattctgggacctttccctgctcagacccctccctggctgatggccagccggagcagtgacaaggatggtgactctgtccacacggccagcgaagtcccgctgaccccacggaccaattccccggatggaagacgctcgtcctcagacacatccaagtctacatacagcctgacgcggaggatttcgagtcttgagtcaagacgtcccagctctccactcatcgatattaaacccatcgagtttggcgttctcagcgccaagaaggagcccatccaaccttcggtgctcagacggacctataaccccgacgactatttcaggaagttcgaaccccacctgtactccctcgactccaacagcgacgatgtggactctctgacagacgaggagatcctgtccaagtaccagctgggcatgctgcacttcagcactcagtacgacctgctgcacaaccacctcaccgtgcgcgtgatcgaggccagggacctgccacctcccatctcccacgatggctcgcgccaggacatggcgcactccaacccctacgtcaagatctgtctcctgccagaccagaagaactcaaagcagaccggggtcaaacgcaagacccagaagcccgtgtttgaggagcgctacaccttcgagatccccttcctggaggcccagaggaggaccctgctcctgaccgtggtggattttgataagttctcccgccactgtgtcattgggaaagtttctgtgcctttgtgtgaagttgacctggtcaagggcgggcactggtggaaggcgctgattcccagttctcagaatgaagtggagctgggggagctgcttctgtcactgaattatctcccaagtgctggcagactgaatgttgatgtcattcgagccaagcaacttcttcagacagatgtgagccaaggttcagacccctttgtgaaaatccagctggtgcatggactcaaacttgtgaaaaccaagaagacgtccttcttaaggggcacaattgatcctttctacaatgaatccttcagcttcaaagttccccaagaagaactggaaaatgccagcctagtgtttacagttttcggccacaacatgaagagcagcaatgacttcatcgggaggatcgtcattggccagtactcttcaggcccctctgagaccaaccactggaggcgcatgctcaacacgcaccgcacagccgtggagcagtggcatagcctgaggtcccgagctgagtgtgaccgcgtgtctcctgcctccctggaggtgacctgagggctgcagggaaggcagctttcatttgtttaaaaaaaaaaaaaaaagacgg

SEQ ID NO: 21127 - DNA, 1702 bp, Homo sapiens
  misc_feature 1..1702: note = ENST00000562711
  source 1..1702: mol_type = unassigned DNA
gttagctaatcatgtccttttgggttggctacatggctatttctgtataggaaggtttgctcttctcctgaagtgtggctgcattggatagcatgactatctatccgcccgctctgattcataacagcatacggtgcaaatcaaatcgaaatgctaaagtttcccatttatttggtgttggttaaccaggaggctaccagcagccctgaaaatagcaacaccttgttaggatgttaggaagtcagctcccttcccaggatgttggaaccattaaacgagggttttctttctagaatctctggtctgctgctgtgcagatggacctgccggcactgctgtcagaagtgctacgagtccagctgttgccagtcaagtgaggatgaagttgaaattctgggacctttccctgctcagacccctccctggctgatggccagccggagcagtgacaaggatggtgactctgtccacacggccagcgaagtcccgctgaccccacggaccaattccccggatggaagacgctcgtcctcagacacatccaagtctacatacagcctgacgcggaggatttcgagtcttgagtcaagacgtcccagctctccactcatcgatattaaacccatcgagtttggcgttctcagcgccaagaaggagcccatccaaccttcggtgctcagacggacctataaccccgacgactatttcaggaagttcgaaccccacctgtactccctcgactccaacagcgacgatgtggactctctgacagacgaggagatcctgtccaagtaccagctgggcatgctgcacttcagcactcagtacgacctgctgcacaaccacctcaccgtgcgcgtgatcgaggccagggacctgccacctcccatctcccacgatggctcgcgccaggacatggcgcactccaacccctacgtcaagatctgtctcctgccagaccagaagaactcaaagcagaccggggtcaaacgcaagacccagaagcccgtgtttgaggagcgctacaccttcgagatccccttcctggaggcccagaggaggaccctgctcctgaccgtggtggattttgataagttctcccgccactgtgtcattgggaaagtttctgtgcctttgtgtgaagttgacctggtcaagggcgggcactggtggaaggcgctgattcccagttctcagaatgaagtggagctgggggagctgcttctgtcactgaattatctcccaagtgctggcagactgaatgttgatgtcattcgagccaagcaacttcttcagacagatgtgagccaaggttcagacccctttgtgaaaatccagctggtgcatggactcaaacttgtgaaaaccaagaagacgtccttcttaaggggcacaattgatcctttctacaatgaatccttcagcttcaaagttccccaagaagaactggaaaatgccagcctagtgtttacagttttcggccacaacatgaagagcagcaatgacttcatcgggaggatcgtcattggccagtactcttcaggcccctctgagaccaaccactggaggcgcatgctcaacacgcaccgcacagccgtggagcagtggcatagcctgaggtcccgagctgagtgtgaccgcgtgtctcctgcctccctggaggtgacctgagggctgcagggaaggcagctttcatttgttt

SEQ ID NO: 21128 - DNA, 869 bp, Homo sapiens
  misc_feature 1..869: note = ENST00000562274
  source 1..869: mol_type = unassigned DNA
ctaaattggggaatatttcttcatatcatttcacattttgtgcaaaaagcaagacgttgttgagagtttaaggacaccacactgtcaaatttgcattattccatgttgcataaaatgagtctgagagcggtttcatcgtgggtcttaacccccaagggacagagatgccagtccccggggattcctggacagctactgagacctcttcccttcctataggatggccagccggagcagtgacaaggatggtgactctgtccacacggccagcgaagtcccgctgaccccacggaccaattccccggatggaagacgctcgtcctcagacacatccaagtctacatacagcctgacgcggaggatttcgagtcttgagtcaagacgtcccagctctccactcatcgatattaaacccatcgagtttggcgttctcagcgccaagaaggagcccatccaaccttcggtgctcagacggacctataaccccgacgactatttcaggaagttcgaaccccacctgtactccctcgactccaacagcgacgatgtggactctctgacagacgaggagatcctgtccaagtaccagctgggcatgctgcacttcagcactcagtacgacctgctgcacaaccacctcaccgtgcgcgtgatcgaggccagggacctgccacctcccatctcccacgatggctcgcgccaggacatggcgcactccaacccctacgtcaagatctgtctcctgccagaccagaagaactcaaagcagaccggggtcaaacgcaagacccagaagcccgtgtttgaggagcgctacaccttcgagatccccttcctggaggcccagaggaggaccctgctcctgaccg

SEQ ID NO: 21129 - DNA, 531 bp, Homo sapiens
  misc_feature 1..531: note = ENST00000565183
  source 1..531: mol_type = unassigned DNA
gccagaccagaagaactcaaagcagaccggggtcaaacgcaagacccagaagcccgtgtttgaggagcgctacaccttcgagatccccttcctggaggcccagaggaggaccctgctcctgaccgtggtggattttgataagttctcccgccactgtgtcattgggaaagtttctgtgcctttgtgtgaagttgacctggtcaagggcgggcactggtggaaggcgctgattcccagttctcagaatgaagtggagctgggggagctgcttctgtcactgaattatctcccaagtgctggcagactgaatgttgatgtcattcgagccaagcaacttcttcagacagatgtgagccaaggttcagctggtgcatggactcaaacttgtgaaaaccaagaagacgtccttcttaaggggcacaattgatcctttctacaatgaatccttcagcttcaaagttccccaagaagaactggaaaatgccagcctagtgtttacaggatccaacagccccataccagcctgcgaac

SEQ ID NO: 21130 - DNA, 812 bp, Homo sapiens
  misc_feature 1..812: note = ENST00000568433
  source 1..812: mol_type = unassigned DNA
atcgggctcttacaagaaaggaaatgaggcctgtttatttgtgacatcgcttccacaagggacgaggtagaagtgggcctgtcacccagttccttctcctgtcttggcttcgattctgtgggggttggataggacagggggtggaacatcgtgctgacaacccctctcggcccgtggtgtggcagcagctcagcctctgtgttgggggctgcactgcttgatcttggatttgtttctggtgctgtgaatatagtagtggacacatgggcactttctttgcctttatggagaaaaagaatgaagtggagctgggggagctgcttctgtcactgaattatctcccaagtgctggcagactgaatgttgatgtcattcgagccaagcaacttcttcagacagatgtgagccaaggttcagacccctttgtgaaaatccagctggtgcatggactcaaacttgtgaaaaccaagaagacgtccttcttaaggggcacaattgatcctttctacaatgaatccttcagcttcaaagttccccaagaagaactggaaaatgccagcctagtgtttacagttttcggccacaacatgaagagcagcaatgacttcatcgggaggatcgtcattggccagtactcttcaggcccctctgagaccaaccactggaggcgcatgctcaacacgcaccgcacagccgtggagcagtggcatagcctgaggtcccgagctgagtgtgaccgcgtgtctcctgcctccctggaggtgacctgagggctgcagggaaggcagctttcatttgtttaaaaaaaaaaa

SEQ ID NO: 21131 - DNA, 7614 bp, Homo sapiens
  misc_feature 1..7614: note = ENST00000367267
  source 1..7614: mol_type = unassigned DNA
atagagagagggagagactcgagagcgagcgagcgcgggagcgagggccgcagcggcagggccggcggggaagtgggaagagggacctggacttcgggaccccagctgtccccgcccccgcccccgcccccgccctctccaccagctcaggctgaacgcgcccggaacgtcccaggctgtttcctctgccaccatgaggaacattttcaagaggaaccaggagcctattgtggctcctgccaccaccaccgccacgatgcccattggacccgtggacaactccactgagagtgggggtgctggggagagccaggaggacatgtttgccaaactgaaggagaagttattcaatgagataaacaagattcccttaccaccctgggcactgatcgccattgctgtggttgctgggctcctgcttctcacctgctgcttctgcatctgcaagaaatgctgctgcaagaagaagaagaacaagaaggagaagggcaaaggcatgaagaatgccatgaacatgaaggacatgaaagggggtcaggatgacgacgacgcagagacaggcctgactgagggggaaggtgaaggggaggaggagaaagagccagagaacctgggcaaactgcagttttccctggactatgattttcaggctaatcagcttactgtgggcgttctgcaggctgctgaactgcctgccctggacatgggaggcacctcagacccttatgtcaaggtcttcctccttcctgacaagaagaagaaatatgagaccaaagtccatcggaagacactgaaccctgccttcaatgaaaccttcaccttcaaggtgccataccaggagcttgggggcaaaactctggtgatggccatctatgactttgaccgcttctccaaacatgacatcattggagaggtaaaggtgcctatgaacacagtggacctcggccagcccattgaggagtggagagacctgcaaggcggggaaaaggaggagccggagaagctgggcgacatctgcacctccctgcgctatgtgcccacggccgggaagctcactgtctgcatcctggaggctaagaacctcaagaagatggacgtgggcggcctttcagacccgtacgtgaagatccacctgatgcagaatggcaagaggctcaagaagaagaagacaaccgtgaagaagaagaccctgaacccatacttcaacgagtccttcagctttgagatccccttcgagcagattcagaaagtccaggtagtggtcaccgtgctggactatgacaagctgggcaagaacgaagccataggcaagatcttcgtgggcagcaatgccacgggcacagagctgcggcactggtccgacatgctggccaacccccggaggcccatcgcccagtggcactcgctcaagcctgaggaggaggtggatgcactcctgggcaagaacaagtagacagcagcggctgggaccccacacctttcacggacactgacaagatccagagctatcaatacctcagttatgcaaccttagaggttttcttttttctttcatttgttgggtggttgtgtccttgtttttccttgtttttctctttttaaagaccaacttccctttgatggctgtgtgaggagagtcccctaagaggtgaaagagaagcctggctctgttcacggtcccaggagctgtccttgctgcatgccctgtcacagttccctcgactctttcaaagcttcacatctgcctcaccccaagcgaggctctctactggcacaaacttgcagcagttcctgttttttgagccttctggaccaacaaaatggcagcacatcctgcttcctgacagggaaggcatcacagtggccaatgatcgtgtgtgtgtgtgtgtgtgtgtgtgtgtatgtgtgtgtgtgtgtgtgtgtgtgtgtgtgtgtgtgtgtctttgagcatttctcttcattcctggaatgtgtgtgtgtgtgtgtctctttgagcatctctcttcattcctggaatgagccatggacagtaaagttgtgtgggaaaagaaggctctttggggaccctgacatgaagaagtccactaagtgggagatcttctctcatctatggcaaagtctcaggatcctgttcagatatcggggctttcatactcctgttggtggctatttgggaggcagcaagatgtgaagactggatgtgttcagaactaggaccaaacgatgccatcaaatacttcctcctgccagtcatggtttccccagaagtgtagttcctgggacattcatggatatgagctattcactagttgggtcagactaacagggactctcagtcccaaaatctcactcttattgacaataaatatcaaactatgaagaaacagaagtcccattaccagaaagaccaaaattaaactcctggatcttcaccccatccagtgggaaacacagatgctttctccctttccagaatataagcagccaagttcatttgcatttattccccattgtgcttttgcttctgtttctcttttaagtggagcaacactgtctgaagacacgttatctgtgcagagccagagaactttaaaaggaaagtttaaatgttcttagttctcctgaggtccaggtaagaagggggtggtaagaagaggatgggggacagatggctgagatcccttgggaggagatataggggagcactggaattcccccgactcccactccttgctcccttggccctctgccctccatgctggagagctgataggtagctggagtggcccagggagacctatgggaaggacccgtcctaccattagggggcttctctctatgaatgctaagaaacaaagggcatccattccaaatgagtagcagaggtgaccttctagggtttctacccatgctcagttgtatcccattccctgttcaccttttgtccccagcactgatataaaagccatatatatgttagtcaggtttgcactgagtcttcttccaatccttcagcctggacaacagagtgaggtccccttgtggccagaggccagccctccttgcctgccttcctttgacctctcttttccatccatgaagccctcaggcccttgccattttttcaccacagaaaactcatggcttctccagaagcctgagtatctctctttcccagcacaaatggcagcatctctatcctgccccatctgggccacttcagcttcctgtagacacccaagacagatggacagtgttggagggaatcaggctttgaggatccagtgtgaagaagttgcagagtgtctttttattttattttaaaaagggggaaggggcttttggttttgctttgttttttggatgaaggagtgagggaaatgagggaatacccccaccagaaacagactggaaagcctgcctgtctcttggagatccttctttgtcttgttagtggtacatgggaagttatgtttttactggtgtgtgtgtgtgtgtgtgtgtgtgtacttaatgatgggaaggtaagactctgatcaggattatgaactgcggtccttgggaccaaaggtgtggtcatggtagagagttgtaggacaatagggtgttttcagaatctgggtggccacagagtgggatttcctggtatggacatcagaagtcactggactcttctcccaaccccagagttatgggattttggtgctttctcagggtctctccccagactcactcttctcacccatatcccacagactcactcatggagacccccttgtcaatatcccctctacctttactcctttgccctttcccaattcatcttctaccacctggattcttttccattcatgaacttcattcagcccttccaaagcccaagatttgcattcccttgacagggaggaaaggcaatggtaggaacctctggtggtctgggtgtctatgtgcctggtgaccagggctggatttttattactctgagcccactgctagtgaggagccttgaggggtggggacaggttgctgagtgattttgaacgttgacaccagtgtggagccagtgtgggtgtggggagcagtgccttcctcaggtcccagctggtcctgatatgccacgtagtggatggcatctgtcttggtccatgggcttggtgggaacatgcttctgcttgtgtgttttccatacctgagggctgacgtagcttaaaccacagggcatcatgccaaacactcactgctgggcaggtttatttctggggatgtcagggtactggggtgtaggcactaagcaggatagagttagggtgtctggctagtaaggggttctggacgcctctggggctgtgagttttcatctcaaagtctgttccagagaaaggaaagtagtatagaggtgatttttagagaagctgagaccatgaaaacaagcctaatcccatccagaaactggggtaaagtctgaaagttcgttttcttcttcctccctgaataattgttccagaagggatgctaactctgccagagctacaggcagatttttgggctttggaagtggaagctgaggcctggggaaggctgggtaaggaatgctggggcaatctcagacagtaggcaggtgcttggcatgaatgagaagtgactttcctggagtccctcagtagaggatgagatagcagggattaggccacagtctcagatcctgatcttttttcttcctaggaaagcatacataacttgtgtctgcagaatcagtgtgggatgattttgctggcccaaggcttcagcgagagggagaagagaggtcactacagccctcctgtgggtaaaagcagctctcttataaacctgcctccatgcagtggggtgggggtaagggtgggtgacagcaaagaggttgaggaacctccctgggtttggggagtgagagcttccatgttcccttaatgtcctaggttaattcataaggcatctgagtcctgggtctcacccagcctcacagagagaaaaactgtccctgagggtgtcccctcccactcaaaggtagaaagagattgagccaggaactgccctcatatcctctgctctgccccttcccttccctttcctctgcccctcccacctaaagctgtttggggccctttctcagagccctgggtggtggcaggcagggaggagtcccaagatcctggtggccctgagccccatgctatggttgccagatttggcaaataaaaatacaggatgtccagttacatttgaatttcagttcaacaacaaacaattattaagtgtaaatatgtcctaggcaaatagttgggacatatactaaaaaataatttgttgtttatctgaaattcaaatgtaactggtcatcctgcattgtgtctgggaaccctaccctatgacttttccccctctccctttggtcccaaggggccaggaaccccaaggatttgacttaaccagttttttgaactgcaatattgagaaggggacactgtgacttgaagacacatgaattactttattttttaagcaacaacaaaataagaaccttctgaagccatttgagcctcatctgcccccatccgtgtatatttaattatatataaaagaagataattacctagaaacatatgaacagaatcttgtttaatcaagatgcatgtctataactttctgtaaatagccgcatggcaatgctgagagtccccttgatccccaacctcaaacccattttacagaactggttgaggctgctcctttgattttatgtcgtgtaaagtctttgttccccagccccacccctgcctcctcccatcgggaaaccccccatgggagtcatcagtgggcgggagtcggtgcctgctccagtccagccctgccttgggagatgctggaggaccctgtcgccctgaaggcctgtttgctgcacatctgcctgcagagccaaacctcagggcccggtgcagtgtccagcctggtatctggcatcccagtagcttccatgttctgtgtatgtgtgtggtgtgccccttcctcccactgtttgaattcactgaaaagccataaagggggcctcctgctggagatttggcctcccttggctcctcccaggagcccccatgtctctccaactggctccccacagaccacttctgaagggctcacctgttgtcactccctcctgctccctcagtcccgtgtcatgagaatggacggtgtccagggcttccggtggggtctcaggagatgcccatgctggccctgcccgagctggctttctcggcctgggttcacagttcagctccatctctacgctgggcgaggagcagacagcagtgggactccatggttctggatacctttcctggggtccctgtggaggcaaccaggattttcaggagcagccagtcagcagctcagccagggatgacagaaccatccctgcttactcacctctgtagtgtgagggtctgtgggtggtgatggaggagggactcagggagaggccggtgaatacaggggctgacgctcttccctcgtgcatcctcctgcagtctgacagaaagcagcccaatagcggggcaacctcagggctaccagcgatcccctgagagtggggtgggcaggttcagctgtgagagaggctcaggcagagcaggtgtggactaagtcccctgaccttcacacctgctccccagagaagccccagccagttgcaccaagtagcagaggtgagtagaggggcctgggggcttccaaggccccaggtcatcctgttgaactgagagggacaggtagcccccctgcctgcggcccctggccccatgggcacctgagggcagtactgcatgggaagagcccaggatgcctcaggcctggcaactgtgacaagtatgaggaaggagagagaacgggaagggaatcaggcagggcgcattcgaggaggccagaggtggcgaggcaggcttgccctgcacaaaccacaacagaagttgcacacagaagtcccagggacctttgtgctgggaactgaaagagtggggaaggtggaggggaccatttcagagcaggctggaatcaggtgcttggaccagtgaagacatgtcttgcttcctccagctctctctggggccctcccactctccacacccacagcagagacaaattgaggcaagagttgagagagcatctgtctggtgaggtgatgggagcagtgtgcatggggcaccaggagttcctccatcccacctgccttagcgatcaggactttaggggggcctcttcaaagatagtgacccttctgccctgactcctgcccatctaaggacttgatttgctgctttctgaaaaccctggggctgaaaacttcaaaatcagggcctggcagagcctagcttcgccaaggtcagcccaccaggagccctgccttcgtctccataggaaggacacatgtacagcccttgcccccggccctctcattcccacttctgcttggcaatgctctccatctcccttatgtggactcttgttcttgtctgatctcttgtcaaattgttattttgtaatgaactgcgtctccttattaaagaaatgagctgaaagaaa

SEQ ID NO: 21132 - DNA, 7598 bp, Homo sapiens
  misc_feature 1..7598: note = ENST00000367268
  source 1..7598: mol_type = unassigned DNA
acttcggagccgagttggggcagcggtggagcggggacttcgcgcccccaggggaacgggcgcccctgcgaaaccgtcgccagccacgcgtccttgccgtccgacgccccctcacattggagaccccggatctctcccgcctccttcgggtcgctctccgctgtttcctctgccaccatgaggaacattttcaagaggaaccaggagcctattgtggctcctgccaccaccaccgccacgatgcccattggacccgtggacaactccactgagagtgggggtgctggggagagccaggaggacatgtttgccaaactgaaggagaagttattcaatgagataaacaagattcccttaccaccctgggcactgatcgccattgctgtggttgctgggctcctgcttctcacctgctgcttctgcatctgcaagaaatgctgctgcaagaagaagaagaacaagaaggagaagggcaaaggcatgaagaatgccatgaacatgaaggacatgaaagggggtcaggatgacgacgacgcagagacaggcctgactgagggggaaggtgaaggggaggaggagaaagagccagagaacctgggcaaactgcagttttccctggactatgattttcaggctaatcagcttactgtgggcgttctgcaggctgctgaactgcctgccctggacatgggaggcacctcagacccttatgtcaaggtcttcctccttcctgacaagaagaagaaatatgagaccaaagtccatcggaagacactgaaccctgccttcaatgaaaccttcaccttcaaggtgccataccaggagcttgggggcaaaactctggtgatggccatctatgactttgaccgcttctccaaacatgacatcattggagaggtaaaggtgcctatgaacacagtggacctcggccagcccattgaggagtggagagacctgcaaggcggggaaaaggaggagccggagaagctgggcgacatctgcacctccctgcgctatgtgcccacggccgggaagctcactgtctgcatcctggaggctaagaacctcaagaagatggacgtgggcggcctttcagacccgtacgtgaagatccacctgatgcagaatggcaagaggctcaagaagaagaagacaaccgtgaagaagaagaccctgaacccatacttcaacgagtccttcagctttgagatccccttcgagcagattcagaaagtccaggtagtggtcaccgtgctggactatgacaagctgggcaagaacgaagccataggcaagatcttcgtgggcagcaatgccacgggcacagagctgcggcactggtccgacatgctggccaacccccggaggcccatcgcccagtggcactcgctcaagcctgaggaggaggtggatgcactcctgggcaagaacaagtagacagcagcggctgggaccccacacctttcacggacactgacaagatccagagctatcaatacctcagttatgcaaccttagaggttttcttttttctttcatttgttgggtggttgtgtccttgtttttccttgtttttctctttttaaagaccaacttccctttgatggctgtgtgaggagagtcccctaagaggtgaaagagaagcctggctctgttcacggtcccaggagctgtccttgctgcatgccctgtcacagttccctcgactctttcaaagcttcacatctgcctcaccccaagcgaggctctctactggcacaaacttgcagcagttcctgttttttgagccttctggaccaacaaaatggcagcacatcctgcttcctgacagggaaggcatcacagtggccaatgatcgtgtgtgtgtgtgtgtgtgtgtgtgtgtatgtgtgtgtgtgtgtgtgtgtgtgtgtgtgtgtgtgtgtctttgagcatttctcttcattcctggaatgtgtgtgtgtgtgtgtctctttgagcatctctcttcattcctggaatgagccatggacagtaaagttgtgtgggaaaagaaggctctttggggaccctgacatgaagaagtccactaagtgggagatcttctctcatctatggcaaagtctcaggatcctgttcagatatcggggctttcatactcctgttggtggctatttgggaggcagcaagatgtgaagactggatgtgttcagaactaggaccaaacgatgccatcaaatacttcctcctgccagtcatggtttccccagaagtgtagttcctgggacattcatggatatgagctattcactagttgggtcagactaacagggactctcagtcccaaaatctcactcttattgacaataaatatcaaactatgaagaaacagaagtcccattaccagaaagaccaaaattaaactcctggatcttcaccccatccagtgggaaacacagatgctttctccctttccagaatataagcagccaagttcatttgcatttattccccattgtgcttttgcttctgtttctcttttaagtggagcaacactgtctgaagacacgttatctgtgcagagccagagaactttaaaaggaaagtttaaatgttcttagttctcctgaggtccaggtaagaagggggtggtaagaagaggatgggggacagatggctgagatcccttgggaggagatataggggagcactggaattcccccgactcccactccttgctcccttggccctctgccctccatgctggagagctgataggtagctggagtggcccagggagacctatgggaaggacccgtcctaccattagggggcttctctctatgaatgctaagaaacaaagggcatccattccaaatgagtagcagaggtgaccttctagggtttctacccatgctcagttgtatcccattccctgttcaccttttgtccccagcactgatataaaagccatatatatgttagtcaggtttgcactgagtcttcttccaatccttcagcctggacaacagagtgaggtccccttgtggccagaggccagccctccttgcctgccttcctttgacctctcttttccatccatgaagccctcaggcccttgccattttttcaccacagaaaactcatggcttctccagaagcctgagtatctctctttcccagcacaaatggcagcatctctatcctgccccatctgggccacttcagcttcctgtagacacccaagacagatggacagtgttggagggaatcaggctttgaggatccagtgtgaagaagttgcagagtgtctttttattttattttaaaaagggggaaggggcttttggttttgctttgttttttggatgaaggagtgagggaaatgagggaatacccccaccagaaacagactggaaagcctgcctgtctcttggagatccttctttgtcttgttagtggtacatgggaagttatgtttttactggtgtgtgtgtgtgtgtgtgtgtgtgtacttaatgatgggaaggtaagactctgatcaggattatgaactgcggtccttgggaccaaaggtgtggtcatggtagagagttgtaggacaatagggtgttttcagaatctgggtggccacagagtgggatttcctggtatggacatcagaagtcactggactcttctcccaaccccagagttatgggattttggtgctttctcagggtctctccccagactcactcttctcacccatatcccacagactcactcatggagacccccttgtcaatatcccctctacctttactcctttgccctttcccaattcatcttctaccacctggattcttttccattcatgaacttcattcagcccttccaaagcccaagatttgcattcccttgacagggaggaaaggcaatggtaggaacctctggtggtctgggtgtctatgtgcctggtgaccagggctggatttttattactctgagcccactgctagtgaggagccttgaggggtggggacaggttgctgagtgattttgaacgttgacaccagtgtggagccagtgtgggtgtggggagcagtgccttcctcaggtcccagctggtcctgatatgccacgtagtggatggcatctgtcttggtccatgggcttggtgggaacatgcttctgcttgtgtgttttccatacctgagggctgacgtagcttaaaccacagggcatcatgccaaacactcactgctgggcaggtttatttctggggatgtcagggtactggggtgtaggcactaagcaggatagagttagggtgtctggctagtaaggggttctggacgcctctggggctgtgagttttcatctcaaagtctgttccagagaaaggaaagtagtatagaggtgatttttagagaagctgagaccatgaaaacaagcctaatcccatccagaaactggggtaaagtctgaaagttcgttttcttcttcctccctgaataattgttccagaagggatgctaactctgccagagctacaggcagatttttgggctttggaagtggaagctgaggcctggggaaggctgggtaaggaatgctggggcaatctcagacagtaggcaggtgcttggcatgaatgagaagtgactttcctggagtccctcagtagaggatgagatagcagggattaggccacagtctcagatcctgatcttttttcttcctaggaaagcatacataacttgtgtctgcagaatcagtgtgggatgattttgctggcccaaggcttcagcgagagggagaagagaggtcactacagccctcctgtgggtaaaagcagctctcttataaacctgcctccatgcagtggggtgggggtaagggtgggtgacagcaaagaggttgaggaacctccctgggtttggggagtgagagcttccatgttcccttaatgtcctaggttaattcataaggcatctgagtcctgggtctcacccagcctcacagagagaaaaactgtccctgagggtgtcccctcccactcaaaggtagaaagagattgagccaggaactgccctcatatcctctgctctgccccttcccttccctttcctctgcccctcccacctaaagctgtttggggccctttctcagagccctgggtggtggcaggcagggaggagtcccaagatcctggtggccctgagccccatgctatggttgccagatttggcaaataaaaatacaggatgtccagttacatttgaatttcagttcaacaacaaacaattattaagtgtaaatatgtcctaggcaaatagttgggacatatactaaaaaataatttgttgtttatctgaaattcaaatgtaactggtcatcctgcattgtgtctgggaaccctaccctatgacttttccccctctccctttggtcccaaggggccaggaaccccaaggatttgacttaaccagttttttgaactgcaatattgagaaggggacactgtgacttgaagacacatgaattactttattttttaagcaacaacaaaataagaaccttctgaagccatttgagcctcatctgcccccatccgtgtatatttaattatatataaaagaagataattacctagaaacatatgaacagaatcttgtttaatcaagatgcatgtctataactttctgtaaatagccgcatggcaatgctgagagtccccttgatccccaacctcaaacccattttacagaactggttgaggctgctcctttgattttatgtcgtgtaaagtctttgttccccagccccacccctgcctcctcccatcgggaaaccccccatgggagtcatcagtgggcgggagtcggtgcctgctccagtccagccctgccttgggagatgctggaggaccctgtcgccctgaaggcctgtttgctgcacatctgcctgcagagccaaacctcagggcccggtgcagtgtccagcctggtatctggcatcccagtagcttccatgttctgtgtatgtgtgtggtgtgccccttcctcccactgtttgaattcactgaaaagccataaagggggcctcctgctggagatttggcctcccttggctcctcccaggagcccccatgtctctccaactggctccccacagaccacttctgaagggctcacctgttgtcactccctcctgctccctcagtcccgtgtcatgagaatggacggtgtccagggcttccggtggggtctcaggagatgcccatgctggccctgcccgagctggctttctcggcctgggttcacagttcagctccatctctacgctgggcgaggagcagacagcagtgggactccatggttctggatacctttcctggggtccctgtggaggcaaccaggattttcaggagcagccagtcagcagctcagccagggatgacagaaccatccctgcttactcacctctgtagtgtgagggtctgtgggtggtgatggaggagggactcagggagaggccggtgaatacaggggctgacgctcttccctcgtgcatcctcctgcagtctgacagaaagcagcccaatagcggggcaacctcagggctaccagcgatcccctgagagtggggtgggcaggttcagctgtgagagaggctcaggcagagcaggtgtggactaagtcccctgaccttcacacctgctccccagagaagccccagccagttgcaccaagtagcagaggtgagtagaggggcctgggggcttccaaggccccaggtcatcctgttgaactgagagggacaggtagcccccctgcctgcggcccctggccccatgggcacctgagggcagtactgcatgggaagagcccaggatgcctcaggcctggcaactgtgacaagtatgaggaaggagagagaacgggaagggaatcaggcagggcgcattcgaggaggccagaggtggcgaggcaggcttgccctgcacaaaccacaacagaagttgcacacagaagtcccagggacctttgtgctgggaactgaaagagtggggaaggtggaggggaccatttcagagcaggctggaatcaggtgcttggaccagtgaagacatgtcttgcttcctccagctctctctggggccctcccactctccacacccacagcagagacaaattgaggcaagagttgagagagcatctgtctggtgaggtgatgggagcagtgtgcatggggcaccaggagttcctccatcccacctgccttagcgatcaggactttaggggggcctcttcaaagatagtgacccttctgccctgactcctgcccatctaaggacttgatttgctgctttctgaaaaccctggggctgaaaacttcaaaatcagggcctggcagagcctagcttcgccaaggtcagcccaccaggagccctgccttcgtctccataggaaggacacatgtacagcccttgcccccggccctctcattcccacttctgcttggcaatgctctccatctcccttatgtggactcttgttcttgtctgatctcttgtcaaattgttattttgtaatgaactgcgtctccttattaaagaaatgagctgaaagaaa

SEQ ID NO: 21133 - DNA, 567 bp, Homo sapiens
  misc_feature 1..567: note = ENST00000595557
  source 1..567: mol_type = unassigned DNA
gggcacaacgaggtgatcggcgtgtgccgtgtgggccccgacgctgccgacccgcacggccgcgagcactgggcagagatgctggccaatccccgcaagcccgtggagcactggcatcagctagtggaggtgagtaggggtcccacaccgacccctgacaagcacccgtgcaccctcggccccttcatccatgcaacgaacgccctgcatgttcgtgagtcgcagagccaggcgtcctaggtttcaatccctgctgtgccaactttagctgtgcggcttagagccagttacccaagcgctctgtgcctcaatttacccactaggaaatgggactgttgatagcatcttctgttaggatagaggtgagatgtgctgagttaaacgttctgtaggtggtcgctgctgttgttacccatgaggctaagttgaaaatagagggggctgggcgtgagccaccgcgcctggctattggcttctctctcgggtaggtgtttgcagtggcaatgagatggtcacttggagctccaggtgtataatgctgtatctgttatgataccttcggctgaa

SEQ ID NO: 21134 - DNA, 2915 bp, Homo sapiens
  misc_feature 1..2915: note = ENST00000338916
  source 1..2915: mol_type = unassigned DNA
actctatgtctcctctcgttggattgtgacaccgggaggtcagggaactccaggaccttgttctctgctggattcgcagcaaccagcacagcacgtagggcgtagttggtgctggatggatgtttgttgaatgaatgaatgatgaatggctggcaccttgtctgctcatccctaactcctgttccttcatctgtgcagccctaatctttgtttcctcatctgtccatccctttatttgtgcatcctcattcttagccccttcactgcccttctccatctcttcctccttgttcatttgtccctgttctctgtcctctactccactcatgcccatctctgtccccttgacttacccagtccctgctactatctccatccctaatttctgccctcttgtctgtctactcctaattccttttccttgtccatccctaatacctgtcaccttgtccttcttcctcgaatctccatccctaatccatctgcccctaatctctgtcccctttgcccatccttccttttctcggtgtctctttccacccttatctccacacctgcccaccctgcactcccattctgtttcccatctgcacccttgccccatccctcccacacacaggaccagacggccaccatgtcaggagactacgaggatgacctctgccggcgggcactcatcctggtctcggacctctgtgcgcgggtccgagatgctgacaccaacgacaggtgccaggagttcaatgaccgaatccgaggctatccccggggtccagatgcagacatctccgtgagcctgctgtcggtcatcgtgacattctgtggcattgtccttctgggtgtctctctcttcgtgtcctggaagttgtgctgggtgccctggcgggacaagggaggctcggcagtgggcggtggccccctgcgcaaagacctaggccctggtgtcgggctggcaggcctggtaggcggaggcgggcaccacctggcggctggcctgggtggccatcctctgctgggcggcccacaccaccatgcccatgccgcccaccatccaccctttgctgagctgctggagccaggcagcctggggggttctgacacccctgagccctcctacttggacatggactcgtatccagaggctgcagcagcagcagtggccgctggggtcaaaccgagccaaacatcccctgagctgccctctgaggggggagcaggctctgggttgctcctgctgccccccagtggtgggggcttgcccagtgcccagtcacatcagcaggtcacaagcctggcacccactaccaggtacccagccctgccccgacccctcacccagcagactctgacctcccagccggaccccagcagtgaggagcggccacctgccctgcccttacccctgcctggaggcgaggaaaaagccaaactcattgggcagattaagccagagctgtaccaggggactggccctggtggccggcggagcggtgggggcccaggctctggagaggcaggcacaggggcaccctgtggccgtatcagcttcgccctgcggtacctctatggctcggaccagctggtggtgaggatcctgcaggccctggacctccctgccaaggactccaacggcttctcagacccctacgtcaagatctacctgctgcctgaccgcaagaaaaagtttcagaccaaggtgcacaggaagaccctgaaccccgtcttcaatgagacgtttcaattctcggtgcccctggccgagctggcccaacgcaaactgcacttcagcgtctatgactttgaccgcttctcgcggcacgacctcatcggccaggtggtgctggacaacctcctggagctggccgagcagccccctgaccgcccgctctggagggacatcgtggagggcggctcggaaaaagcagatcttggggagctcaacttctcactctgctacctccccacggccgggcgcctcaccgtgaccatcatcaaagcctctaacctcaaagcgatggacctcactggcttctcagacccctacgtgaaggcctccctgatcagcgaggggcggcgtctgaagaagcggaaaacctccatcaagaagaacacgctgaaccccacctataatgaggcgctggtgttcgacgtggcccccgagagcgtggagaacgtggggctcagcatcgccgtggtagactacgactgcatcgggcacaacgaggtgatcggcgtgtgccgtgtgggccccgacgctgccgacccgcacggccgcgagcactgggcagagatgctggccaatccccgcaagcccgtggagcactggcatcagctagtggaggaaaagactgtgaccagcttcacaaaaggcagcaaaggactatcagagaaagagaactccgagtgaggggtctggcctaggcccgggatcggaccaggctccctcaggaccccatcctttcctgcccggaccgtgaattcatctccttgaagccataacgtccgagctgctggtgcggggcagccctggccctaggcttcctaaccctggaagcgagaggatgagaggaggccggcccagctccttctttcagggtgggggtcattcagcctccactgtgtctgtcttttcttccctggggctccccctcgaggcgaggggccatgcatgtctgggggacccctgccccccaaaaccctctgtctgtctctgtctctttgctgtttgtccaagactcagtgtcccgacccttgttctcgccgtgaatgtcaatgggccaatcctctctgtcctttcagacacacacacacctgtgtccaccccttctgttcgccacacccctgcgtctggccggtccccccactgctgctgctatcaacgccagaataaacacactctgtgggtctcactccaa

SEQ ID NO: 21135 - DNA, 2463 bp, Homo sapiens
  misc_feature 1..2463: note = ENST00000600079
  source 1..2463: mol_type = unassigned DNA
ggcggcagcggcggcagcggcggctccggcccctagatcagacattctctctcattacccggcgcgtgggaacgggtccacagccccttgtccgccctagaacccccatgggctgccgcccgccgccgcctcggctgccacccaggacacggcagagataagcgcaggaccagacggccaccatgtcaggagactacgaggatgacctctgccggcgggcactcatcctggtctcggacctctgtgcgcgggtccgagatgctgacaccaacgacaggtgccaggagttcaatgaccgaatccgaggctatccccggggtccagatgcagacatctccgtgagcctgctgtcggtcatcgtgacattctgtggcattgtccttctgggtgtctctctcttcgtgtcctggaagttgtgctgggtgccctggcgggacaagggaggctcggcagtgggcggtggccccctgcgcaaagacctaggccctggtgtcgggctggcaggcctggtaggcggaggcgggcaccacctggcggctggcctgggtggccatcctctgctgggcggcccacaccaccatgcccatgccgcccaccatccaccctttgctgagctgctggagccaggcagcctggggggttctgacacccctgagccctcctacttggacatggactcgtatccagaggctgcagcagcagcagtggccgctggggtcaaaccgagccaaacatcccctgagctgccctctgaggggggagcaggctctgggttgctcctgctgccccccagtggtgggggcttgcccagtgcccagtcacatcagcaggtcacaagcctggcacccactaccaggtacccagccctgccccgacccctcacccagcagactctgacctcccagccggaccccagcagtgaggagcggccacctgccctgcccttacccctgcctggaggcgaggaaaaagccaaactcattgggcagattaagccagagctgtaccaggggactggccctggtggccggcggagcggtgggggcccaggctctggagaggcaggcacaggggcaccctgtggccgtatcagcttcgccctgcggtacctctatggctcggaccagctggtggtgaggatcctgcaggccctggacctccctgccaaggactccaacggcttctcagacccctacgtcaagatctacctgctgcctgaccgcaagaaaaagtttcagaccaaggtgcacaggaagaccctgaaccccgtcttcaatgagacgtttcaattctcggtgcccctggccgagctggcccaacgcaaactgcacttcagcgtctatgactttgaccgcttctcgcggcacgacctcatcggccaggtggtgctggacaacctcctggagctggccgagcagccccctgaccgcccgctctggagggacatcgtggagggcggctcggaaaaagcagatcttggggagctcaacttctcactctgctacctccccacggccgggcgcctcaccgtgaccatcatcaaagcctctaacctcaaagcgatggacctcactggcttctcagacccctacgtgaaggcctccctgatcagcgaggggcggcgtctgaagaagcggaaaacctccatcaagaagaacacgctgaaccccacctataatgaggcgctggtgttcgacgtggcccccgagagcgtggagaacgtggggctcagcatcgccgtggtagactacgactgcatcgggcacaacgaggtgatcggcgtgtgccgtgtgggccccgacgctgccgacccgcacggccgcgagcactgggcagagatgctggccaatccccgcaagcccgtggagcactggcatcagctagtggaggaaaagactgtgaccagcttcacaaaaggcagcaaaggactatcagagaaagagaactccgagtgaggggtctggcctaggcccgggatcggaccaggctccctcaggaccccatcctttcctgcccggaccgtgaattcatctccttgaagccataacgtccgagctgctggtgcggggcagccctggccctaggcttcctaaccctggaagcgagaggatgagaggaggccggcccagctccttctttcagggtgggggtcattcagcctccactgtgtctgtcttttcttccctggggctccccctcgaggcgaggggccatgcatgtctgggggacccctgccccccaaaaccctctgtctgtctctgtctctttgctgtttgtccaagactcagtgtcccgacccttgttctcgccgtgaatgtcaatgggccaatcctctctgtcctttcagacacacacacacctgtgtccaccccttctgttcgccacacccctgcgtctggccggtccccccactgctgctgctatcaacgccagaataaacacactctgtgggtctcactccaa

SEQ ID NO: 21136 - DNA, 2836 bp, Homo sapiens
  misc_feature 1..2836: note = ENST00000593901
  source 1..2836: mol_type = unassigned DNA
ggcggcggcggcggcagcggcggcagcggcggctccggcccctagatcagacattctctctcattacccggcgcgtgggaacgggtccacagccccttgtccgccctagaacccccatgggctgccgcccgccgccgcctcggctgccacccaggacacggcagagataagcgcagccccttcactgcccttctccatctcttcctccttgttcatttgtccctgttctctgtcctctactccactcatgcccatctctgtccccttgacttacccagtccctgctactatctccatccctaatttctgccctcttgtctgtctactcctaattccttttccttgtccatccctaatacctgtcaccttgtccttcttcctcgaatctccatccctaatccatctgcccctaatctctgtcccctttgcccatccttccttttctcggtgtctctttccacccttatctccacacctgcccaccctgcactcccattctgtttcccatctgcacccttgccccatccctcccacacacaggaccagacggccaccatgtcaggagactacgaggatgacctctgccggcgggcactcatcctggtctcggacctctgtgcgcgggtccgagatgctgacaccaacgacaggtgccaggagttcaatgaccgaatccgaggctatccccggggtccagatgcagacatctccgtgagcctgctgtcggtcatcgtgacattctgtggcattgtccttctgggtgtctctctcttcgtgtcctggaagttgtgctgggtgccctggcgggacaagggaggctcggcagtgggcggtggccccctgcgcaaagacctaggccctggtgtcgggctggcaggcctggtaggcggaggcgggcaccacctggcggctggcctgggtggccatcctctgctgggcggcccacaccaccatgcccatgccgcccaccatccaccctttgctgagctgctggagccaggcagcctggggggttctgacacccctgagccctcctacttggacatggactcgtatccagaggctgcagcagcagcagtggccgctggggtcaaaccgagccaaacatcccctgagctgccctctgaggggggagcaggctctgggttgctcctgctgccccccagtggtgggggcttgcccagtgcccagtcacatcagcaggtcacaagcctggcacccactaccaggtacccagccctgccccgacccctcacccagcagactctgacctcccagccggaccccagcagtgaggagcggccacctgccctgcccttacccctgcctggaggcgaggaaaaagccaaactcattgggcagattaagccagagctgtaccaggggactggccctggtggccggcggagcggtgggggcccaggctctggagaggcaggcacaggggcaccctgtggccgtatcagcttcgccctgcggtacctctatggctcggaccagctggtggtgaggatcctgcaggccctggacctccctgccaaggactccaacggcttctcagacccctacgtcaagatctacctgctgcctgaccgcaagaaaaagtttcagaccaaggtgcacaggaagaccctgaaccccgtcttcaatgagacgtttcaattctcggtgcccctggccgagctggcccaacgcaaactgcacttcagcgtctatgactttgaccgcttctcgcggcacgacctcatcggccaggtggtgctggacaacctcctggagctggccgagcagccccctgaccgcccgctctggagggacatcgtggagggcggctcggaaaaagcagatcttggggagctcaacttctcactctgctacctccccacggccgggcgcctcaccgtgaccatcatcaaagcctctaacctcaaagcgatggacctcactggcttctcagacccctacgtgaaggcctccctgatcagcgaggggcggcgtctgaagaagcggaaaacctccatcaagaagaacacgctgaaccccacctataatgaggcgctggtgttcgacgtggcccccgagagcgtggagaacgtggggctcagcatcgccgtggtagactacgactgcatcgggcacaacgaggtgatcggcgtgtgccgtgtgggccccgacgctgccgacccgcacggccgcgagcactgggcagagatgctggccaatccccgcaagcccgtggagcactggcatcagctagtggaggaaaagactgtgaccagcttcacaaaaggcagcaaaggactatcagagaaagagaactccgagtgaggggtctggcctaggcccgggatcggaccaggctccctcaggaccccatcctttcctgcccggaccgtgaattcatctccttgaagccataacgtccgagctgctggtgcggggcagccctggccctaggcttcctaaccctggaagcgagaggatgagaggaggccggcccagctccttctttcagggtgggggtcattcagcctccactgtgtctgtcttttcttccctggggctccccctcgaggcgaggggccatgcatgtctgggggacccctgccccccaaaaccctctgtctgtctctgtctctttgctgtttgtccaagactcagtgtcccgacccttgttctcgccgtgaatgtcaatgggccaatcctctctgtcctttcagacacacacacacctgtgtccaccccttctgttcgccacacccctgcgtctggccggtccccccactgctgctgctatcaacgccagaataaacacactctgtgggtctcactccaa

SEQ ID NO: 21137 - DNA, 674 bp, Homo sapiens
  misc_feature 1..674: note = ENST00000595117
  source 1..674: mol_type = unassigned DNA
ggaagcctgagccctggatgtcagggtgtaaagcaggaggctccgaccggagagaaaatcagggagagttgaagaggggctgaggcaagatatcgctgaccttttccccaactgcaggaaaaagcagatcttggggagctcaacttctcactctgctacctccccacggccgggcgcctcaccgtgaccatcatcaaagcctctaacctcaaagcgatggacctcactggcttctcagacccctacgtgaaggcctccctgatcagcgaggggcggcgtctgaagaagcggaaaacctccatcaagaagaacacgctgaaccccacctataatgaggcgctggtgttcgacgtggcccccgagagcgtggagaacgtggggctcagcatcgccgtggtagactacgactgcatcgggcacaacgaggtgatcggcgtgtgccgtgtgggccccgacgctgccgacccgcacggccgcgagcactgggcagagatgctggccaatccccgcaagcccgtggagcactggcatcagctagtggaggaaaagactgtgaccagcttcacaaaaggcagcaaaggactatcagagaaagagaactccgagtgaggggtctggcctaggcccgggatcggaccaggctccctcaggaccccatcctttcctgcccggac

SEQ ID NO: 21138 - DNA, 586 bp, Homo sapiens
  misc_feature 1..586: note = ENST00000598997
  source 1..586: mol_type = unassigned DNA
gtagtctctaagccctcaacgggagctgggggcccggaggtgggagggggtggccgggctcccagtgggtcgcctggggtcgggcagctggctcgagtagggcaagatgtgactgttaagctgagctttttctcccggcctcagcccctagatcagacattctctctcattacccggcgcgtgggaacgggtccacagccccttgtccgccctagaacccccatgggctgccgcccgccgccgcctcggctgccacccaggacacggcagagataagcgcaggaccagacggccaccatgtcaggagactacgaggatgacctctgccggcgggcactcatcctggtctcggacctctgtgcgcgggtccgagatgctgacaccaacgacaggtgccaggagttcaatgaccgaatccgaggctatccccggggtccagatgcagacatctccgtgagcctgctgtcggtcatcgtgacattctgtggcattgtccttctgggtgtctctctcttcgtgtcctggaagttgtgctgggtgccctggcgggacaagggaggctcggcagtgggcggtggccccctgc

SEQ ID NO: 21139 - DNA, 4110 bp, Homo sapiens
  misc_feature 1..4110: note = ENST00000255224
  source 1..4110: mol_type = unassigned DNA
gatgagcatgtgttgaatcctcaagagaggagggaggaagcaagaaggaaagcttgaagggaggaggggaggggggcaggtgctgatttcagccctgtagcgtcaggattgcgtcaattcgggttccagccacgtctggagtctcggagacgagcttctcagaagagccaaaacaggaaccgaggtggcaaatcactgtgcgagggcgagtggacctccctctttgcctcctccctgttccaggagctggtgccctgggctctgcgctgttgttttcagcgctccgaaagccggcgcttgagatccaggcaagtgaatccagccaggcagttttcccttcagcacctcggacagaacacgcagtaaaaaatggctccgatcaccaccagccgggaagaatttgatgaaatccccacagtggtggggatcttcagtgcatttggcctggtcttcacagtctctctctttgcatggatctgctgtcagagaaaatcatccaagtctaacaagactcctccatacaagtttgtgcatgtgcttaagggagttgatatttaccctgaaaacctaaatagcaaaaagaagtttggagcagatgataaaaatgaagtaaagaataagccagctgtgccaaagaattcattgcatctggatcttgaaaagagagatctcaatggcaattttcccaaaaccaacctcaaacctggcagtccttctgatctggagaatgcaaccccgaagctctttttagaaggggaaaaagagtcagtttcccctgagagtttaaagtccagcacttcccttacttcagaagagaaacaagagaagctgggaactctcttcttctccttagaatacaacttcgagagaaaagcatttgtggtcaatatcaaggaagcccgtggcttgccagccatggatgagcagtcgatgacctctgacccatatatcaaaatgacgatcctcccagagaagaagcataaagtgaaaactagagtgctgagaaaaaccttggatccagcttttgatgagacctttacattctatgggataccctacacccaaatccaagaattggccttgcacttcacaattttgagttttgacaggttttcaagagatgatatcattggggaagttctaattcctctctcgggaattgaattatctgaaggaaaaatgttaatgaatagagagatcatcaagagaaatgttaggaagtcttcaggacggggtgagttactgatctctctctgctatcagtccaccacaaacactctaactgtggttgtcttaaaagctcgacatctgcctaaatctgatgtgtccggactttcagatccctatgtcaaagtgaacctgtaccatgccaaaaagagaatctccaagaagaagactcatgtgaagaaatgcacccccaatgcagtgttcaatgagctgtttgtctttgatattccttgtgagggccttgaagatataagtgttgaatttttggttttggattctgaaagggggtcccgaaatgaggtaatcgggcagttagtcttgggtgcagcagcagaaggaactggtggagagcactggaaagagatctgtgactaccccaggagacaaattgccaagtggcacgtgctctgtgatggttagcatcctagccgtgagttggaacttaaaggtttttactaggcaaggagaaattttctttctttctatattggattgcaagcttgggaaatcaagctacctttttgttgttgttgttgttgctagaaatggattgaattagtagaccagaaagtaacttcaaatgtgtattatgataatttccctatttattagaagagttggataaattttcataagatattcaatatctccttcagattaccagtgatataactaggaatagtcagacattttatgaatactgtgccagaatcccaaattataaatgtgacaatctcattggaacatgtcacaaaaagttaatgtgattaagatttaaaaacgaaaagtatgccttgccttgtgaaaatttatccatttatcttcaggttggggaaatcaatttttctttaaatccaaagatactaaaaaaatgtcctccagtttgtatttattaattctgtcatgtgcaaatggttgtcctgcatataaaagtatctggtcatttcagtttggtttgtaattatttgatgcaattttatcataagagtaactcagattcatttcaaaaggacagtgaacaagctgagaaattattttatcaaagggctgagttgagaacactgtggctgaaatataatttttctcccccctaaggttacatgtgagtcaaaattttgtaaaatataacctcacataagaaccatggccttggattattcactgcctgtcacaagcctcagtgtggcctgagaaatccctatgtacctttgtgaaattgttgaattagttagtgaataaagaaataaacttcaactagaaatccagttagaagtgcaattttcttataggaaataggtatagtgtgcaagtgtacttttaaggccatcgtttgtacccagagtcggcatggccacctaagtcttcatttaatttattgtcccccagaaaagattaagatgctacttgaaaagactgtgaagattttttacattgccagataaaaagtgttacttaaccaacaaacaaatgtaagactacaaaatcgttcaagagcaattctaatataatttacatatgttcacgcaaaatatgcttaggctgtcaaattagcacaacaaagaatgtgtttcactatcttttctaggctaatttgtcttgagctgttgtctatagagcagtttacagacttgtgtcttgtatcattttccagtgccagggttctgaaattcattcagaacctgttagattaaagctgcaccctgtgattatttgaaaagaattagcttgagagtaatgtcactatatttgagttcttagagaagtatgagtggaacttgagtacagttgaattattaaatatgcaagttagaaattaagtctactgaaaaatttacattttgagtcaggttttgtgtcagtactttagcagtttttgagaatgtgtttgatatcacagtgtttgtaaattctatgaaaaatgcattttccaaacaacttatacatgctttttatgactatgcctaatgtaaagaaaatgtattacattctgtatgtacaaagattaaaaatcaacctcttttttgtgctttaaaatgactttgggattaaaaaagcatatttcccaatcattgtcttcattccactacaaagtcacctcacagcatcttgctccactcggcatctctgtgaaagcaacatgaaatgaactgtagtaggtgtgtagtttggggaagtcaaatggccattttatgtatgtgcatttggtatcatgggccgtggaacagaatatatgttggacctctgaaaagttgtaaggggccaattctaagtattcttcacggcagccagaagttaatggtggtagcagctgaggtatggttgttggacgaggccgatttttttttttttaacatggaacaatgaaaccaacaacaaacatttttaaaattaaaatggataatttgtaaatagtttttagcttttaaaatttaaagtgtttttgagtgtgaaaagttgagtaaaactatttgcaactggttttcagaaaagagaaaagaaacaacaaaggaattgaaacaggcagggagatcttaatacctaatttcatcatttctgaaaatgtactgttttagaatgtattacaatatcaatgtgaatatcttgaatcctgttacaaatcctgcactgtattaaacatgtaaattaattgtttgtctgattagccaatctcaccacccaaatggggaggtatacatgtttgaagaactgtgtaactcagtaattgatttgttctgatgttgtaactcaatagaagtgttttggaaggaagcatggtgtgtgagacagtgtctgttcttttgtgccagctctgtatgatgtttgtaagaccatgtttgtaagacatgaataaattgctgcttttgcccaacccgtttcaatgca

SEQ ID NO: 21140 - DNA, 1142 bp, Homo sapiens
  misc_feature 1..1142: note = ENST00000586678
  source 1..1142: mol_type = unassigned DNA
aattcgggttccagccacgtctggagtctcggagacgagcttctcagaagagccaaaacaggaaccgaggtggcaaatcactgtgcgagggcgagtggacctccctctttgcctcctccctgttccaggagctggtgccctgggctctgcgctgttgttttcagcgctccgaaagccggcgcttgagatccaggcaagtgaatccagccaggcagttttcccttcagcacctcggacagaacacgcatgttcaatgagctgtttgtctttgatattccttgtgagggccttgaagatataagtgttgaatttttggttttggattctgaaagggggtcccgaaatgaggtaatcgggcagttagtcttgggtgcagcagcagaaggaactggtggagagcactggaaagagatctgtgactaccccaggagacaaattgccaagtggcacgtgctctgtgatggttagcatcctagccgtgagttggaacttaaaggtttttactaggcaaggagaaattttctttctttctatattggattgcaagcttgggaaatcaagctacctttttgttgttgttgttgttgctagaaatggattgaattagtagaccagaaagtaacttcaaatgtgtattatgataatttccctatttattagaagagttggataaattttcataagatattcaatatctccttcagattaccagtgatataactaggaatagtcagacattttatgaatactgtgccagaatcccaaattataaatgtgacaatctcattggaacatgtcacaaaaagttaatgtgattaagatttaaaaacgaaaagtatgccttgccttgtgaaaatttatccatttatcttcaggttggggaaatcaatttttctttaaatccaaagatactaaaaaaatgtcctccagtttgtatttattaattctgtcatgtgcaaatggttgtcctgcatataaaagtatctggtcatttcagtttggtttgtaattatttgatgcaattttatcataagagtaactcagattcatttcaaaaggacagtgaacaagctgagaaattattttatcaaagggctgagttgagaacactgtggctgaaatataatttttctcccccctaa

SEQ ID NO: 21141 - DNA, 1765 bp, Homo sapiens
  misc_feature 1..1765: note = ENST00000590752
  source 1..1765: mol_type = unassigned DNA
agaagagccaaaacaggaaccgaggtggcaaatcactgtgcgagggcgagtggacctccctctttgcctcctccctgttccaggagctggtgccctgggctctgcgctgttgttttcagcgctccgaaagccggcgcttgagatccaggcaagtgaatccagccaggcagttttcccttcagcacctcggacagaacacgcagtaaaaaatggctccgatcaccaccagccgggaagaatttgtctctctctttgcatggatctgctgtcagagaaaatcatccaagtctaacaagactcctccatacaagtttgtgcatgtgcttaagggagttgatatttaccctgaaaacctaaatagcaaaaagaagtttggagcagatgataaaaatgaagtaaagaataagccagctgtgccaaagaattcattgcatctggatcttgaaaagagagatctcaatggcaattttcccaaaaccaacctcaaacctggcagtccttctgatctggagaatgcaaccccgaagctctttttagaaggggaaaaagagtcagtttcccctgagagtttaaagtccagcacttcccttacttcagaagagaaacaagagaagctgggaactctcttcttctccttagaatacaacttcgagagaaaagcatttgtggtcaatatcaaggaagcccgtggcttgccagccatggatgagcagtcgatgacctctgacccatatatcaaaatgacgatcctcccagagaagaagcataaagtgaaaactagagtgctgagaaaaaccttggatccagcttttgatgagacctttacattctatgggataccctacacccaaatccaagaattggccttgcacttcacaattttgagttttgacaggttttcaagagatgatatcattggggaagttctaattcctctctcgggaattgaattatctgaaggaaaaatgttaatgaatagagagatcatcaagagaaatgttaggaagtcttcaggacggggtgagttactgatctctctctgctatcagtccaccacaaacactctaactgtggttgtcttaaaagctcgacatctgcctaaatctgatgtgtccggactttcagatccctatgtcaaagtgaacctgtaccatgccaaaaagagaatctccaagaagaagactcatgtgaagaaatgcacccccaatgcagtgttcaatgagctgtttgtctttgatattccttgtgagggccttgaagatataagtgttgaatttttggttttggattctgaaagggggtcccgaaatgaggtaatcgggcagttagtcttgggtgcagcagcagaaggaactggtggagagcactggaaagagatctgtgactaccccaggagacaaattgccaagtggcacgtgctctgtgatggttagcatcctagccgtgagttggaacttaaaggtttttactaggcaaggagaaattttctttctttctatattggattgcaagcttgggaaatcaagctacctttttgttgttgttgttgttgctagaaatggattgaattagtagaccagaaagtaacttcaaatgtgtattatgataatttccctatttattagaagagttggataaattttcataagatattcaatatctccttcagattaccagtgatataactaggaatagtcagacattttatgaatactgtgccagaatcccaaattataaatgtgacaatctcattggaacatgtcac

SEQ ID NO: 21142 - DNA, 746 bp, Homo sapiens
  misc_feature 1..746: note = ENST00000585604
  source 1..746: mol_type = unassigned DNA
gagcttctcagaagagccaaaacaggaaccgaggtggcaaatcactgtgcgagggcgagtggacctccctctttgcctcctccctgttccaggagctggtgccctgggctctgcgctgttgttttcagcgctccgaaagccggcgcttgagatccagaagtcttcaggacggggtgagttactgatctctctctgctatcagtccaccacaaacactctaactgtggttgtcttaaaagctcgacatctgcctaaatctgatgtgtccggactttcagatccctatgtcaaagtgaacctgtaccatgccaaaaagagaatctccaagaagaagactcatgtgaagaaatgcacccccaatgcagtgttcaatgagctgtttgtctttgatattccttgtgagggccttgaagatataagtgttgaatttttggttttggattctgaaagggggtcccgaaatgaggtaatcgggcagttagtcttgggtgcagcagcagaaggaactggtggagagcactggaaagagatctgtgactaccccaggagacaaattgccaagtggcacgtgctctgtgatggttagcatcctagccgtgagttggaacttaaaggtttttactaggcaaggagaaattttctttctttctatattggattgcaagcttgggaaatcaagctacctttttgttgttgttgttgttgctagaaatggattgaattagtagaccagaaagtaacttcaa

SEQ ID NO: 21143 - DNA, 565 bp, Homo sapiens
  misc_feature 1..565: note = ENST00000596867
  source 1..565: mol_type = unassigned DNA
agaagagccaaaacaggaaccgaggtggcaaatcactgtgcgagggcgagtggacctccctctttgcctcctccctgttccaggagctggtgccctgggctctgcgctgttgttttcagcgctccgaaagccggcgcttgagatccaggcaagtgaatccagccaggcagttttcccttcagcacctcggacagaacacgcagtaaaaaatggctccgatcaccaccagccgggaagaatttggtaagcaagaaaaatgttaatgaatagagagatcatcaagagaaatgttaggaagtcttcaggacggggtgagttactgatctctctctgctatcagtccaccacaaacactctaactgtggttgtcttaaaagctcgacatctgcctaaatctgatgtgtccggactttcagatccctatgtcaaagtgaacctgtaccatgccaaaaagagaatctccaagaagaagactcatgtgaagaaatgcacccccaatgcagtgttcaatgagctgtttgtctttgatattccttgtgagggccttgaagatataagtgttgaa

SEQ ID NO: 21144 - DNA, 537 bp, Homo sapiens
  misc_feature 1..537: note = ENST00000589479
  source 1..537: mol_type = unassigned DNA
aaaccaaaagccaaaaataatcctgtgtaggatataatttaaatatcctttaaacatttctaagtaatgggtgtggccaatttattgccaattttaacttcctgtagtaccaaacaagaccacaagatggcaggcagtggtttttcaagcagcgatggtactgctcaaaagcttttagttactcttcaattccttagaatattaaaataaaaataagtaagattatatttaaatgacgatgttatttaaactttaatgaaagtacacacttcaaagttaaaaagatagaaatacttatatcacatttctctttctgcagaagtcttcaggacggggtgagttactgatctctctctgctatcagtccaccacaaacactctaactgtggttgtcttaaaagctcgacatctgcctaaatctgatgtgtccggactttcagatccctatgtcaaagtgaacctgtaccatgccaaaaagagaatctccaagaagaagactcatgtgaagaaatgcacccccaatgcagtgttcaatga

SEQ ID NO: 21145 - DNA, 560 bp, Homo sapiens
  misc_feature 1..560: note = ENST00000593720
  source 1..560: mol_type = unassigned DNA
ttcagcgctccgaaagccggcgcttgagatccaggcaagtgaatccagccaggcagttttcccttcagcacctcggacagaacacgcagtaaaaaatggctccgatcaccaccagccgggaagaatttgatgaaatccccacagtggtggggatcttcagtgcatttggcctggtcttcacagtctctctctttgcatggatctgctgtcagagaaaatcatccaatgaaaactagagtgctgagaaaaaccttggatccagcttttgatgagacctttacattctatgggataccctacacccaaatccaagaattggccttgcacttcacaattttgagttttgacaggttttcaagagatgatatcattggggaagttctaattcctctctcgggaattgaattatctgaaggaaaaatgttaatgaatagagagatcatcaagagaaatgttaggaagtcttcaggacggggtgagttactgatctctctctgctatcagtccaccacaaacactctaactgtggttgtcttaaaagctcgacatctgcctaaatc

SEQ ID NO: 21146 - DNA, 510 bp, Homo sapiens
  misc_feature 1..510: note = ENST00000591820
  source 1..510: mol_type = unassigned DNA
agaagagccaaaacaggaaccgaggtggcaaatcactgtgcgagggcgagtggacctccctctttgcctcctccctgttccaggagctggtgccctgggctctgcgctgttgttttcagcgctccgaaagccggcgcttgagatccagatgaaatccccacagtggtggggatcttcagtgcatttggcctggtcttcacagtctctctctttgcatggatctgctgtcagagaaaatcatccaagtctaacaagactcctccatacaagtttgtgcatgtgcttaagggagttgatatttaccctgaaaacctaaatagcaaaaagaagtttggagcagatgataaaaatgaagtaaagaataagccagctgtgccaaagaattcattgcatctggatcttgaaaagagagatctcaatggcaattttcccaaaaccaacctcaaacctggcagtccttctgatctggagaatgcaaccccgaagctctttttagaaggggaaaaagag

SEQ ID NO: 21147 - DNA, 4854 bp, Homo sapiens
  misc_feature 1..4854: note = ENST00000263846
  source 1..4854: mol_type = unassigned DNA
ccgggcgcgctcacacacgcgctcacacacacacatacacacggcctcgtacacacacacacgctccggcgcgcacacgcggcgcgcaggccggagggaggcggctcggcgctgttcggcggcggcggcagcgtgctccgcgggcgggcgggagggctggcgggcggcccccgctccccggctccgcggctaggtgcagcccgctcggcccccgccctcggacccgcccccgggggtcgcccggccccatgcccagcggcggcggcggagcagcgcgcggccgcgggcggctctgaggagcccggagggaaccggcgacgaggggaccatgtaccgggacccggaggcggccagcccaggggcgccctcgcgcgacgtcctgctggtctctgccatcatcaccgtcagccttagcgtcactgtcgtcctctgcggcctctgccactggtgtcagcgcaaactgggcaaacgctacaagaattccttggagacggtgggcacgccagactcagggcgtgggcgcagtgagaagaaggctatcaagttgcctgcaggagggaaggcggtgaacacagcccccgtgccaggccagacaccccacgatgagtccgaccgccggaccgagccacgttcctccgtctcagacctcgtcaactccctcaccagcgagatgctcatgctctccccaggctccgaggaggatgaggcccacgagggttgcagccgagagaacctgggccggatccagttcagtgtcggctacaacttccaggagtccacgctcaccgtgaagatcatgaaggcccaggagctgccggccaaggacttcagcggcaccagcgaccccttcgtcaagatctacctgctgcccgacaagaagcacaagctggagaccaaggtgaagcggaagaacctgaacccccactggaacgagaccttcctctttgaaggttttccctatgagaaggtggtgcagaggatcctctacctccaagtcctggactatgaccgcttcagccgcaacgaccccattggggaggtgtccatcccccttaacaaggtggacctgacccagatgcagaccttctggaaggatctgaagccatgcagcgatgggagtgggagccgaggggagctgctcttgtctctctgctacaacccctctgccaactccatcatcgtgaacatcatcaaagcccggaacctcaaagccatggacatcgggggcacatcagacccctacgtgaaggtatggctgatgtacaaggacaagcgggtggagaagaagaagacggtgacgatgaagaggaacctgaaccccatcttcaatgagtccttcgccttcgatatccccacggagaagctgagggagacgaccatcatcatcactgtcatggacaaggacaagctcagccgcaatgacgtcatcggcaagatctacctgtcctggaagagcgggccaggggaggtgaagcactggaaggacatgattgcccgtccccggcagcccgtggcccagtggcaccagctgaaggcctgagtggggccaagggaggcccagggggccgagggcccaggtccccatcatgccctcaccactttatgcacaacgcccggcctgagccccctgccatagggaggggaggaccctgagggctcagccagggaggggtcccaggactcaactgggccccgtttctaggaagtaccagccccatcccccacagtccagctccggggaaggggctctgggaggcattttcctgctttgccccttttcttcctgacttactaatactaaagaagttgggggagctcgagagccagacggccagacaggcagacccctccagaggcccgccaggtgggcatggtcccccattttctttaaggcagcacctggagtggagagaggccactccctctccagcccccgatgtggacccggggaggggaggctgaggcgtttggccccggcctggccaggagaggcccatccccagggcagtttcaggtgccggctgggccctgaatgtcgaggatagtatatagcccgctcctgggtcctggagctgtggccctttgtactcgtgttgtgtccattgtgtgtgtgcgtggggacagaggcctggaaatgcggaggactatacagagaaggcaggttttgtgaaggccaggcagggttggaggccgggggtgtgagaggagaggcccatagggctgagtggggtcgggtgaggcagaggtcagaaacagaagagctgcagttgctggagctgggctgagaactgggctgcctcctgccatccccccgtctcctccccttctccccttggtgcccccctctgctcagaatctgaagtagttccctcctcagcaatttcatctcttgaacactgactcacaccttttaggcacctactgtgtgcatagcattccaccaggactcatctcccttccttctcagggggtcccgagccccgactagctttgccctaactccttcatcaaaagaccccccgccagcttcccacacctcatacgcagccacatctgccctattctccatgctttccagcttgcctgcccttcctcatctctccctgcctgtgcagacctccacccttctttcctccacccctccatcccccaatgcttgtagaccttccattcattccgtctcatcgtgcgtggtctctgatcgtccatcacctgaccttctccaggactgtcttctcacccttccccactccctggtccccgggagcagctccttctgcccgactcactcacagtgcagggaaaggaggcagggaaaagaccaggattctgtgagttctgaggttgccacacacaaagaagctgtggtttctctgcctcggccactgatgagactaaaactggcttccccttggagacggcagatttcaggctgatccctgcttaagccctctcatccccacgctggtcctggtattgatacaagacccagctggtgacaaagcctccaatcctgggggtccacgagcctgggcctgacattcccagaactaccgccaggtggcgccaggcccccacagtctgtggccgtggtcttagcccccagttccactctggatgggcctgtgacaccccaaagagaagaaggggactctggatagggtccccacatccagggcgtggggagaccattggcatttgggaaccattttccttcgaacggcttccccttgagctgagcattctgcttgctgcagtagacgggtcgccttttgcccataccgaaattttctgaaattaaatcgcacacccccaccatttcctctccctgggatctggaggaacatcatacatagtaggtgaatcgttttgtagagtgaagaatgctaatgtaaagcaaatagtcacccacgttccttgtaaatccaaatgtttctatattgtagctttgcttaaaatggggtcggccccaactgcatcctcctctttggcgggctggggagcggcccccagccgggacgggagggcagcgaccccgaggcctcgtggacgtgggagagagtgtggtgggaagtcttgagcggaggaggggatctgcccttctccactcctctcttggatccgcctcggtttcctgtccccccaccacccgcctgccccgcggaagaccgcccagtgagccagcccccaccttccaggcgccttcgccctggggatccaaccaacttgtatcgagtgggcggggcaacggctccccatttttcccgagccccgcccacagagctcttagccaatcctatgcagagagcatctcctggcaggggtctcttcccaaccagaccccacccaggcacattagcgaccaggcttgggcttccccagcgccccaccaccaccacgtgcaggtggagctctgggatgctatgttggggcggcaagcggtgggccgagggccgggtaggctagcacgggaggtaagggtggtatgggatggggcgggggcggtctagggcaataggagagcagagaatgggggaacttgagggtggggggagggcaccggagccttgccaccatcccaggactttgggcaagtcacccgcactccctgggcctcggtttccccatctgtaaaatgatggtaataatacttcacctacctcataggggaggttgtgaggccaccatcacctgacctgggggtcaaggcaggaggactccgaaggtgctacccgtgagcaaagtgtaattaccgaatcctgactgcaaggcccacctgcccctcccccacagagcctccagagctagctgaggccaacgcaggcccatccgtctcttcactctgtcgcaggccctttcatgggcttcgtctgccatctttgtgggtgccctagacttagtccttatcttgtcctggtttcctttcttgtgaccatctccccatgaaagtgctgtacaaattccacccgccccaggacccccgcacctgccctctggcaccagatgccagggaagggacagaggaaaacagccacaaacaagccaggggggctccccggagccccaggggtggggattggtggccactgtttgtatgttcttgagtgcaagtgttttataaaaaataaaacaaaaacccaccatcacaaaaaaaaaaattttgcagcgaagagaaatgaagaaaaactgaagaaaaaaaaaaaacaggaaaaaaagaaccatacaaaatttttccaccacacataccctctaagccagcaagatttcctctttgcaaaatcatatttttgtgggaatgggccctgctttttgtggcaaggcctgttctgattaataaaggatcgtgaaaaagta

SEQ ID NO: 21148 - DNA, 2013 bp, Homo sapiens
  misc_feature 1..2013: note = ENST00000540677
  source 1..2013: mol_type = unassigned DNA
gggaccatgtaccgggacccggaggcggccagcccaggggcgccctcgcgcgacgtcctgctggtctctgccatcatcaccgtcagccttagcgtcactgtcgtcctctgcggcctctgccactggtgtcagcgcaaactgggcaaacgctacaagaattccttggagacggtgggcacgccagactcagggcgtgggcgcagtgagaagaaggctatcaatggcaccctcctgtcgggcgccaaagtggccgccgcggcggggctggcggtggagcgggaaggccggctgggggagaagccggcaccggtgccgccacccggagaggacgccttgagaagcggcggggctgcccccagcgagccgggcagcggtggcaaggcggggagaggccgctggcggacggtgcagagccacctggccgcagggaagctcaacttgtccaagttgcctgcaggagggaaggcggtgaacacagcccccgtgccaggccagacaccccacgatgagtccgaccgccggaccgagccacgttcctccgtctcagacctcgtcaactccctcaccagcgagatgctcatgctctccccaggctccgaggaggatgaggcccacgagggttgcagccgagagaacctgggccggatccagttcagtgtcggctacaacttccaggagtccacgctcaccgtgaagatcatgaaggcccaggagctgccggccaaggacttcagcggcaccagcgaccccttcgtcaagatctacctgctgcccgacaagaagcacaagctggagaccaaggtgaagcggaagaacctgaacccccactggaacgagaccttcctctttgaaggttttccctatgagaaggtggtgcagaggatcctctacctccaagtcctggactatgaccgcttcagccgcaacgaccccattggggaggtgtccatcccccttaacaaggtggacctgacccagatgcagaccttctggaaggatctgaagccatgcagcgatgggagtgggagccgaggggagctgctcttgtctctctgctacaacccctctgccaactccatcatcgtgaacatcatcaaagcccggaacctcaaagccatggacatcgggggcacatcagacccctacgtgaaggtatggctgatgtacaaggacaagcgggtggagaagaagaagacggtgacgatgaagaggaacctgaaccccatcttcaatgagtccttcgccttcgatatccccacggagaagctgagggagacgaccatcatcatcactgtcatggacaaggacaagctcagccgcaatgacgtcatcggcaagatctacctgtcctggaagagcgggccaggggaggtgaagcactggaaggacatgattgcccgtccccggcagcccgtggcccagtggcaccagctgaaggcctgagtggggccaagggaggcccagggggccgagggcccaggtccccatcatgccctcaccactttatgcacaacgcccggcctgagccccctgccatagggaggggaggaccctgagggctcagccagggaggggtcccaggactcaactgggccccgtttctaggaagtaccagccccatcccccacagtccagctccggggaaggggctctgggaggcattttcctgctttgccccttttcttcctgacttactaatactaaagaagttgggggagctcgagagccagacggccagacaggcagacccctccagaggcccgccaggtgggcatggtcccccattttctttaaggcagcacctggagtggagagaggccactccctctccagcccccgatgtggacccggggaggggaggctgaggcgtttggccccggcctggccaggagaggcccatccccagggcagtttcaggtgccggctgggccctgaatgtcgaggatagtatatagcccgctcctgggtcctggagctgtggccctttgtactcgtgttgtgtccattgtgtgt

SEQ ID NO: 21149 - DNA, 1961 bp, Homo sapiens
  misc_feature 1..1961: note = ENST00000539246
  source 1..1961: mol_type = unassigned DNA
atgtaccgggacccggaggcggccagcccaggggcgccctcgcgcgacgtcctgctggtctctgccatcatcaccgtcagccttagcgtcactgtcgtcctctgcggcctctgccactggtgtcagcgcaaactgggcaaacgctacaagaattccttggagacggtgggcacgccagactcagggcgtgggcgcagtgagaagaaggctatcaatgatctagacagagacttttggaataacaatgagagcacagtgcagcagaaatggagctcctaccctcccaaggagtttattctaaacatttcaccctacgccccttatggcgacccacgactgtccctcaacccgctcttcctccgtcgttaacccttcgttgtcctgtgggatagagttggaggtggctgccctcccccaacccccgccgcccctgccccaggcggtggggaggggccccccctccgttgtcgtgtttcgaggactccaccctgtccacggccactacccttgagtctatccccagctccacgggagagccgaaatgccagcgaccccgcaccctgatgcggcagcagagcctgcaacagccgctgagccagcaccagcggggccggcagcccagccagcccaccaccagccagagcctgggccagctgcaggcccacatggcctcggcaccaggccccaacccccgggcctatggccggggccaggctcggcagggcacctcggccggctccaagtaccgggcggcagggggccgcagccgctccaacccaggcagctgggaccacgtggtggggcagattcgaaaccgaggcttggacatgaaatccttcctggaaggccggatggtggtgctatccttggtcttagggctttcggaacaggatgactttgccaatatccctgacctgcaaaacccaggaacccagcagaaccagaacgctcagggggacaagaggttgcctgcaggagggaaggcggtgaacacagcccccgtgccaggccagacaccccacgatgagtccgaccgccggaccgagccacgttcctccgtctcagacctcgtcaactccctcaccagcgagatgctcatgctctccccaggctccgaggaggatgaggcccacgagggttgcagccgagagaacctgggccggatccagttcagtgtcggctacaacttccaggagtccacgctcaccgtgaagatcatgaaggcccaggagctgccggccaaggacttcagcggcaccagcgaccccttcgtcaagatctacctgctgcccgacaagaagcacaagctggagaccaaggtgaagcggaagaacctgaacccccactggaacgagaccttcctctttgaaggttttccctatgagaaggtggtgcagaggatcctctacctccaagtcctggactatgaccgcttcagccgcaacgaccccattggggaggtgtccatcccccttaacaaggtggacctgacccagatgcagaccttctggaaggatctgaagccatgcagcgatgggagtgggagccgaggggagctgctcttgtctctctgctacaacccctctgccaactccatcatcgtgaacatcatcaaagcccggaacctcaaagccatggacatcgggggcacatcagacccctacgtgaaggtatggctgatgtacaaggacaagcgggtggagaagaagaagacggtgacgatgaagaggaacctgaaccccatcttcaatgagtccttcgccttcgatatccccacggagaagctgagggagacgaccatcatcatcactgtcatggacaaggacaagctcagccgcaatgacgtcatcggcaagatctacctgtcctggaagagcgggccaggggaggtgaagcactggaaggacatgattgcccgtccccggcagcccgtggcccagtggcaccagctgaaggcctga

SEQ ID NO: 21150 - DNA, 2186 bp, Homo sapiens
  misc_feature 1..2186: note = ENST00000539468
  source 1..2186: mol_type = unassigned DNA
atgtaccgggacccggaggcggccagcccaggggcgccctcgcgcgacgtcctgctggtctctgccatcatcaccgtcagccttagcgtcactgtcgtcctctgcggcctctgccactggtgtcagcgcaaactgggcaaacgctacaagaattccttggagacggtgggcacgccagactcagggcgtgggcgcagtgagaagaaggctatcaatgatctagacagagacttttggaataacaatgagagcacagtgcagcagaaatggagctcctaccctcccaaggagtttattctaaacatttcaccctacgccccttatggcgacccacgactgtccctcaacccgctcttcctccgtcgttaacccttcgttgtcctgtgggatagagttggaggtggctgccctcccccaacccccgccgcccctgccccaggcggtggggaggggccccccctccgttgtcgtgtggcaccctcctgtcgggcgccaaagtggccgccgcggcggggctggcggtggagcgggaaggccggctgggggagaagccggcaccggtgccgccacccggagaggacgccttgagaagcggcggggctgcccccagcgagccgggcagcggtggcaaggcggggagaggccgctggcggacggtgcagagccacctggccgcagggaagctcaacttgtccaatttcgaggactccaccctgtccacggccactacccttgagtctatccccagctccacgggagagccgaaatgccagcgaccccgcaccctgatgcggcagcagagcctgcaacagccgctgagccagcaccagcggggccggcagcccagccagcccaccaccagccagagcctgggccagctgcaggcccacatggcctcggcaccaggccccaacccccgggcctatggccggggccaggctcggcagggcacctcggccggctccaagtaccgggcggcagggggccgcagccgctccaacccaggcagctgggaccacgtggtggggcagattcgaaaccgaggcttggacatgaaatccttcctggaaggccggatggtggtgctatccttggtcttagggctttcggaacaggatgactttgccaatatccctgacctgcaaaacccaggaacccagcagaaccagaacgctcagggggacaagaggttgcctgcaggagggaaggcggtgaacacagcccccgtgccaggccagacaccccacgatgagtccgaccgccggaccgagccacgttcctccgtctcagacctcgtcaactccctcaccagcgagatgctcatgctctccccaggctccgaggaggatgaggcccacgagggttgcagccgagagaacctgggccggatccagttcagtgtcggctacaacttccaggagtccacgctcaccgtgaagatcatgaaggcccaggagctgccggccaaggacttcagcggcaccagcgaccccttcgtcaagatctacctgctgcccgacaagaagcacaagctggagaccaaggtgaagcggaagaacctgaacccccactggaacgagaccttcctctttgaaggttttccctatgagaaggtggtgcagaggatcctctacctccaagtcctggactatgaccgcttcagccgcaacgaccccattggggaggtgtccatcccccttaacaaggtggacctgacccagatgcagaccttctggaaggatctgaagccatgcagcgatgggagtgggagccgaggggagctgctcttgtctctctgctacaacccctctgccaactccatcatcgtgaacatcatcaaagcccggaacctcaaagccatggacatcgggggcacatcagacccctacgtgaaggtatggctgatgtacaaggacaagcgggtggagaagaagaagacggtgacgatgaagaggaacctgaaccccatcttcaatgagtccttcgccttcgatatccccacggagaagctgagggagacgaccatcatcatcactgtcatggacaaggacaagctcagccgcaatgacgtcatcggcaagatctacctgtcctggaagagcgggccaggggaggtgaagcactggaaggacatgattgcccgtccccggcagcccgtggcccagtggcaccagctgaaggcctga

SEQ ID NO: 21151 - DNA, 2061 bp, Homo sapiens
  misc_feature 1..2061: note = ENST00000539008
  source 1..2061: mol_type = unassigned DNA
atgtaccgggacccggaggcggccagcccaggggcgccctcgcgcgacgtcctgctggtctctgccatcatcaccgtcagccttagcgtcactgtcgtcctctgcggcctctgccactggtgtcagcgcaaactgggcaaacgctacaagaattccttggagacggtgggcacgccagactcagggcgtgggcgcagtgagaagaaggctatcaatgatctagacagagacttttggaataacaatgagagcacagtgcagcagaaatggagctcctaccctcccaaggagtttattctaaacatttcaccctacgccccttatggcgacccacgactgtccctcaatggcaccctcctgtcgggcgccaaagtggccgccgcggcggggctggcggtggagcgggaaggccggctgggggagaagccggcaccggtgccgccacccggagaggacgccttgagaagcggcggggctgcccccagcgagccgggcagcggtggcaaggcggggagaggccgctggcggacggtgcagagccacctggccgcagggaagctcaacttgtccaatttcgaggactccaccctgtccacggccactacccttgagtctatccccagctccacgggagagccgaaatgccagcgaccccgcaccctgatgcggcagcagagcctgcaacagccgctgagccagcaccagcggggccggcagcccagccagcccaccaccagccagagcctgggccagctgcaggcccacatggcctcggcaccaggccccaacccccgggcctatggccggggccaggctcggcagggcacctcggccggctccaagtaccgggcggcagggggccgcagccgctccaacccaggcagctgggaccacgtggtggggcagattcgaaaccgaggcttggacatgaaatccttcctggaaggccggatggtggtgctatccttggtcttagggctttcggaacaggatgactttgccaatatccctgacctgcaaaacccaggaacccagcagaaccagaacgctcagggggacaagaggttgcctgcaggagggaaggcggtgaacacagcccccgtgccaggccagacaccccacgatgagtccgaccgccggaccgagccacgttcctccgtctcagacctcgtcaactccctcaccagcgagatgctcatgctctccccaggctccgaggaggatgaggcccacgagggttgcagccgagagaacctgggccggatccagttcagtgtcggctacaacttccaggagtccacgctcaccgtgaagatcatgaaggcccaggagctgccggccaaggacttcagcggcaccagcgaccccttcgtcaagatctacctgctgcccgacaagaagcacaagctggagaccaaggtgaagcggaagaacctgaacccccactggaacgagaccttcctctttgaaggttttccctatgagaaggtggtgcagaggatcctctacctccaagtcctggactatgaccgcttcagccgcaacgaccccattggggaggtgtccatcccccttaacaaggtggacctgacccagatgcagaccttctggaaggatctgaagccatgcagcgatgggagtgggagccgaggggagctgctcttgtctctctgctacaacccctctgccaactccatcatcgtgaacatcatcaaagcccggaacctcaaagccatggacatcgggggcacatcagacccctacgtgaaggtatggctgatgtacaaggacaagcgggtggagaagaagaagacggtgacgatgaagaggaacctgaaccccatcttcaatgagtccttcgccttcgatatccccacggagaagctgagggagacgaccatcatcatcactgtcatggacaaggacaagctcagccgcaatgacgtcatcggcaagatctacctgtcctggaagagcgggccaggggaggtgaagcactggaaggacatgattgcccgtccccggcagcccgtggcccagtggcaccagctgaaggcctga

SEQ ID NO: 21152 - DNA, 1362 bp, Homo sapiens
  misc_feature 1..1362: note = ENST00000542836
  source 1..1362: mol_type = unassigned DNA
accggcgacgaggggaccatgtaccgggacccggaggcggccagcccaggggcgccctcgcgcgacgtcctgctggtctctgccatcatcaccgtcagccttagcgtcactgtcgtcctctgcggcctctgccactggtgtcagcgcaaactgggcaaacgctacaagaattccttggagacggtgggcacgccagactcagggcgtgggcgcagtgagaagaaggctatcaatgatctagacagagacttttggaataacaatgagagcacagtgcagcagaaatggagctcctaccctcccaaggagtttattctaaacatttcaccctacgccccttatggcgacccacgactgtccctcaagttgcctgcaggagggaaggcggtgaacacagcccccgtgccaggccagacaccccacgatgagtccgaccgccggaccgagccacgttcctccgtctcagacctcgtcaactccctcaccagcgagatgctcatgctctccccaggctccgaggaggatgaggcccacgagggttgcagccgagagaacctgggccggatccagttcagtgtcggctacaacttccaggagtccacgctcaccgtgaagatcatgaaggcccaggagctgccggccaaggacttcagcggcaccagcgaccccttcgtcaagatctacctgctgcccgacaagaagcacaagctggagaccaaggtgaagcggaagaacctgaacccccactggaacgagaccttcctctttgaaggttttccctatgagaaggtggtgcagaggatcctctacctccaagtcctggactatgaccgcttcagccgcaacgaccccattggggaggtgtccatcccccttaacaaggtggacctgacccagatgcagaccttctggaaggatctgaagccatgcagcgatgggagtgggagccgaggggagctgctcttgtctctctgctacaacccctctgccaactccatcatcgtgaacatcatcaaagcccggaacctcaaagccatggacatcgggggcacatcagacccctacgtgaaggtatggctgatgtacaaggacaagcgggtggagaagaagaagacggtgacgatgaagaggaacctgaaccccatcttcaatgagtccttcgccttcgatatccccacggagaagctgagggagacgaccatcatcatcactgtcatggacaaggacaagctcagccgcaatgacgtcatcggcaagatctacctgtcctggaagagcgggccaggggaggtgaagcactggaaggacatgattgcccgtccccggcagcccgtggcccagtggcaccagctgaaggcctga

SEQ ID NO: 21153 - DNA, 1887 bp, Homo sapiens
  misc_feature 1..1887: note = ENST00000542670
  source 1..1887: mol_type = unassigned DNA
cggccgcgggcggctctgaggagcccggagggaaccggcgacgaggggaccatgtaccgggacccggaggcggccagcccaggggcgccctcgcgcgacgtcctgctggtctctgccatcatcaccgtcagccttagcgtcactgtcgtcctctgcggcctctgccactggtgtcagcgcaaactgggcaaacgctacaagaattccttggagacggtgggcacgccagactcagggcgtgggcgcagtgagaagaaggctatcaatgatctagacagagacttttggaataacaatgagagcacagtgcagcagaaatggagctcctaccctcccaaggagtttattctaaacatttcaccctacgccccttatggcgacccacgactgtccctcaatttcgaggactccaccctgtccacggccactacccttgagtctatccccagctccacgggagagccgaaatgccagcgaccccgcaccctgatgcggcagcagagcctgcaacagccgctgagccagcaccagcggggccggcagcccagccagcccaccaccagccagagcctgggccagctgcaggcccacatggcctcggcaccaggccccaacccccgggcctatggccggggccaggctcggcagggcacctcggccggctccaagtaccgggcggcagggggccgcagccgctccaacccaggcagctgggaccacgtggtggggcagattcgaaaccgaggcttggacatgaaatccttcctggaaggccggatggtggtgctatccttggtcttagggctttcggaacaggatgactttgccaatatccctgacctgcaaaacccaggaacccagcagaaccagaacgctcagggggacaagaggttgcctgcaggagggaaggcggtgaacacagcccccgtgccaggccagacaccccacgatgagtccgaccgccggaccgagccacgttcctccgtctcagacctcgtcaactccctcaccagcgagatgctcatgctctccccaggctccgaggaggatgaggcccacgagggttgcagccgagagaacctgggccggatccagttcagtgtcggctacaacttccaggagtccacgctcaccgtgaagatcatgaaggcccaggagctgccggccaaggacttcagcggcaccagcgaccccttcgtcaagatctacctgctgcccgacaagaagcacaagctggagaccaaggtgaagcggaagaacctgaacccccactggaacgagaccttcctctttgaaggttttccctatgagaaggtggtgcagaggatcctctacctccaagtcctggactatgaccgcttcagccgcaacgaccccattggggaggtgtccatcccccttaacaaggtggacctgacccagatgcagaccttctggaaggatctgaagccatgcagcgatgggagtgggagccgaggggagctgctcttgtctctctgctacaacccctctgccaactccatcatcgtgaacatcatcaaagcccggaacctcaaagccatggacatcgggggcacatcagacccctacgtgaaggtatggctgatgtacaaggacaagcgggtggagaagaagaagacggtgacgatgaagaggaacctgaaccccatcttcaatgagtccttcgccttcgatatccccacggagaagctgagggagacgaccatcatcatcactgtcatggacaaggacaagctcagccgcaatgacgtcatcggcaagatctacctgtcctggaagagcgggccaggggaggtgaagcactggaaggacatgattgcccgtccccggcagcccgtggcccagtggcaccagctgaaggcctga

SEQ ID NO: 21154 - DNA, 1621 bp, Homo sapiens
  misc_feature 1..1621: note = ENST00000535826
  source 1..1621: mol_type = unassigned DNA
gcggccgcgggcggctctgaggagcccggagggaaccggcgacgaggggaccatgtaccgggacccggaggcggccagcccaggggcgccctcgcgcgacgtcctgctggtctctgccatcatcaccgtcagccttagcgtcactgtcgtcctctgcggcctctgccactggtgtcagcgcaaactgggcaaacgctacaagaattccttggagacggtgggcacgccagactcagggcgtgggcgcagtgagaagaaggctatcaatgatctagacagagacttttggaataacaatgagagcacagtgcagcagaaatggagctcctaccctcccaaggagtttattctaaacatttcaccctacgccccttatggcgacccacgactgtccctcaatggcaccctcctgtcgggcgccaaagtggccgccgcggcggggctggcggtggagcgggaaggccggctgggggagaagccggcaccggtgccgccacccggagaggacgccttgagaagcggcggggctgcccccagcgagccgggcagcggtggcaaggcggggagaggccgctggcggacggtgcagagccacctggccgcagggaagctcaacttgtccaagttgcctgcaggagggaaggcggtgaacacagcccccgtgccaggccagacaccccacgatgagtccgaccgccggaccgagccacgttcctccgtctcagacctcgtcaactccctcaccagcgagatgctcatgctctccccaggctccgaggaggatgaggcccacgagggttgcagccgagagaacctgggccggatccagttcagtgtcggctacaacttccaggagtccacgctcaccgtgaagatcatgaaggcccaggagctgccggccaaggacttcagcggcaccagcgaccccttcgtcaagatctacctgctgcccgacaagaagcacaagctggagaccaaggtgaagcggaagaacctgaacccccactggaacgagaccttcctctttgaaggttttccctatgagaaggtggtgcagaggatcctctacctccaagtcctggactatgaccgcttcagccgcaacgaccccattggggaggtgtccatcccccttaacaaggtggacctgacccagatgcagaccttctggaaggatctgaagccatgcagcgatgggagtgggagccgaggggagctgctcttgtctctctgctacaacccctctgccaactccatcatcgtgaacatcatcaaagcccggaacctcaaagccatggacatcgggggcacatcagacccctacgtgaaggtatggctgatgtacaaggacaagcgggtggagaagaagaagacggtgacgatgaagaggaacctgaaccccatcttcaatgagtccttcgccttcgatatccccacggagaagctgagggagacgaccatcatcatcactgtcatggacaaggacaagctcagccgcaatgacgtcatcggcaagatctacctgtcctggaagagcgggccaggggaggtgaagcactggaaggacatgattgcccgtccccggcagcccgtggcccagtggcaccagctgaaggcctga

SEQ ID NO: 21155 - DNA, 723 bp, Homo sapiens
  misc_feature 1..723: note = ENST00000540831
  source 1..723: mol_type = unassigned DNA
ggtgaacacagcccccgtgccaggccagacaccccacgatgagtccgaccgccggaccgagccacgttcctccgtctcagacctcgtcaactccctcaccagcgagatgctcatgctctccccaggctccgaggaggatgaggcccacgagggttgcagccgagagaacctgggccggatccagttcagtgtcggctacaacttccaggagtccacgctcaccgtgaagatcatgaaggcccaggagctgccggccaaggacttcagcggcaccagcgaccccttcgtcaagatctacctgctgcccgacaagaagcacaagctggagaccaaggtgaagcggaagaacctgaacccccactggaacgagaccttcctctttgaagctgggagtctgggcaagtactttaagccgtctgagcctcatctgtaagatggacgagatgccattcaccttggagaattgttgagggaatcccatgagacggtgacagttcttgctagcacttcagttttccctatgagaaggtggtgcagaggatcctctacctccaagtcctggactatgaccgcttcagccgcaacgaccccattggggaggtgtccatcccccttaacaaggtggacctgacccagatgcagaccttctggaaggatctgaagccatgcagcgatgggagtgggagccgaggggagctgctcttgtctctctgctacaacccc

SEQ ID NO: 21156 - DNA, 578 bp, Homo sapiens
  misc_feature 1..578: note = ENST00000545053
  source 1..578: mol_type = unassigned DNA
gcggccgcgggcggctctgaggagcccggagggaaccggcgacgaggggaccatgtaccgggacccggaggcggccagcccaggggcgccctcgcgcgacgtcctgctggtctctgccatcatcaccgtcagccttagcgtcactgtcgtcctctgcggcctctgccactggtgtcagcgcaaactgggcaaacgctacaagaattccttggagacggtgggcacgccagactcagggcgtgggcgcagtgagaagaaggctatcaagttgcctgcaggagggaaggcggtgaacacagcccccgtgccaggccagacaccccacgatgagtccgaccgccggaccgagccacgttcctccgtctcagacctcgtcaactccctcaccagcgagatgctcatgctctccccaggctccgaggaggatgaggcccacgagggttgcagccgagagaacctgggccggatccagttcagtgtcggctacaacttccaggagtccacgctcaccgtgaagatcatgaaggcccaggagctgccggccaaggacttcagcggcaccagcgaccccttcgtca

SEQ ID NO: 21157 - DNA, 7470 bp, Homo sapiens
  misc_feature 1..7470: note = ENST00000263635
  source 1..7470: mol_type = unassigned DNA
ccgcctcgggagccggaggagaggcagccgcggagcgccgagctggcctcgccccgaggcccggccctgggtgtggggaaccgcgctgaggagctggaaactttcccggcaggagctgactgctgggcaggaacgtctctcaggagaaagagtggaagagaaaattgtgaactaaggccccctgcccccttttcctggtgcatgtgaagttatcaaaaacagaaacaagtgttgaaaatgttaaaggctgtgctgaagaagagccgagagggaggaaagggaggcaagaaggaagcaggaagtgactttggtccagagacttctccagtcctgcaccttgaccacagtgctgactctcctgtgagcagtcttcccacagcagaggacacctatagggtgagcttggccaaaggtgtctcgatgtctctgccttcctcacctttgctgcctcgacagtctcacttggtgcaatcaagagtgaacaaaaaatccccaggtcccgtcaggaagcccaagtatgtggaaagccccagagtgcctggagatgcagttataatgccattcagagaagtagccaagccaacagagcctgatgagcatgaagcaaaggccgataatgaaccgagctgttcgccggcagctcaagaactgttgacaaggctgggatttttactgggagaagggatcccaagtgccacacacataaccattgaagacaaaaatgaaaccatgtgcacagctctgagtcaaggcatcagtccttgctccacactaacaagcagcaccgcatctcctagcaccgatagcccctgctcaaccttgaatagctgtgtcagcaagacggcagccaacaaaagtccctgtgagaccattagcagccctagttccaccctggaaagcaaggacagtggaattatagccacaattacaagttcatccgaaaatgatgaccggagtggctccagtttggaatggaataaagatggaaacctaagattaggggttcagaagggagtgcttcatgaccgcagggcagataactgctccccagtggcagaagaggagaccaccgggtcagcagagagcacgctgcccaaagcagaatcctcagctggagatggtccagtcccttattctcagggctccagctcactaataatgccacggcccaactcagttgcagcaacaagctcaaccaaattggaagatctgagttatttagacgggcagagaaatgctcctctacggacgtcaattagattaccatggcacaatacggccggaggtagggcacaggaagttaaagcacgatttgctccctacaagccacaagacattttgttgaaacccttgttgtttgaagtaccaagcataacaacagactctgtgtttgtgggaagggattggctctttcaccagatagaagaaaacttgaggaacacagaactggcagaaaacagaggcgcggtggtggttggcaatgtgggatttgggaagacggcaatcatttccaagttggtggccctgagctgccacggaagccgcatgaggcagattgcttccaacagcccgggttcatcacctaaaacctctgaccccactcaggatcttcatttcactccgttgctttcaccgagttcttccacaagtgcttccagcacagctaaaacacctcttgggtctatcagtgctgaaaaccagagaccaagagaggatgcagtgaaatatcttgcttctaaggtggtggcctaccactactgccaggctgacaacacgtacacttgcctggtgcccgagtttgtgcacagcatcgcagctttgctctgccggtcccatcagctggccgcctacagagaccttctgataaaggagccccaactacagagcatgctgagcctccgatcctgtgtgcaggacccggtggcagctttcaagaggggagtgctggagccactcacaaacctgagaaatgagcagaaaattcctgaagaagaatacattattttgatagatggcttaaatgaagctgagtttcataaacctgattatggagatacgctttcttcatttattaccaaaattatttctaaatttcctgcctggttgaagttgattgtgactgtaagagcaaattttcaggaaatcataagtgcgctgccatttgtcaagctttccttagatgacttcccagacaacaaagacatccacagtgacctgcacgcctacgtccagcacagggtgcacagcagccaggacatcctcagcaacatctccctgaatggcaaggccgatgccacactcattggaaaagtgagcagccacctggtgctgcggagcctcggctcctacctgtacctcaagctcaccctggaccttttccagaggggccacttggtcattaagagtgccagctacaaggtggtgcccgtgtctctctctgagctctatttgcttcagtgcaacatgaagttcatgacccagtccgcctttgagagggcacttccgattctcaacgtggccctcgcatccctccaccccatgacagacgagcagatctttcaggctattaatgctggccacatccagggggagcagggatgggaagactttcagcagaggatggacgccctctcctgcttcctcattaagaggcgagacaaaacccgcatgttctgccacccgtccttcagggagtggcttgtatggagagcagacggggaaaacacggccttcctgtgtgagcccaggaacgggcacgcgctcttggcattcatgttctcgcgtcaggagggcaagttgaaccgccagcagaccatggagcttggccaccacatcctgaaggcgcacattttcaagggcctcagtaagaagacgggaatttcttcaagccatctccaagccctgtggatcggctacagcaccgaggggctgtccgccgccctggcctctctcaggaatctctatactcccaacgtgaaggtgagccgtctcctgattttgggaggggccaacgtgaactacaggacagaagtgttaaataatgccccaatcctgtgcgtccagtctcaccttggccacgaggaagttgtcactctgctcctggaatttggtgcctgcctggacggaacgtcagagaacggcatgactgccctctgttacgcagcagctgctggccacatgaagctggtgtgtctgctgaccaagaagggagtgagagtggaccacttggataagaagggccagtgtgcgcttgtccacagtgccctacggggccacggtgacattctccagtacctgctgacttgtgagtggtcgccgggtcctccccagccaggcaccctgaggaagagccacgccctgcagcaggcgctgaccgcggcggccagcatgggccacagctcggtggtccagtgcttgctggggatggagaaggaacatgaagtagaagtcaatggcaccgacacattgtggggagaaacagccctgactgccgccgcaggaagagggaagctggaggtctgtgagctgctgctggggcatggagctgctgtgtcgcggacaaacaggagaggggttccacctttgttttgtgcagcacgccaggggcattggcagattgttagactgctgttggaacgcggctgtgatgtgaacctaagtgacaagcaaggccggacgcccctcatggtggctgcttgtgaagggcacttgagcaccgtggaattcctcctttcaaaaggtgcagccctttcttctctagacaaagagggtctgtcagcattaagctgggcttgtctgaaaggtcacagggcagtggtccagtatctggttgaagaaggagctgcaatagaccagacagacaagaatggccgcacacccttggacctggctgccttctatggcgatgccgagactgtgctgtacctggtggagaagggagccgtgatcgagcatgtggaccacagcgggatgcggcccttggacagagccatcggctgccggaacacatctgtagtggtggcgctactcagaaagggagccaagttaggaaatgctgcttgggcgatggccacttccaaacctgatatcttgattatacttttacagaaattaatggaggaaggaaatgtgatgtacaaaaaagggaaaatgaaagaggcagcccagaggtaccagtatgccttaagaaagtttcctcgagaaggattcggagaggacatgagacccttcaatgaattaagggtttccctctatctcaatttgtcgcgatgccgaagaaaaacaaatgactttggcatggcagaggaatttgcttccaaggctctcgaattgaagcccaagtcctatgaagccttttatgccagagcaagagcgaagagaaatagcaggcaattcgtggcagctctggctgacctgcaagaggctgtgaaactctgtcccaccaatcaggaagtcaagaggcttctggcccgcgtagaagaggagtgcaaacaactccagaggagtcaacagcaaaaacagcagggcccgctaccagctccactcaacgactccgagaacgaagaggacaccccaacccctggcttaagtgaccactttcactctgaggagactgaagaggaagaaacttctccccaggaagaatctgtttccccaactcccaggtcccagccatcctcatctgtcccttcctcatacatccgaaaccttcaagaagggttacagtccaaaggaaggccggtatcgccacagagcagggcaggaatcggcaagtccctgagagagcctgtggcccagccagggctgctcctgcagccctccaagcaggcccagatcgtgaaaaccagccagcacctgggctctggccagtcggcagtgagaaatggcagtatgaaagttcagatctcttctcagaaccctcctccaagtcccatgccagggagaatcgctgccactcctgctgggagcagaacccagcatttagagggaacaggtactttcactacaagagctggttgtggccactttggggatcggctgggccccagccagaatgtccgcctgcagtgtggtgagaatggccctgcacaccctttaccaagtaagacgaaaaccacagagaggcttctgtctcattcctccgtggctgtggacgcagcccctccaaaccaaggtgggctggcgacctgcagcgacgtgcgacacccagcttccctcaccagctcaggctcttctggttctccatccagcagcataaagatgtcaagttcaaccagtagtttgacttcgagcagcagtttttcagatggcttcaaggtccaaggaccagatactagaattaaagacaaggttgtaacccacgttcagagcggtacagctgagcacagaccccgcaacacgccgttcatgggcatcatggataagactgcgaggttccaacagcagagcaatcctccaagccgcagctggcactgtccggcaccagaggggctgctgacaaacacgtcttctgcagctggcctgcagtctgctaacactgagaagccctctctcatgcaagtgggaggatataataaccaagccaaaacctgttctgtttctaccctgagtgcaagtgtccacaatggggcacaagtgaaggagctagaagaaagcaagtgccaaattccagtccactctcaagagaacaggataactaagactgtttctcatctgtaccaggaaagtatctccaaacagcagcctcatattagtaatgaagcccacaggagccacctcactgcagccaaaccaaagcgatcatttatagagtcaaatgtgtgaaccttaagaaatccccatttgtggaatttggaaacgtgtgttgactcctggtggtaaattaaatagtttttttcatcagaaaaattattttttagccattttttttctttggggtggatctgatgccattgatatatctaaaatgtgggataaaacttctttaatagctagaaatcaccataaataagaatgctaaacagaattgaaaattatatcaacttaaaattttaagacagcccagaagacattaatgactctcacttatgaaattgtttggcttttgccactttcttccttgcctttgctatatggtagaatcacagaacttacttagagaataaatatgtctattgttcaagagtaacaggtttaactcatgaccaagtgatgtacatccaagtgatgtattctggaaacgatggaattttacagttacagttccattgagtcaaatcccattttatatatacataaaaattaagttctgagtgagttctagctaaatataagtgcgactgtaaacgcagccaatttttttaagcagaatatgagaacacctaagtattctcttcatagcagttcctataaagggattaaacacttatttctgtgttatggttcttattcatatatttttatagcacttttggaacctatatttgtgcttgaaggtgtttttgatatttggaaacagtataagccatttggagtcatgattggtggtcaagtggattcaagctaaaatactaagaccagcattcttagtggcgcttataaattagctctcacctggtttccaaactgcttttaacaatggtagtgctcctggaacaatccttccaagctcctctaaggacaatatttaattcagatactaaaggtaagactggttgttacttttgttttgttgtacaattagtactttatagtcacatgttgtatatattaaatagcccagttttattcagacttgtaaatagaactatttcaatgtagttaatctaaaaacaaaaaagaaaaccccagtcacgatttgcatgttctctgtaagcttcatccatgctggttattgcactgaatgatatattattagggcatgttaacagtataccagtaacagcactttatctcatttatatgaacacctttgaggtgctacttaagtccaagctctgatgtattattcatttgtaaagataaggtacaggaatgaaccttggtttaaaggtatttttatatgaaaatggtgtgttattggaagatgttaaaatgctaatttgagagaagtaggagtgtatctgttttatatgttgggatgtgaaatttattttctaaaattgaggagaaggaagttatatatttgcagaatgttttaaagtgaattgttgtaatgaagttcctgtgaacatcattatggttttgtacaaataggaacctctgatgtcattcttcaacgtttgttcctgtgtgtacaattgtactttgtatgaacagctttatcatttttataggctttccatgagttttgctgtaactactatggcttatttattttctttaatatttgtgaaagtcttactcctttgttagttttgtttctgcacaactactgtacttttccatatggaataaagactattaatagaa

SEQ ID NO: 21158 - DNA, 1736 bp, Homo sapiens
  misc_feature 1..1736: note = ENST00000464096
  source 1..1736: mol_type = unassigned DNA
gtcaggaagcccaagtatgtggaaagccccagagtgcctggagatgcagttataatgccattcagagaagtagccaagccaacagagcctgatgagcatgaagcaaaggccgataatgaaccgagctgttcgccggcagctcaagaactgttgacaaggctgggatttttactgggagaagggatcccaagtgccacacacataaccattgaagacaaaaatgaaaccatggtaatgcccgaggaagacactacattgcatacctcttcagaggatgaacgaagcaataaccatcttctccctttccttgagcagggaagccattgttcagttaaatgagttctgggctgttgtgtattgaaatttatttcaacagtttggttctgggtttttgcagtggggaggtagggaaaagcagaaagaagcagaacgtaagaaaatgtccacattaaccttctagtcaccacccagagaataatggccacatgaattaaagaggctaaaagaatgccttcataatgctaccagtacttttacctttatagcaccgttcttctcatctggttgctttggtatacgctttcctgtgcctttttagctgttgagattttggagggtcagtggggtgaggaaaagatttataggagatgaggcagagacaaaataagatgagatcaaatggtccatctatcaggaaagcacttcccctccaagggagcagcagcatgcaccctgccacctcccagatgtgatgtgtgcatctgaatagcaatgcaggatggagcttctaccctggtgaaggtctctgcactgcaagggagggtgtcatgcattgattgagactgagtggtcaccagtctccttcccctgattgcagagcccataaatcttgaggaattgaatcaggttgcagtgttcgtgaaacatcacaaaaacagagctcccaggtcttccgtacagaggtcaaataacccatttgtcttctgcagacttcaaatgaaaggaagtctgcctgtttgccatttctgttgtacaaatgtgcatcctcactaaattattgctaagactgaccttttaataaaaaggaaaatcacaaaggaggggaaccgaacaaagatactgctttctcaaaatttggaagaccacatatacatttatatagataaagctccatgaatccatatctatacacacatatctctttagattttttttttaaaacttccgttttcctgttcttagttttattgttttagcacaaaaacaaaagcatgtgtcgaagcatcctgtgtaagccgtgctaactcctccttccattcatcttgcagtgcacagctctgagtcaaggcatcagtccttgctccacactaacaagcagcaccgcatctcctagcaccgatagcccctgctcaaccttgaatagctgtgtcagcaagacggcagccaacaaaagtccctgtgagaccattagcagccctagttccaccctggaaagcaaggacagtggaattataggtaagaagcacactgctcggtaacataatggctcgaatctcatcaaccagagcattcaccaggcacttcctcagagggttttagcatggtctgtgaaggtcagtctgccagcgcctgctctgttctttgcaggcagcactgactccatgtgtagctgagagagtggagcattggcttttacattccttgatgtttactttataacagtcagctcatttgtt

SEQ ID NO: 21159 - DNA, 2141 bp, Homo sapiens
  misc_feature 1..2141: note = ENST00000465963
  source 1..2141: mol_type = unassigned DNA
caaaatgtgctttgaggtaggaagggacctcctgtagagcggctttggcatgaggtcgacccgccctggggtggctccttttccctgtgttggcttggggccactgccccttcatgtttggctcacatggtccagaagcatcagggctcttttaacccagaatagtcaagccttggtttccttacccctgcagttttccagagcagctaaaaaacatccaagctggcaaaccattcttcctactccaaacattaggagcttttaccagtaagcaaggggtgggaagcttttcctttcttgaagatgctgccagcgtagtttcccttgtagctgccatcctgggtgcatgacttgcaaaactgatatgtgagtgacaataagccagatggcctttgcaaaagctctgcttattttgatttttgtggttccttacaaaaggcgaagtgagcattgatctttgttggtgctgttgtagctcaacggcaacatcactgtgttgtttcctcattttatttttcctaaaacctttacccattatctgcagattttcacatctaagcaaaataggttcatatgagtccagttacctagacaattaataaaaaagagcaaaatgttgagtgactatgtcataggttacttattgttaagttacagctttgtaagcagcttgctttgtaaatttttcatcccctgatggatgctgattttagaaggtgagagacgtgttagaaggatgtgaatatcgttttatttattggccataattaagtgcctttgggctttttgggtacagggttaaactacagctcaacatttaaatcaaatccaaccataaaattctcttaagtacaaaaaaaccagatgaccaacctcagggagaacccaagaaaaggtgggctttcccagcattgctgtgcagcattctgagaatacagcttgatttttctacatctttgcatgggcaacagtggtactgggtcctgtctcttgggacaagtttcactgtgattttaaatttttgtttcaacttggattcttcacgattgaccgtcaagttgaaatcctggttttgactttcactactgtgggatgtgcacaggaagttttccaccaaattttccacgtcgttcccctggcttgtttaatgagagcttggatttcagttttactccaacacctaaatagcctgggtctctaccagcatgccactagggttttacttcatttcagcctcctgtgggcattggacacccggcactctgtgagggtaacatgaaagataggcccttttcttacccaagctgatgtctgaagtacccgttttcacatgactcggaattaggaattgccgtcagataacactgggctcttctcactcaccctttgcacttggagtttttgttttactgtttccttaacctgtcacagtcccttaattagaatgtattgctagaggacagggtgcgttgtccaactttgtgcgcattttatagaaacacacaaaatcaccagacaaagcagctgtagtgtgaactcatccagatgcgatactgaaattccccagaggggcatcttcattgttttctttctttgttccagaagcaaaggccgataatgaaccgagctgttcgccggcagctcaagaactgttgacaaggctgggatttttactgggagaagggatcccaagtgccacacacataaccattgaagacaaaaatgaaaccatgtgcacagctctgagtcaaggcatcagtccttgctccacactaacaagcagcaccgcatctcctagcaccgatagcccctgctcaaccttgaatagctgtgtcagcaagacggcagccaacaaaagtccctgtgagaccattagcagccctagttccaccctggaaagcaaggacagtggaattataggtaagaagcacactgctcggtaacataatggctcgaatctcatcaaccagagcattcaccaggcacttcctcagagggttttagcatggtctgtgaaggtcagtctgccagcgcctgctctgttctttgcaggcagcactgactccatgtgtagctgagagagtggagcattggcttttacattccttgatgtttactttataacagtcagctcatttgtt

SEQ ID NO: 21160 - DNA, 4351 bp, Homo sapiens
  misc_feature 1..4351: note = ENST00000470074
  source 1..4351: mol_type = unassigned DNA
aagtcaatggcaccgacacattgtggggagaaacagccctgactgccgccgcaggaagagggaagctggaggtctgtgagctgctgctggggcatggagctgctgtgtcgcggacaaacaggagaggggttccacctttgttttgtgcagcacgccaggggcattggcagattgttagactgctgttggaacgcggctgtgatgtgaacctaagtgacaagcaaggccggacgcccctcatggtggctgcttgtgaagggcacttgagcaccgtggaattcctcctttcaaaaggtagcagcgtgatgccctcaaaggtttcttttggacggacacagagagaacttcagcagacccattcagtgctttctgattcaaattctaagttttctgttaatggaaattttctaataaacagtagagagaataggcaacacagccacatgcctggtattcctcttcagcagcgatgaccattctgccagcccatccggccagtgtcacccttcacagtgcttgactgacacttggttcaggccgggtgttccgcaggtgtgaaacaatttgctttctggctttgtcatctcataatgttcatgttctgtgaatgggctttcctttcaggtgcagccctttcttctctagacaaagagggtctgtcagcattaagctgggcttgtctgaaaggtcacagggcagtggtccagtatctggttgaagaaggagctgcaatagaccagacagacaagaatggccgcacacccttggacctggctgccttctatggcgatgccgagactgtgctgtacctggtggagaagggagccgtgatcgagcatgtggaccacagcgggatgcggcccttggacagagccatcggctgccggaacacatctgtagtggtggcgctactcagaaagggagccaagttaggaaatgctgcttgggcgatggccacttccaaacctgatatcttgattatacttttacagaaattaatggaggaaggaaatgtgatgtacaaaaaagggaaaatgaaagaggcagcccagaggtaccagtatgccttaagaaagtttcctcgagaaggattcggagaggacatgagacccttcaatgaattaagggtttccctctatctcaatttgtcgcgatgccgaagaaaaacaaatgactttggcatggcagaggaatttgcttccaaggctctcgaattgaagcccaagtcctatgaagccttttatgccagagcaagagcgaagagaaatagcaggcaattcgtggcagctctggctgacctgcaagaggctgtgaaactctgtcccaccaatcaggaagtcaagaggcttctggcccgcgtagaagaggagtgcaaacaactccagaggagtcaacagcaaaaacagcagggcccgctaccagctccactcaacgactccgagaacgaagaggacaccccaacccctggcttaagtgaccactttcactctgaggagactgaagaggaagaaacttctccccaggaagaatctgtttccccaactcccaggtcccagccatcctcatctgtcccttcctcatacatccgaaaccttcaagaagggttacagtccaaaggaaggccggtatcgccacagagcagggcaggaatcggcaagtccctgagagagcctgtggcccagccagggctgctcctgcagccctccaagcaggcccagatcgtgaaaaccagccagcacctgggctctggccagtcggcagtgagaaatggcagtatgaaagttcagatctcttctcagaaccctcctccaagtcccatgccagggagaatcgctgccactcctgctgggagcagaacccagcatttagagggaacaggtactttcactacaagagctggttgtggccactttggggatcggctgggccccagccagaatgtccgcctgcagtgtggtgagaatggccctgcacaccctttaccaagtaagacgaaaaccacagagaggcttctgtctcattcctccgtggctgtggacgcagcccctccaaaccaaggtgggctggcgacctgcagcgacgtgcgacacccagcttccctcaccagctcaggctcttctggttctccatccagcagcataaagatgtcaagttcaaccagtagtttgacttcgagcagcagtttttcagatggcttcaaggtccaaggaccagatactagaattaaagacaaggttgtaacccacgttcagagcggtacagctgagcacagaccccgcaacacgccgttcatgggcatcatggataagactgcgaggttccaacagcagagcaatcctccaagccgcagctggcactgtccggcaccagaggggctgctgacaaacacgtcttctgcagctggcctgcagtctgctaacactgagaagccctctctcatgcaagtgggaggatataataaccaagccaaaacctgttctgtttctaccctgagtgcaagtgtccacaatggggcacaagtgaaggagctagaagaaagcaagtgccaaattccagtccactctcaagagaacaggataactaagactgtttctcatctgtaccaggaaagtatctccaaacagcagcctcatattagtaatgaagcccacaggagccacctcactgcagccaaaccaaagcgatcatttatagagtcaaatgtgtgaaccttaagaaatccccatttgtggaatttggaaacgtgtgttgactcctggtggtaaattaaatagtttttttcatcagaaaaattattttttagccattttttttctttggggtggatctgatgccattgatatatctaaaatgtgggataaaacttctttaatagctagaaatcaccataaataagaatgctaaacagaattgaaaattatatcaacttaaaattttaagacagcccagaagacattaatgactctcacttatgaaattgtttggcttttgccactttcttccttgcctttgctatatggtagaatcacagaacttacttagagaataaatatgtctattgttcaagagtaacaggtttaactcatgaccaagtgatgtacatccaagtgatgtattctggaaacgatggaattttacagttacagttccattgagtcaaatcccattttatatatacataaaaattaagttctgagtgagttctagctaaatataagtgcgactgtaaacgcagccaatttttttaagcagaatatgagaacacctaagtattctcttcatagcagttcctataaagggattaaacacttatttctgtgttatggttcttattcatatatttttatagcacttttggaacctatatttgtgcttgaaggtgtttttgatatttggaaacagtataagccatttggagtcatgattggtggtcaagtggattcaagctaaaatactaagaccagcattcttagtggcgcttataaattagctctcacctggtttccaaactgcttttaacaatggtagtgctcctggaacaatccttccaagctcctctaaggacaatatttaattcagatactaaaggtaagactggttgttacttttgttttgttgtacaattagtactttatagtcacatgttgtatatattaaatagcccagttttattcagacttgtaaatagaactatttcaatgtagttaatctaaaaacaaaaaagaaaaccccagtcacgatttgcatgttctctgtaagcttcatccatgctggttattgcactgaatgatatattattagggcatgttaacagtataccagtaacagcactttatctcatttatatgaacacctttgaggtgctacttaagtccaagctctgatgtattattcatttgtaaagataaggtacaggaatgaaccttggtttaaaggtatttttatatgaaaatggtgtgttattggaagatgttaaaatgctaatttgagagaagtaggagtgtatctgttttatatgttgggatgtgaaatttattttctaaaattgaggagaaggaagttatatatttgcagaatgttttaaagtgaattgttgtaatgaagttcctgtgaacatcattatggttttgtacaaataggaacctctgatgtcattcttcaacgtttgttcctgtgtgtacaattgtactttgtatgaacagctttatcatttttataggctttccatgagttttgctgtaactactatggcttatttattttctttaatatttgtgaaagtcttactcctttgttagttttgtttctgcacaactactgtacttttccatatggaataaagactattaat

SEQ ID NO: 21161 - DNA, 7586 bp, Homo sapiens
  misc_feature 1..7586: note = ENST00000496406
  source 1..7586: mol_type = unassigned DNA
gaggagcggtgagctcccgattgtagaagcctagacagcacagagagtgacctgctcccaggttaggaagtaagatgtcagatgtttgcagatctctgtctcagtctcacttaatcaccattatacacaatgtgtaagtagctcacggtgtttctgcggggagggtgtggaaagcagaggctggtgttgaaggacagtctggagtggtatcagtggccaggaaccacgccagagaggaaccacagcctcttgctgtggggtggggccgggtagtgctgctgaaagctcccccaggtgactctgagcagcagcggaggctgagccactgttctagagccaccagtcagctgtgtggggaaatggccaccacagcaagtttctgtgaagaagtagtagtatgatttcatggagacaaactaggacgatacttgaggattgtgtgggggaccctgagtagggaaagccctttccacgtggctggctttgacacaaacacaccattccagatgtggggagggtcactattttggtttgatgtatggagcccttggtcaggagcagctctgggtagggcactgtgatgaaaatgctattcactaatactgtcaagcagtgaatagtgccaggaactatccaagcagtttcgccctctgccttaatccctaccacagccctgaaagtctcagtgacaatcccatgattttacagatgaggaaaccaaggcaccgagcagctaaatggcttcccccaggactgccttgtggtactcgccgtggggacctagcagctggctccagggctgtgctcttcagcactcctcccacagtgtcccgagagctcaggcaggggttagagaggttgtggccgagctgtagggtaggagagagaagccatgacatctcggagtacagcagatgacacagcacagggactgcgtgctgagaacacatgcctgcacggtggccgctgcaggaactgaggaggttatgctaaggcctcatttaattaattttccccacatcccacccggaagggaggaatgagttttcgctgctcggatgccttcgtttctcattacttttttcagtaaaataacaaggacagatttgagtgcccaggtcagtgggaaaggattagcaacagcctcgccggcgtcctgctccctccctcatcgtgctgtggtccttgcagctgggctcctgctggtgctgacctccagccgtggggccacggaggaattgggatcctttccgcagggcctctgaagtgcctctgaatgcgtgtttgttttgcaggaaatgctgcttgggcgatggccacttccaaacctgatatcttgattatacttttacagaaattaatggaggaaggaaatgtgatgtacaaagtaagtggttccgcccttttctttgccattgaaactgcctgggagcaccctcttaattgggtacataatggctacagctgtgctactgcacagtctccatgtaatagaagtgcaaaaagtggctgggtggggtggctcacgcctgtaactccagcacttttggaggccgaggtgggcagatcacttgaggccaggaattccagaccaacctggccaatatggcaaaaccccatctttactaaaaatacaaaaatcagccaggtgcctgtaatcccagctactcgggaggctgaggcaggagaattgtttcaatctgggaggcagaggttgcagtgagctgagattgcaccactgcactccagcctcagcaacagagtgagactcagtctcagaagaaaaaaaaaaaaagtgccaagaggtgctgacctggcctcatgcccgttgttggcttaatatctttccggcagaatcttaaaggtagaaagcacctctctttgtgtctgagagccattatttctgagctaatccttgaggttgtagtggtgacttcctgtctgaagccatggcgtgaagctgagtcacctctaggtcaactgaacatcatagagaaggttcctcagcccttcacattctgagttcagaacaccatgctgaggcacagtcatgagacgtgggagaggaacacccagcagacatttctagaagaaaagggttattctgtctcctaagcctttcctaatttttaatatctattaatttctagaatttgaaagtgttgttagagatttttacttaatacagtcaagtaatacctcagttactcagaagactgaattaattttttccattttcccttggaaatggaaatatgatttacagatcaataaacttcactttaaatttttccaaataagacatcagtttaggtcagaggtcagcaaactttttttgtaaagggccagacagtaaatgttttaggctttgcagactgtgtggcctctgtcacaactccccagttctgatgtgggggcacagatagcacagagtgaatgaacacagctgtgtcccaataaaactttatttgtaaacacaggtggctggccagacttagtatccaagctatagtttgccaacccctggtttagatagatatgcaggccatttgcataggtcactattctttgcagctctgtgattagacagaattaaaagattataggggaaaaactagattatgaccatgttaatcctttttactgttaggcagctgtatttggtatgttgtagattttttccttctcattttttaaaatagtaacaaataaataggcaatatagcatgacccagcagggttcctggcttggaatcagcttgaaattgagttgagtgtattgttgtggctttgaagtgcttttaatatggattggtaggcaattatgtcagaaataggaagccattttcaacaggcttcatacctgctgtgcaatgggactgactgagcaaatggatttttttagctttgaaaatgatgtgtggtgctgttctgatttttaaagcccatgttttaattcctcttagaagaaaaattattattctgcagcaagctctctaggtttatctacaagatgctacttgtcctaggaataggatcagtttttcatctgatttctattacacttagcattcaaatagatttgagatcattcttgaaataattttcaaaaatacataccagaaggtaatctgattcattaagtttggtaattatcaatctagcagtttacagacaccttattgtaaaaccagcttctttctcactgtgtaaccacaggatgcgggtgcatgtgaggacagtgaagccctcatgtgccagcccagttagtgaactagctcccaccttgacacttgtttggatgctttcaatgttctgtcgtgggtttgcaggggggagtaaactccccacggtgttccaggtgtgggagttattcattttagaacctctgaaaaaggacaaatgtttgtgatttttgaatcctagaaagggaaaatgaaagaggcagcccagaggtaccagtatgccttaagaaagtttcctcgagaaggattcggagaggacatgagacccttcaatgaattaagggtttccctctatctcaatttgtcgcgatgccgaagaaaaacaaatgtaagctgtgcccctttattccaacccagtcttccagcaacagagcccttctccagcagtgaaggccagcccttctccagaccagatcctgggccctcctgtccaatttgcttgcacatttacatgaacctggcatgtgggaaacagctcctatccgtgactatcgtttggtcacggctgctacgctcctcgcatgatgttgaaggaatgcacttgggtttcgtttccttggcctcagtaatgagaagcaaatgcagtctgctcctctgcagcttcccaacactgttgctgctggcactgccgtccccggattcaggagagtccaacccaagcctattgtggtgggcctgccttctgtgttaggtttgctcagagggtctgccagtaactaatttgtaaccggtcgtggggaactcatagtcgatttgtaactagtagatctgtttcagtagtacttcctaccttttttttaactgtgtcctcctgccccagtctgttgagctgcttgcttctgtgccctgctgccggaatagatgcagtgtctgcgctcctctctgaggctgcccctccaccgggctgtgaggttccaccatctggccttcttggggcactgttactaccactgttttcatagtggattcttctcctaatgatattaatcaaccatcattatctcctcactttaaaacaagatagaaaacggaactttcccttcctccctctctggctgtgcctcagagcgctgctaccctttagaacaaaactagacgggcttcccacaatcgtgtgtccaggctgcttctgactcctgtatttcttgtcgacaccaggactttggcatggcagaggaatttgcttccaaggctctcgaattgaagcccaagtcctatgaagccttttatgccagagcaagagcgaagagaaatagcaggcaattcgtggcagctctggctgacctgcaagaggctgtgaaactctgtcccaccaatcaggaagtcaagaggcttctggcccgcgtagaagaggagtgcaaacaactccagaggagtcaacagcaaaaacagcagggcccgctaccagctccactcaacgactccgagaacgaagaggacaccccaacccctggcttaagtgaccactttcactctgaggagactgaagaggaagaaacttctccccaggaagaatctgtttccccaactcccaggtcccagccatcctcatctgtcccttcctcatacatccgaaaccttcaagaagggttacagtccaaaggaaggccggtatcgccacagagcagggcaggaatcggcaagtccctgagagagcctgtggcccagccagggctgctcctgcagccctccaagcaggcccagatcgtgaaaaccagccagcacctgggctctggccagtcggcagtgagaaatggcagtatgaaagttcagatctcttctcagaaccctcctccaagtcccatgccagggagaatcgctgccactcctgctgggagcagaacccagcatttagagggaacaggtactttcactacaagagctggttgtggccactttggggatcggctgggccccagccagaatgtccgcctgcagtgtggtgagaatggccctgcacaccctttaccaagtaagacgaaaaccacagagaggcttctgtctcattcctccgtggctgtggacgcagcccctccaaaccaaggtgggctggcgacctgcagcgacgtgcgacacccagcttccctcaccagctcaggctcttctggttctccatccagcagcataaagatgtcaagttcaaccagtagtttgacttcgagcagcagtttttcagatggcttcaaggtccaaggaccagatactagaattaaagacaaggttgtaacccacgttcagagcggtacagctgagcacagaccccgcaacacgccgttcatgggcatcatggataagactgcgaggttccaacagcagagcaatcctccaagccgcagctggcactgtccggcaccagaggggctgctgacaaacacgtcttctgcagctggcctgcagtctgctaacactgagaagccctctctcatgcaagtgggaggatataataaccaagccaaaacctgttctgtttctaccctgagtgcaagtgtccacaatggggcacaagtgaaggagctagaagaaagcaagtgccaaattccagtccactctcaagagaacaggataactaagactgtttctcatctgtaccaggaaagtatctccaaacagcagcctcatattagtaatgaagcccacaggagccacctcactgcagccaaaccaaagcgatcatttatagagtcaaatgtgtgaaccttaagaaatccccatttgtggaatttggaaacgtgtgttgactcctggtggtaaattaaatagtttttttcatcagaaaaattattttttagccattttttttctttggggtggatctgatgccattgatatatctaaaatgtgggataaaacttctttaatagctagaaatcaccataaataagaatgctaaacagaattgaaaattatatcaacttaaaattttaagacagcccagaagacattaatgactctcacttatgaaattgtttggcttttgccactttcttccttgcctttgctatatggtagaatcacagaacttacttagagaataaatatgtctattgttcaagagtaacaggtttaactcatgaccaagtgatgtacatccaagtgatgtattctggaaacgatggaattttacagttacagttccattgagtcaaatcccattttatatatacataaaaattaagttctgagtgagttctagctaaatataagtgcgactgtaaacgcagccaatttttttaagcagaatatgagaacacctaagtattctcttcatagcagttcctataaagggattaaacacttatttctgtgttatggttcttattcatatatttttatagcacttttggaacctatatttgtgcttgaaggtgtttttgatatttggaaacagtataagccatttggagtcatgattggtggtcaagtggattcaagctaaaatactaagaccagcattcttagtggcgcttataaattagctctcacctggtttccaaactgcttttaacaatggtagtgctcctggaacaatccttccaagctcctctaaggacaatatttaattcagatactaaaggtaagactggttgttacttttgttttgttgtacaattagtactttatagtcacatgttgtatatattaaatagcccagttttattcagacttgtaaatagaactatttcaatgtagttaatctaaaaacaaaaaagaaaaccccagtcacgatttgcatgttctctgtaagcttcatccatgctggttattgcactgaatgatatattattagggcatgttaacagtataccagtaacagcactttatctcatttatatgaacacctttgaggtgctacttaagtccaagctctgatgtattattcatttgtaaagataaggtacaggaatgaaccttggtttaaaggtatttttatatgaaaatggtgtgttattggaagatgttaaaatgctaatttgagagaagtaggagtgtatctgttttatatgttgggatgtgaaatttattttctaaaattgaggagaaggaagttatatatttgcagaatgttttaaagtgaattgttgtaatgaagttcctgtgaacatcattatggttttgtacaaataggaacctctgatgtcattcttcaacgtttgttcctgtgtgtacaattgtactttgtatgaacagctttatcatttttataggctttccatgagttttgctgtaactactatggcttatttattttctttaatatttgtgaaagtcttactcctttgttagttttgtttctgcacaactactgtacttttccatatggaataaagactattaatagaa

SEQ ID NO: 21162 - DNA, 5169 bp, Homo sapiens
  misc_feature 1..5169: note = ENST00000308893
  source 1..5169: mol_type = unassigned DNA
accgccagtcgtgggacagagtgccgggctcctccccttgcaagtctagctcttctccccgcctcctccggcctggggtccgcgtggcggggcgggcgcgcactcgggcttggcggctgccggtctcccaggccgcggcagtgaggagagagggcggggctgagtcctctgcgcccccgccccctttagcccggcgtccctaccgcgcctgcgcgctcccgcccggtctccatcttggaattgggaggaagagggagagggagaccgggacgagaccggggctgtggtgcggagagaggctgagacggagaagaggagaggcagagagggcgcggggaccgtcagcagcaccttagctacaatcgttcagctattctcggaagagagaagggagagggaggaggccggggcgggagtgggggctgtcaccctcggaccccggcgtgagaggggccgtgcggccggacgtcctcggggtgggcccccagtcggtggccgaagacctacagctcaggcccctgggtcccaaatttccaggctttgcccctcctcctttctcagatacccgggtaacagtcctcatagtccagatatccgggactcgggtcccaacctctctaaacctgggtctctgtttcatagaatttcaaatatcaggttcaggcccctgcgtgcaccagtatccggggttcattccccgggcgttcaaatatcggattcagtctccatcccgttcagatattcggggttcagaccccacaatcagaaatccggaattcggcagctgtcgccctcgacgagggggaggactggaccgcgaggtcagattaggttgtcaccccctcccctccaggggaggcttcccgggcccgcccctcaggaagggcgaaagccgaggaagaggtggcaaggggaaaggtctccttgcccctctccctgcttggcagagccgctggaggaccccaggcggaagcggaggcgctggggcaccatagtgacccctaccaggccaggccccactctcagggcccccaggggccaccatgccagctgggggccgggccgggagcctgaaggacccagatgtggctgagctcttcttcaaggatgacccagaaaagctcttctctgacctccgggaaattggccatggcagctttggagccgtatactttgcccgggatgtccggaatagtgaggtggtggccatcaagaagatgtcctacagtgggaagcagtccaatgagaaatggcaagacatcatcaaggaggtgcggttcttacagaagctccggcatcccaacaccattcagtaccggggctgttacctgagggagcacacggcttggctggtaatggagtattgcctgggctcagcttctgaccttctagaagtgcacaagaaaccccttcaggaggtagagatcgcagctgtgacccacggggcgcttcagggcctggcatatctgcactcccacaacatgatccatagggatgtgaaggctggaaacatcctgctgtcagagccagggttagtgaagctaggggactttggttctgcgtccatcatggcacctgccaactccttcgtgggcaccccatactggatggcacccgaggtgatcctggccatggatgaggggcagtacgatggcaaagtggacgtctggtccttggggataacctgcatcgagctggctgaacggaaaccaccgctctttaacatgaatgcgatgagtgccttataccacattgcacagaacgaatcccccgtgctccagtcaggacactggtctgagtacttccggaattttgtcgactcctgtcttcagaaaatccctcaagacagaccaacctcagaggttctcctgaagcaccgctttgtgctccgggagcggccacccacagtcatcatggacctgatccagaggaccaaggatgccgtgcgggagctggacaacctgcagtaccgcaagatgaagaagatcctgttccaagaggcacccaacggccctggtgccgaggccccagaggaggaagaggaggccgagccctacatgcaccgggccgggactctgaccagcctcgagagtagccactcagtgcccagcatgtccatcagcgcctccagccagagcagctccgtcaacagcctagcagatgcctcagacaacgaggaagaggaggaggaggaggaggaagaggaggaggaggaagaaggccctgaagcccgggagatggccatgatgcaggagggggagcacacagtcacctctcacagctccattatccaccggctgccgggctctgacaacctatatgatgacccctaccagccagagataacccccagccctctccagccgcctgcagccccagctcccacttccaccacctcttccgcccgccgccgggcctactgccgtaaccgagaccactttgccaccatccgaaccgcctccctggtcagccgtcagatccaggagcatgagcaggactctgcgctgcgggagcagctgagcggctataagcggatgcgacgacagcaccagaagcagctgctggccctggagtcacggctgaggggtgaacgggaggagcacagtgcacggctgcagcgggagcttgaggcgcagcgggctggctttggggcagaggcagaaaagctggcccggcggcaccaggccataggtgagaaggaggcacgagctgcccaggccgaggagcggaagttccagcagcacatccttgggcagcagaagaaggagctggctgccctgctggaggcacagaagcggacctacaaacttcgcaaggaacagctgaaggaggagctccaggagaaccccagcactcccaagcgggagaaggccgagtggctgctgcggcagaaggagcagctccagcagtgccaggcggaggaggaagcagggctgctgcggcggcagcgccagtactttgagctgcagtgtcgccagtacaagcgcaagatgttgctggctcggcacagcctggaccaggacctgctgcgggaggacctgaacaagaagcagacccagaaggacttggagtgtgcactgctgcttcggcagcacgaggccacgcgggagctggagctgcggcagctccaggccgtgcagcgcacgcgggctgagctcacccgcctgcagcaccagacggagctgggcaaccagctggagtacaacaagcggcgtgagcaagagttgcggcagaagcatgcggcccaggttcgccagcagcccaagagcctcaaagtacgtgcaggccagcgccccccgggccttccactccccattcctggggctctgggcccacccaacacaggcacccctatagaacagcagccctgctcacctggccaggaggcagtcctggaccaaagaatgcttggcgaggaggaggaagcagttggagagagaaggattctgggaaaggaaggggccactttggagcccaagcagcagaggattctgggggaagaatcaggagcccctagtcccagtccacaaaaacatgggagcctggttgatgaggaagtttggggtctgcctgaggagatagaggagcttagggtgccctcccttgtaccccaggagaggagcattgttggccaggaggaggctgggacatggagcttgtgggggaaggaggatgagagtcttctggatgaggagtttgagcttggctgggtccagggcccagcactgactcccgtccctgaggaggaggaagaagaggaagagggggctccgattgggacccctagggatcctggagatggttgtccttcccccgacatccctcctgaaccccctccaacacacctgaggccctgccctgccagccagctccctggactcctgtcccatggcctcctggccggcctctcctttgcagtggggtcctcctctggcctcctgcccctcctgctgctgctgctgcttccattgctggcagcccagggtgggggtggcctgcaggcagcgctgctggcccttgaggtggggctggtgggtctgggggcctcctacctgctcctttgtacagccctgcacctgccctccagtcttttcctactcctggcccagggtaccgcactgggggccgtcctgggcctgagctggcgccgaggcctcatgggtgttcccctgggccttggagctgcctggctcttagcttggccaggcctagctctacctctggtggctatggcagcggggggcagatgggtgcggcagcagggcccccgggtgcgccggggcatatctcgactctggttgcgggttctgctgcgcctgtcacccatggccttccgggccctgcagggctgtggggctgtgggggaccggggtctgtttgcactgtaccccaaaaccaacaaggatggcttccgcagccgcctgcccgtccctgggccccggcggcgtaatccccgcaccacccaacacccattagctctgttggcaagggtctgggtcctgtgcaagggctggaactggcgtctggcacgggccagccagggtttagcatcccacttgcccccgtgggccatccacacactggccagctggggcctgcttcggggtgaacggcccacccgaatcccccggctactaccacgcagccagcgccagctagggccccctgcctcccgccagccactgccagggactctagccgggcggaggtcacgcacccgccagtcccgggccctgcccccctggaggtagctgactccagcccttccagcccaaatctagagcattgagcactttatctcccacgactcagtgaagtttctccagtccctagtcctctcttttcacccaccttcctcagtttgctcacttaccccaggcccagcccttcggacctctagacaggcagcctcctcagctgtggagtccagcagtcactctgtgttctcctggcgctcctcccctaagttattgctgttcgcccgctgtgtgtgctcatcctcaccctcattgactcaggcctggggccaggggtggtggagggtgggaagagtcatgttttttttctcctctttgattttgtttttctgtctcccttccaacctgtccccttccccccaccaaaaaaagaaaaagacaaacacaaataaaatatctgagcggaactgtg

SEQ ID NO: 21163 - DNA, 4072 bp, Homo sapiens
  misc_feature 1..4072: note = ENST00000543033
  source 1..4072: mol_type = unassigned DNA
tgcccctcctcctttctcagatacccgggtaacagtcctcatagtccagatatccgggactcgggtcccaacctctctaaacctgggtctctgtttcatagaatttcaaatatcaggttcaggcccctgcgtgcaccagtatccggggttcattccccgggcgttcaaatatcggattcagtctccatcccgttcagatattcggggttcagaccccacaatcagaaatccggaattcggcagctgtcgccctcgacgagggggaggactggaccgcgaggtcagattaggttgtcaccccctcccctccaggggaggcttcccgggcccgcccctcaggaagggcgaaagccgaggaagaggtggcaaggggaaaggtctccttgcccctctccctgcttggcagagccgctggaggaccccaggcggaagcggaggcgctggggcaccatagtgacccctaccaggccaggccccactctcagggcccccaggggccaccatgccagctgggggccgggccgggagcctgaaggacccagatgtggctgagctcttcttcaaggatgacccagaaaagctcttctctgacctccgggaaattggccatggcagctttggagccgtatactttgcccgggatgtccggaatagtgaggtggtggccatcaagaagatgtcctacagtgggaagcagtccaatgagaaatggcaagacatcatcaaggaggtgcggttcttacagaagctccggcatcccaacaccattcagtaccggggctgttacctgagggagcacacggcttggctggtaatggagtattgcctgggctcagcttctgaccttctagaagtgcacaagaaaccccttcaggaggtagagatcgcagctgtgacccacggggcgcttcagggcctggcatatctgcactcccacaacatgatccatagggatgtgaaggctggaaacatcctgctgtcagagccagggttagtgaagctaggggactttggttctgcgtccatcatggcacctgccaactccttcgtgggcaccccatactggatggcacccgaggtgatcctggccatggatgaggggcagtacgatggcaaagtggacgtctggtccttggggataacctgcatcgagctggctgaacggaaaccaccgctctttaacatgaatgcgatgagtgccttataccacattgcacagaacgaatcccccgtgctccagtcaggacactggtctgagtacttccggaattttgtcgactcctgtcttcagaaaatccctcaagacagaccaacctcagaggttctcctgaagcaccgctttgtgctccgggagcggccacccacagtcatcatggacctgatccagaggaccaaggatgccgtgcgggagctggacaacctgcagtaccgcaagatgaagaagatcctgttccaagaggcacccaacggccctggtgccgaggccccagaggaggaagaggaggccgagccctacatgcaccgggccgggactctgaccagcctcgagagtagccactcagtgcccagcatgtccatcagcgcctccagccagagcagctccgtcaacagcctagcagatgcctcagacaacgaggaagaggaggaggaggaggaggaagaggaggaggaggaagaaggccctgaagcccgggagatggccatgatgcaggagggggagcacacagtcacctctcacagctccattatccaccggctgccgggctctgacaacctatatgatgacccctaccagccagagataacccccagccctctccagccgcctgcagccccagctcccacttccaccacctcttccgcccgccgccgggcctactgccgtaaccgagaccactttgccaccatccgaaccgcctccctggtcagccgtcagatccaggagcatgagcaggactctgcgctgcgggagcagctgagcggctataagcggatgcgacgacagcaccagaagcagctgctggccctggagtcacggctgaggggtgaacgggaggagcacagtgcacggctgcagcgggagcttgaggcgcagcgggctggctttggggcagaggcagaaaagctggcccggcggcaccaggccataggtgagaaggaggcacgagctgcccaggccgaggagcggaagttccagcagcacatccttgggcagcagaagaaggagctggctgccctgctggaggcacagaagcggacctacaaacttcgcaaggaacagctgaaggaggagctccaggagaaccccagcactcccaagcgggagaaggccgagtggctgctgcggcagaaggagcagctccagcagtgccaggcggaggaggaagcagggctgctgcggcggcagcgccagtactttgagctgcagtgtcgccagtacaagcgcaagatgttgctggctcggcacagcctggaccaggacctgctgcgggaggacctgaacaagaagcagacccagaaggacttggagtgtgcactgctgcttcggcagcacgaggccacgcgggagctggagctgcggcagctccaggccgtgcagcgcacgcgggctgagctcacccgcctgcagcaccagacggagctgggcaaccagctggagtacaacaagcggcgtgagcaagagttgcggcagaagcatgcggcccaggttcgccagcagcccaagagcctcaaagagaggagcattgttggccaggaggaggctgggacatggagcttgtgggggaaggaggatgagagtcttctggatgaggagtttgagcttggctgggtccagggcccagcactgactcccgtccctgaggaggaggaagaagaggaagagggggctccgattgggacccctagggatcctggagatggttgtccttcccccgacatccctcctgaaccccctccaacacacctgaggccctgccctgccagccagctccctggactcctgtcccatggcctcctggccggcctctcctttgcagtggggtcctcctctggcctcctgcccctcctgctgctgctgctgcttccattgctggcagcccagggtgggggtggcctgcaggcagcgctgctggcccttgaggtggggctggtgggtctgggggcctcctacctgctcctttgtacagccctgcacctgccctccagtcttttcctactcctggcccagggtaccgcactgggggccgtcctgggcctgagctggcgccgaggcctcatgggtgttcccctgggccttggagctgcctggctcttagcttggccaggcctagctctacctctggtggctatggcagcggggggcagatgggtgcggcagcagggcccccgggtgcgccggggcatatctcgactctggttgcgggttctgctgcgcctgtcacccatggccttccgggccctgcagggctgtggggctgtgggggaccggggtctgtttgcactgtaccccaaaaccaacaaggatggcttccgcagccgcctgcccgtccctgggccccggcggcgtaatccccgcaccacccaacacccattagctctgttggcaagggtctgggtcctgtgcaagggctggaactggcgtctggcacgggccagccagggtttagcatcccacttgcccccgtgggccatccacacactggccagctggggcctgcttcggggtgaacggcccacccgaatcccccggctactaccacgcagccagcgccagctagggccccctgcctcccgccagccactgccagggactctagccgggcggaggtcacgcacccgccagtcccgggccctgcccccctggaggtagctgactccagcccttccagcccaaatctagagcattgagcactttatctcccacgactcagtgaagtttctccagtccctagtcctctcttttcacccaccttcctcagtttgctcacttaccccaggcccagcccttcggacctctagacaggcagcctcctcagctgtggagtccagcagtcactctgtgttctcctgg

SEQ ID NO: 21164 - DNA, 4246 bp, Homo sapiens
  misc_feature 1..4246: note = ENST00000279394
  source 1..4246: mol_type = unassigned DNA
agaatttcaaatatcaggttcaggcccctgcgtgcaccagtatccggggttcattccccgggcgttcaaatatcggattcagtctccatcccgttcagatattcggggttcagaccccacaatcagaaatccggaattcggcagctgtcgccctcgacgagggggaggactggaccgcgaggtcagattaggttgtcaccccctcccctccaggggaggcttcccgggcccgcccctcaggaagggcgaaagccgaggaagaggtggcaaggggaaaggtctccttgcccctctccctgcttggcagagccgctggaggaccccaggcggaagcggaggcgctggggcaccatagtgacccctaccaggccaggccccactctcagggcccccaggggccaccatgccagctgggggccgggccgggagcctgaaggacccagatgtggctgagctcttcttcaaggatgacccagaaaagctcttctctgacctccgggaaattggccatggcagctttggagccgtatactttgcccgggatgtccggaatagtgaggtggtggccatcaagaagatgtcctacagtgggaagcagtccaatgagaaatggcaagacatcatcaaggaggtgcggttcttacagaagctccggcatcccaacaccattcagtaccggggctgttacctgagggagcacacggcttggctggtaatggagtattgcctgggctcagcttctgaccttctagaagtgcacaagaaaccccttcaggaggtagagatcgcagctgtgacccacggggcgcttcagggcctggcatatctgcactcccacaacatgatccatagggatgtgaaggctggaaacatcctgctgtcagagccagggttagtgaagctaggggactttggttctgcgtccatcatggcacctgccaactccttcgtgggcaccccatactggatggcacccgaggtgatcctggccatggatgaggggcagtacgatggcaaagtggacgtctggtccttggggataacctgcatcgagctggctgaacggaaaccaccgctctttaacatgaatgcgatgagtgccttataccacattgcacagaacgaatcccccgtgctccagtcaggacactggtctgagtacttccggaattttgtcgactcctgtcttcagaaaatccctcaagacagaccaacctcagaggttctcctgaagcaccgctttgtgctccgggagcggccacccacagtcatcatggacctgatccagaggaccaaggatgccgtgcgggagctggacaacctgcagtaccgcaagatgaagaagatcctgttccaagaggcacccaacggccctggtgccgaggccccagaggaggaagaggaggccgagccctacatgcaccgggccgggactctgaccagcctcgagagtagccactcagtgcccagcatgtccatcagcgcctccagccagagcagctccgtcaacagcctagcagatgcctcagacaacgaggaagaggaggaggaggaggaggaagaggaggaggaggaagaaggccctgaagcccgggagatggccatgatgcaggagggggagcacacagtcacctctcacagctccattatccaccggctgccgggctctgacaacctatatgatgacccctaccagccagagataacccccagccctctccagccgcctgcagccccagctcccacttccaccacctcttccgcccgccgccgggcctactgccgtaaccgagaccactttgccaccatccgaaccgcctccctggtcagccgtcagatccaggagcatgagcaggactctgcgctgcgggagcagctgagcggctataagcggatgcgacgacagcaccagaagcagctgctggccctggagtcacggctgaggggtgaacgggaggagcacagtgcacggctgcagcgggagcttgaggcgcagcgggctggctttggggcagaggcagaaaagctggcccggcggcaccaggccataggtgagaaggaggcacgagctgcccaggccgaggagcggaagttccagcagcacatccttgggcagcagaagaaggagctggctgccctgctggaggcacagaagcggacctacaaacttcgcaaggaacagctgaaggaggagctccaggagaaccccagcactcccaagcgggagaaggccgagtggctgctgcggcagaaggagcagctccagcagtgccaggcggaggaggaagcagggctgctgcggcggcagcgccagtactttgagctgcagtgtcgccagtacaagcgcaagatgttgctggctcggcacagcctggaccaggacctgctgcgggaggacctgaacaagaagcagacccagaaggacttggagtgtgcactgctgcttcggcagcacgaggccacgcgggagctggagctgcggcagctccaggccgtgcagcgcacgcgggctgagctcacccgcctgcagcaccagacggagctgggcaaccagctggagtacaacaagcggcgtgagcaagagttgcggcagaagcatgcggcccaggttcgccagcagcccaagagcctcaaatctaaggagctgcagatcaagaagcagttccaggagacgtgtaagatccagactcggcagtacaaggctctgcgagcacacttgctggagaccacgcccaaagctcagcacaagagcctccttaagcggctcaaggaagagcagacccgcaagctggcgatcttggcggagcagtatgaccagtccatctcagagatgctcagctcacaggcgctgcggcttgatgagacccaggaggcagagttccaggcccttcggcagcagcttcaacaggagctggagctgctcaacgcttaccagagcaagatcaagatccgcacagagagccagcacgagagggagctgcgggagctggagcagagggtcgcgctgcggcgggcactgctggagcagcgggtggaagaggagctgctggccctgcagacaggacgctccgagcgaatccgcagtctgcttgagcggcaggcccgtgagatcgaggccttcgatgcggaaagcatgaggctgggcttctccagcatggctctggggggcatcccggctgaagctgctgcccagggctatcctgctccaccccctgccccagcctggccctcccgtcccgttccccgttctggggcacactggagccatggccctcctccaccaggcatgccccctccagcctggcgtcagccgtctctgctggctcccccaggccccccaaactggctggggccccccacacaaagtgggacaccccgtggcggagccctgctgctgctaagaaacagcccccagcccctgcggcgggcagcctcggggggcagtggcagtgagaatgtgggcccccctgctgccgcggtgcccgggcccctgagccgcagcaccagtgtcgcttcccacatcctcaatggttcttcccacttctattcctgaggtgcagcggggaggagcagatgagctgggcagggcaggggtgggtggagcctgaccctggagggcactgagctggaggcccctgcaagggtaggggacaagatgtaggctccagctcccctcagacctcctcatctcatgagcttcttggggctggccagtggcccagggccagcttggcgataggtgcctcaaggctgcctgggagccccgcctccctaccatggtgccaggggtctccctccgccacctaggaaaggagggagatgtgcgtgtcaaatattcatctagtcccctgggggaggggaagggtgggtctagacatactatattcagagaactatactaccctcacagtgaggccctcagacctgccacagggcagagcaggtctggggcctgaggcagggagaatgagaggccaccttactggcaggaaggatcaggatggggtcttggggtcaggatgcctgggtctcttcccgtaactgtctgacgtcctgtgccgtcttgtcctttatctttttttttttttttttaattgggatcagggctggggcggggaaacaagggaaggaccttggaaggggctgctcccaggcctggggggcagtcgtgggagcccctctcagctgtggggctggcacagagccccaggcaagcttttaataaactgttggttattctaacaga

SEQ ID NO: 21165 - DNA, 4780 bp, Homo sapiens
  misc_feature 1..4780: note = ENST00000416441
  source 1..4780: mol_type = unassigned DNA
ctcccttccagtctgtcttaagtactgatgccagagaggtctgcctaagctcagtgctgtcatttcactccctgtttggagccatgagtggccccctgttgccttcaagactgaagccatccccatccttcctcccaccaacctagaggctttgcttcgtaaatgctggccctttccttcatgggctccaccctctgagtgtgtcatgaactcttccacttccttgccttggttcgtattgggtcctctgcccgaggtcagagatttggacgagcccttctcctccatcttcacagtctccatttaccattagatgccaggcccagacagttgatgaaaaatgtaagaaacggacccaagtataagaaaaagctagatctgtccattttatttctagtttttggaagagatgtggatacagagaaatattactctactattgaaaaaaatatatatcagtctgattataaatgtcaactcatactaagtcaatatcagggaagcagtgtggagaaggatgtggcaaactggagattgctgtttccatagaaagagggcagctaatgcttatctccagaccattgttatgcagtaatgtagactccatttcaccagatttaattcttaaggagaaactggaaacttgtattattatttgattattacttttggcagttaattttaaaaatcaccgtttaggccaaaacaacatgacatttgtctgggctacaagggactcttagcgactcttagcttgcacttacctttctaatctcagggctttttacaaagcccttctctgaattccctgaagatatgctagcttgaaggctcactgcatactctcaacttcccagccacttccctgtttccctcttataccagttaatactttgatgttattttttcagtcctatttaatcttttagactggaggttccttgagggtggggcctaattcttgtttttatcttccccatagcaattatcaagttatctgctccctttggcacctaagaaatattagttggggtgataactgaatggctgtccttctgccttcgttactgcttttgtggatgttattttctttgacccctattccacccgtgtgcagtggagaggatgggtgttgtattttacagaggaaggaattaactgagacgcaacaggatgatgggaacttctcaaggtcatgtggcaaggaagtcaaggaattggggtttgaacccaagtcgtctcagttccattccattgtcctctaccccctgccacctctcaccttcttccctttcacctttttctgtagctgaacggaaaccaccgctctttaacatgaatgcgatgagtgccttataccacattgcacagaacgaatcccccgtgctccagtcaggacactggtctgagtacttccggaattttgtcgactcctgtcttcagaaaatccctcaagacagaccaacctcagaggttctcctgaagcaccgctttgtgctccgggagcggccacccacagtcatcatggacctgatccagaggaccaaggatgccgtgcgggagctggacaacctgcagtaccgcaagatgaagaagatcctgttccaagaggcacccaacggccctggtgccgaggccccagaggaggaagaggaggccgagccctacatgcaccgggccgggactctgaccagcctcgagagtagccactcagtgcccagcatgtccatcagcgcctccagccagagcagctccgtcaacagcctagcagatgcctcagacaacgaggaagaggaggaggaggaggaggaagaggaggaggaggaagaaggccctgaagcccgggagatggccatgatgcaggagggggagcacacagtcacctctcacagctccattatccaccggctgccgggctctgacaacctatatgatgacccctaccagccagagataacccccagccctctccagccgcctgcagccccagctcccacttccaccacctcttccgcccgccgccgggcctactgccgtaaccgagaccactttgccaccatccgaaccgcctccctggtcagccgtcagatccaggagcatgagcaggactctgcgctgcgggagcagctgagcggctataagcggatgcgacgacagcaccagaagcagctgctggccctggagtcacggctgaggggtgaacgggaggagcacagtgcacggctgcagcgggagcttgaggcgcagcgggctggctttggggcagaggcagaaaagctggcccggcggcaccaggccataggtgagaaggaggcacgagctgcccaggccgaggagcggaagttccagcagcacatccttgggcagcagaagaaggagctggctgccctgctggaggcacagaagcggacctacaaacttcgcaaggaacagctgaaggaggagctccaggagaaccccagcactcccaagcgggagaaggccgagtggctgctgcggcagaaggagcagctccagcagtgccaggcggaggaggaagcagggctgctgcggcggcagcgccagtactttgagctgcagtgtcgccagtacaagcgcaagatgttgctggctcggcacagcctggaccaggacctgctgcgggaggacctgaacaagaagcagacccagaaggacttggagtgtgcactgctgcttcggcagcacgaggccacgcgggagctggagctgcggcagctccaggccgtgcagcgcacgcgggctgagctcacccgcctgcagcaccagacggagctgggcaaccagctggagtacaacaagcggcgtgagcaagagttgcggcagaagcatgcggcccaggttcgccagcagcccaagagcctcaaagtacgtgcaggccagcgccccccgggccttccactccccattcctggggctctgggcccacccaacacaggcacccctatagaacagcagccctgctcacctggccaggaggcagtcctggaccaaagaatgcttggcgaggaggaggaagcagttggagagagaaggattctgggaaaggaaggggccactttggagcccaagcagcagaggattctgggggaagaatcaggagcccctagtcccagtccacaaaaacatgggagcctggttgatgaggaagtttggggtctgcctgaggagatagaggagcttagggtgccctcccttgtaccccaggagaggagcattgttggccaggaggaggctgggacatggagcttgtgggggaaggaggatgagagtcttctggatgaggagtttgagcttggctgggtccagggcccagcactgactcccgtccctgaggaggaggaagaagaggaagagggggctccgattgggacccctagggatcctggagatggttgtccttcccccgacatccctcctgaaccccctccaacacacctgaggccctgccctgccagccagctccctggactcctgtcccatggcctcctggccggcctctcctttgcagtggggtcctcctctggcctcctgcccctcctgctgctgctgctgcttccattgctggcagcccagggtgggggtggcctgcaggcagcgctgctggcccttgaggtggggctggtgggtctgggggcctcctacctgctcctttgtacagccctgcacctgccctccagtcttttcctactcctggcccagggtaccgcactgggggccgtcctgggcctgagctggcgccgaggcctcatgggtgttcccctgggccttggagctgcctggctcttagcttggccaggcctagctctacctctggtggctatggcagcggggggcagatgggtgcggcagcagggcccccgggtgcgccggggcatatctcgactctggttgcgggttctgctgcgcctgtcacccatggccttccgggccctgcagggctgtggggctgtgggggaccggggtctgtttgcactgtaccccaaaaccaacaaggatggcttccgcagccgcctgcccgtccctgggccccggcggcgtaatccccgcaccacccaacacccattagctctgttggcaagggtctgggtcctgtgcaagggctggaactggcgtctggcacgggccagccagggtttagcatcccacttgcccccgtgggccatccacacactggccagctggggcctgcttcggggtgaacggcccacccgaatcccccggctactaccacgcagccagcgccagctagggccccctgcctcccgccagccactgccagggactctagccgggcggaggtcacgcacccgccagtcccgggccctgcccccctggaggtagctgactccagcccttccagcccaaatctagagcattgagcactttatctcccacgactcagtgaagtttctccagtccctagtcctctcttttcacccaccttcctcagtttgctcacttaccccaggcccagcccttcggacctctagacaggcagcctcctcagctgtggagtccagcagtcactctgtgttctcctggcgctcctcccctaagttattgctgttcgcccgctgtgtgtgctcatcctcaccctcattgactcaggcctggggccaggggtggtggagggtgggaagagtcatgttttttttctcctctttgattttgtttttctgtctcccttccaacctgtccccttccccccaccaaaaaaagaaaaagacaaacacaaataaaatatctgagcggaactgtg
